United States Patent Application Publication US 2014/0325702 A1 - sequence listing, part 9

SEQ ID NO: 7484 - DNA, 1069 bp, Heterodera glycines
cttgcaggaatggcacgtgaacggcccgggctcgacgcttttcgaagaggatggagggactgtaaggaaatgggggacgatcagatcagaataggacaaattctgatcaaaaagcagtgatcagaaagggacaaatattgatcaagaagcagtgatattgtaaggaacagagaaaggaaaaaggatcggaatgggaagaattggaaccaaaaatagtgatcagaggaataacatgccgaccaaaatagtgccatcccacctggtgcttctgctggagctgcttcctcctcccttttgctgtgctgttcgaagtcggccgtgtcagtcccttgctcgcgacggccgttgccgctcggccagcagcactggtgttgttgtgccgattgcacgcgactgctacagcccgtgctgggcgtgtgctgcagcagcaaaccgttggcagaatttgaacggtgtaattgtcgaggattatgctgaatggggtgggagtgaagtggtggtgaggtgagaaaggtgaaatgatttgggaaaggggggaggggaaatgccgaaaaaggataagccaaaagagagagggggagggagggataaccgaaagccaagagggaaaggaggggaaaggaggacaaacggatttccccaacgaaaatgccatccctcccacaattctccgatcaccgaccatttcgtattgtctttgccttcgctgtctttcctccttggcgttgtgcattgaacatgtttgggtgggcgagaacagcaacaaatcgctgtggtcgctgaacgaagtttgttctgtgggggctggcggcagcggaggcgacgcggcggaaaccatttcatcagcggaagcgagcagacccaacggggaggaggaggcactcgacttgtccgtctgctgaatgaaagtgattagcttaaataggaggggggaaatgcccgcggggagtgcccaatgaattggtcaagggcaaattctaccgtatcacactacagtacacccaacaacatttgttgtacctgacagcgtacaattctgtgctcgatgaatgcgctgaactcgctgatg

SEQ ID NO: 7485 - DNA, 2921 bp, Heterodera glycines
cgctaaattttttttttataaattcctattttgataaaatttttagggcgggagatacgggggtgggggtagaatgaactgttctcgaccgataattgccaatttgatcggtcgcccccccccccatccaattgtccttaaatgtccttccgtgccgtacttcttccatcggctcttcctccacctcctcttccatgcctctcctgctgctctcttccgcttcgtcctcttccatcgcttcttccgcctgtttcttccgtggccgtcccctccggcgctttgtccccgcgacatttgtcctgccgtttaacgcttcgccagcactcgtcgactgcacaaacaaccaaatgaattttctttatgactactgtactaccgtaacggggttgttcgtcgtccgttgcgtttgcctcggcgtgccgtaacttttggcaccgctcgcgcctttccccggcggtgtccccccattcggctcctcctccgcgatggatgtcaaatgggcgttgttcacattgtggttgtggggctgctgctgatgccgtgccattgttgtcaccacaacatttgtgcacaaaaggccttcctccgccgcgttggactcggaaattccgctgtcggaagaggccaaaggggtgccatctgacggaatgccaacccggtaacaatggcattgccaattcaaaatgatgattggcacctccttgcttcgtcggtttgtccgaagcctgcgcttcctccttcggtcggtccttctgctccgtctgatgcccttcttgcccatcgtctttgttgttcatctcctgctccacctgctgctgcacaattcgctttcggcccctccttttgggtccattcgtcgccgcgggggcgttggccaacgacggggcgcttctgccgctgccgcttgggttgcgatgctttccaagcgcagttggggcggagcaaacggaagaagtgaccatctcaaaacaacaagcaatgttttttgagtgcgcatttcttgcatttctccaccaattacgcttttcaacctttcgatcagttcctttccttcccttggcttttgcccgtcgacttttcatcctttttgggcttttccaatcactgatcagtttttgtattcctcgttcccctccccatttatcttaggctttccttaattccttttcccacttccgatcactttttctgttcctcatcccccccccccctcgcttcccctccccttccgcttcatctcctcctttcccctctttttccccttggccatgtcccacttgttgctgttgctgcttctgttggaggaggcggttgcgactgcgcagtcgcgccccaccgccgcctccgctgcttccgccgctatttgcgctttgtctgtccggcgaaggcgttttggcggatgaatttgttgtgtgtgaagaaagtgagcagaagtgaagtgaagagggaaatgaagaagaagaaaattatggggacgaagaagagaaattggcaatgggaaaggaaaaattgggagaaaaaagggaggcgaaaagggcgaggaattcggagaaaaatttgaggacgaccggcgatcaccgggaaaagggcaattattgtgctgcagggaagagtggtaaagtgaggatatgataattggaaaaacaaaaagcaaatgatcagatggggacaaaaccaatggcaaaaggggagagagggggagggggggggggtgaatgatcagatcaacttaggaaggagaggggagggaatggacagcaaatgatcggatcaacgggggctggacttataagctttgccattgccgtttttcacattttgccatttttgccgtgttttctgagaatggtcccacctttctctccccactacatggattctctgcttctgctgctttgtttgagaaacgtggccatttttactgtgccgcgtttcttcagcgaatggtcaaaagaaagaaattggcgaaaatgtcagaaattttggcgaaattttgtagggaaattaaaaaggaaaatttattgatgaagaatatctaaaagataataatttttaatcggaggggtgccaaattcgccaaaaaaggcctcggcccatgctatgccatgtccacaccccaacaaaaacaacaaatggataaaatcgttggtttttcgtaaaaatgcccctcaaaaacccctccccccccctttccccctttctctctctctctttggcccttccgtctgtccgtcggttgtttttgccgtcgttttctgttgtgtgtattttttgcggctgtgtttagcgggcaaaattggcggttggttcgatggatgggctgacgggggacagagggaaaggggggggggggagtggccgcctcttccgacggcgatgccgtcgcaaaaggactggcaaaggaagaagcaacggggaaaggaccggcggaccctcaggggacactttcgtccgtctggaccgtggacaagcgcgggtggcaaagagagtccccagcatcggagggagcattttgcgaataaacgaagcgtaacaaaaatgccatttgaaatgaatgtggtggcttaattgttcggattcaaatgcaattcgttttggatcaattaattaattatttcaataataatcagtcgtagcaaaattacaaaataattcttatgtttttagttgttttttgttttgtaatggcaatttattcgctttgtctttggtactctttcggcccctctcactcttttctttccctcgggccactaaaaagggactcgccgtttctttcttctctgtctgttgtgtttttagtacaacggacaaagcggcggccggaatgggcacagaatgccaatgggcggtgggagggggggggggggaagcgggcgaatggacagaacgaacgacgggcccacgggggaggggaaatg

SEQ ID NO: 7486 - DNA, 2042 bp, Heterodera glycines
aaaaaaagttttgacctgagaaggtttaaaaacccaatttttttttaccatttttagtcatagcttttttgaatcttatgggaaatttttgaaaattttgtagggtaatagaaaacccttaggcctatcgaatgatatcaagaattaaaaatttagatgcttttgagcaaaattatatcaaaaaatattttcatttgatggttttttgactaacgtcatagcaccgtttaatttcatttttaatttacatttttcatcataatttttttttcttcagcaatatattgtaaatggaggaccaagacaaacaaaatcaacaggaaaggaatgataaaaacgacagccaagaagaaccagaacaaaaacacaaaaatcaggaccaaggtcaacaaccacaacaacatgagcagcaacagcatcaaacttcacaggatggcaatgggcatgcgaacggcgatttattgagcagaactttatcaatgccggcccgtgtgactggctcagatttcgtatcagcggatgtgaatgaagtgttggaggatgcacgacaaattatgacaaattcgcaccaacgaaaagacgaccatcatcaaaatgaacaagtgttggtcagtcagtttgatgatgacaatttaaatatgggaaagctaaaaaagcgcaatttgttaggacgaatcaatgcgggtcaaagtgacgaagacaggaggtgacgaagaccctttggaagtgtcggtgtggcggtcaagactgctcagacgtcaggccgaagaagaagcgacggaggctgctgatgctgatgcgagaggtaattcaggggggggagataaagccaagagggaaaagttgggaggaaaatgacaaacatggcataaatgccggtaaatgaccaaaagggaccatttaaagccgctttaaaggacccctcatcagaggaatgaatttaaagggtttgaatacaaaaacgaatctttcgccaagagaaatttgaattaaaaaaatgccaaatttcacgcaaaagtccccgaataaaaaagggagaagtgacgggactcattcacttcactcatcactgctcggaaaagtgtccctctctctcgcgaggcgttcgatcggtcgattcgaatgccttcagagagcccaagagaattcatccattggtacagctgctgaaggaggggagggaaggacagaaaaaagagagaataaaagaaaaaatgaaggggaattggagagggggtgagagaaaggggcagatggagaggttataggcagagagagagagagagaaagggcattattggaaaggtcatagccgggcaggagaggcagagtgagtgagtcggtgtccatcggctggcgcgaaggcggtcggcgaacacaaatcggccaggcccaggccaggacagccacgtccgtccgtccgtccgtcaccgctcgctaagcgtatgaggaagaggaagagaaagagaaataaaaagaaatagcgaaggaacagagagacaaaggacagtgatcaaaaggccatggccttttccttttctctccttatttttactctgctattctgtcggatgtgttcgtcatgctctctctttctctctccgtttctttctttctcatccacctcttctcccccattctctctgtttgataaaatgggccgtggccatccgagcgtggccatggccagcagatgtggtgccctgagggcactcattcgccgctgatgtgttggaattagtgacagccgatggcaaaaaaacccgctcagttcaaccccttgggggggggggggggagacggcccatgggacacttcttatgtctctgcctgtccctcctccctcaatgcactctctcctcccatgcccactttctttctctttcgcctcattggaaaaaaaaggggagggggagggaagaggaggttggaaagtgtcccgtgaccatcgaaagggaaaaagaaaaaggacatatacaaaaaggaaaagggggagggaaaaggagagagcggaaaagaagtaagaggaaaaggaagaagag

SEQ ID NO: 7487 - DNA, 3114 bp, Heterodera glycines
tgctaaattttgttcaatttccgaatatgaagagatttatcaccccggctaacaactactttttgaaattgactccggaaaaggaaaatgaggggtttgttgaactgttttattattattcttattattatttaaatattattcattaaatatttaaagtgtaggagaagcaaatgatgtgggtggaaagaagaagaagccaaaaattggaaatgaggacgaaaagagcactgagactcgtaaggaggaacatcaacaacagcagcaagaagtgcaagcagatgaatcgcctgcaaaagaacgaaaagtggaggaccgcgagttgtggaagctttgcaagggaaaattcatgctttctacctacttatgccagggtaattgtataattatacctataaatgtgaaatgacaatttttaagatgactggaaccatctttaccacaacaagcaaaaagtgacacgtttggaaaatggacgctactccgtcagctatgagctttgtcccgagtgtgtgtgggcaaactgtcgagcaactgaccttgtggcaccaatgaagaaaaaaggaaaatgaccaaaaaataataacaataacgaacgattgattgattgaccgatttattttgctatttatttttatttaatcgaattaatgtaataaattttgagaacatctctcaatttttagtctttcgggcatcgcatgggttattactgaatacttaattagcgtctttattgccaatttgaatctgtcaacggattgagagacaagggatgggaaggggacgaaggggagatggctggtgtggttgagacatcgctgcgcatttcatttgtctttgttgtgctctcggttacccccaaaattatttaattaaatttaaggaaaattatttcaaatggagagtgagcttattgctcaagtaaaggaatactgcgacgccttcctgtcattgaaagtccatgttaatgacttgaaaaacatggcaatcaatttgtcttcaagaacagaattaattgaaaagtgggccaccaattcggtataatattagatattttacttttatacacttgaataattttagcgctatagcccatacccaaaaggaattggctcaacaatggcaccggcagttatgcgggaatcatttcaactgttaaagcaacagtcgaaccaacgacaacaactggaacaacgaattttgcgcgacggcaatttcgaagaaactgtcatgcgcactgcgattgcgtcactgaaaggcacaatcaatgcggcatcggctgcccaatcatcatcaccaacgccacttgatgatgcaccgacttcatcatcatcatctatgccaaaaattgcccaaaagcgcaaatatatggccaccgatggtctgttgtcggaagaggacaggggtaatttgattttaatttgaataaatttataaataaatatttttcaaaagaagtcgccgccctcgcacttgctgccttcaatcatctgaaggtgcacattgagcagaaacaacaaactttggagctaaaactcaacaaaattgagcatgagtcaaaggcaaagagcgaatggcagatgcgacaactgatgaaatcattggaagcaaatttcaaactacagattatgagtatggagcaacggcttgacagaaaatggtcagcattgattggaaaagaaaaggaaagagctcagcgaatagcgacacaggcggctacggtgatcggtgagttgattgcggaaggaggaggaaaggggaaggaaaaacaatgcagtggagtgatgtggagtgacaaatgtaagtggtgtctggatgctgggaatgtatgttttggatcatcaaactgtggtcatgcttttgtttgtcctcagtgttctattactattgcgggatctgatcaaccaaaatgtctcacatgtttttgtgaatctactgaatttgtgtacttaggtatggaaaaataatcataaaaaatgaataattttttttaacttaatcagcatttgttgtttttatattccttaatttctaatgcattaattaatttatttattttgtccatcatttactttatcatcacttattgctttttattccttaatttcaaatgcattaatttatttgtattgtacttccatttatttaatcaacatcttttttattccttaatttgaaataatgttgtacaaccttttatttaatcaacgtttattgcttatgtatttcttaatttcaaatgctttaattaatttatttgtattgtgcttgcatttatttattcatcatttaacttgaaaatgtaataatttaattatttgattgtccatccatccatccatccatcaatttacttaacatcatttcaaatcattcattcactgctcttcctcatcaacatctttatgaccatcctcgctaacacatttcgccatgcaattgggaataaattcccgtgtcaattcggccttggccttcaaaattttgttttaaaaacccctttaaaaatacaccttttttttcatgtcggcttccacgtcgcacccaaaagtaacatttaatcctcgaatgtacggcactgggaccgtatgtttgttgcaaacgaaaaggaaaaaaatttttattttttaatgtcattaaaaatgcctttttggtagcggggattagcctcaatgtcgctcatgaggctacccgccacgcgctctcccaagagcaggcgtaataccgcgtcaattccagcgcgagaattaaacttgccaacagattcggaacattcggtatcactggccaatacccagcactcttctccgggtgcgcctgacacacacattaattaagcatcaataatcagaactacaccccccccactaaaaataataccaaacaataggagcatttcagtattttattggttaactctcacatttgttcaatttgagtgaagcatgtaggctagtcagacagctaacccgcaccggagtgtaggctagacaatcagccaacccgcacacccaccctaaccaaagaaatgtatgagcaaaaacactaaaatattgaaaagttcctattatttttgtgttatttttatggtggagggaaatgacgtcaata

SEQ ID NO: 7488 - DNA, 2824 bp, Heterodera glycines
  unsure (1)..(2824): unsure at all n locations
atcagctgcagtaaaaaggcccaagaatggccctcactcgaaacagtccttttttgttcggtcctgtcttctttggtctctgacgcgccgtcgatttgacaaacattcctgtgcccgttgatttgttgctgttttttcgtcgtctttttgcgctttctntagtctgggacagttcctcaaatagaattttttaatttacaagtgtgtgtgtgtgtgtgtgtgtatgaaatgattattgacaaattttaagattaaaaaaaaggaaccaagcgaaattggtataaaaacattttttttggctttccgtttacccgacagcttgttgaccccgtcccccgttgtccaaatattttttttacaggcacggttgatgatgccaaagtgccaccgctgcccccgtcgctttcatttccattgttcgtcgggtccttttgttaaattaaatttaattaattaatgtttggtaagcccaaaaccacccattaccatcattttaactgccgcccgctttcccaattgtttttttggtgccaaaatgtcgcctccatcgctttcttcttcattgttctggtcctgtttatgttaaattaaattgataccgtttggcaaacccaaaaccacccattaccatcattttaactgccgcccgcttttccagttgtttttttggtgccaaagtgtcgcctccgttgcctccgtcgctttcttctccattgttcgggcccagttgctgttaaattaaattgaggcgcttgtcaagcccaaaaccatccattaccatcattttggctgccgcccgcttttccagttgtttttttccaggcgcggttgatgatgacaaagtgccgccgctgccatcctcagtttccgattccttttgaatttaacaatttttaattgtactttgcaaacccccccccccccctcctcaccgtcattttggccgcacgttttccagaccgcaaaaccatagccattttaaaaacaattacggaatggctaaaaaatgtagcgaatttaaatgagcaaatgtaattcggaacattttttccaatggaatgaccccccgcctccctcacattttccaacataaaaatggcgtccttttctccgttccattccataatcgattgttgagctcccccctccccctcacatatacatatatttgcacaaaaagttttttattttgttcagatgacgtaaattcaaattagaataatgattatatttgaatttttattacaaaaattggtgattaaaaaaaaaccaggcgtcccattcccccccccgtccgatgcataaattaaatattgacgacggtccctgccctccgggcctccccctccccctcctctgacgacggtccctgccttccgggcctcccccttcctctgacgacggtccctgccctccgggctcccccccatcgcgtgccgcccgcctctgacgacggtccctgccttcctttcccgcacacacccccaccccgcacaatgcgcgacacctcccccctcccggaccccctcccccctcctctgacgacgctcccggctctcccacaggcacgggtttgtgcgcgaaaaacaggcggcgcgcgaaagcaggcggcaacatcaaagacccgcaccgcccccacaggctcacgcctgacgacggtgcgggtgggttaactactttccatatttcgcgatttatgtccatatttccatatttgtccatattatggcatttttatccatattttatgtccatattttggaatttttccaaaaaaccaacggcccccagcagctaaattggcctttttgagcccaaaaaccggaaaattttccaaaaaatcattttttcgccaaattttctcgggaatattgaataaatttaaattttcttaaaaattaataagtttatgtcaaaaataagcaaaaaagataaaatgtaacttttctggttgatttttcgctaaaaatgagtaaattttagctttatcgtgtttttttcttctaaaatgatttttaataccatacttagccatttttgaagggctttactttatattaacaaatttaaagaaattttgggaaattataccctcaatttgaaaatgtatgtccatatttttgccattttatgtccatatttcgcgatttttggtccatatttttggccatattttgcgattttatatccatataattccccgccctagttataagttgtatgattttgcatattttttctacgcatatgccatgaagaaaggggctcaaaaatagcatttctacgttaaaattctttgatttggtgaaggtttttagtgcatataaaagcatatttttggggttttcgagaataaatgcatatttggccatttttgggttttgagtccatattttggtcatttttgttaaattttcataagaaaatgcgaaaaaagcgaaaaatacaaccctaaggatcgacgttttggaatttttaaaaaaatacacccttaaaaatcgaaaaaaattttaaatttttgtaagaatttttggaaaaaaatttatgtatataaaaatgtttgtttgttttagcatataataaaatttataaatttggaaatttcaatatttttgcaattgtctaaaaaatgctccttagcccttgttttggtgttttaaaagtcaattcttaatttatacacaatttttggcattttttgaggcatattttagtgcatatttgggcatttttcgggtttttagggcatatttgggggatttttagtgcagattttatgcgcatatttggcattttttagtgcatacaacttataactagtcaa

SEQ ID NO: 7489 - DNA, 4637 bp, Heterodera glycines
  unsure (1)..(4637): unsure at all n locations
agcgcactgccacccatgaaagcacaagacgacagggcaactaaactactcatanaattattaaaagaattttcaacgaccattgaagagctaaaagtttgttgacaggataaacggagctttggcatcaaccgccctggttaacattagaaataaattcgaataagattgtccccgaaaaaaatgcctttaatgagatgatccctagctttattcaagattttatgaccccgattattcaaattaagggacaatggaaggagggaggaggggcagatgagcgagaatgagcgaagcaaatttttaaaatgaatgaccggctgcacgaaaggccatcgaaatggcttagaccacgcccaattgaaactcaattagtgccaaatcgtatggaggtgccgggtgcttgcactacagcatccatgcgataccctaacatgagctgtactcatttcattttgccattcccaaataatactgattcgccaaaatggcaggcaagagaagccaaggcaacaacaacatttcactggcaaaaaaagccaaattgcataaacaactgccgacagagttaatttgagaaatgatcgattttgtaccaatgatgcatttgtttggcggcatttcatgcaaaccaggttctcgaattctgacttttaaatttttattgaaaaattaggaagcaagcggccaccaactggtattgcggtcattaatcgattttttgaatttttacgcaacaaacgacactgcaattttgccacaatggtacaaatgtttattaaacagttaaatgtgatttattaatatttcagatgagaattcgtttgaattttgaaatgcaatgtgcgaaaagaaaacttgcatgtggccaactgtgcatacagtatcggttgcaatacaaacttttggactccacatattttgccgattttgctcgttatctctgttatgggagatcgggacgtatcgaatgcactaaaatgttggtcaactcgccaatggagttggtgaatatttattttttaaatcaaattactaaatgttcaatctagtcttgcacaactggggctttgtgcactgctatccttgactacatattgagcagccaaaatcctctgacaatgaagaagagaacggcaattgctcttgttcagcgtgagcacttcccaccaattttgagaagcaatgttcgcgaaatggccgaaatgggcattggacaaatgccttgttctgatgtaggtgaagcgtaccgtctgatcaacccacaccattcaaacgatgtgggctatcttaaaatctatgctcgatcggatcttcgtgaaacttttgttgggatcgattttcccgaattttatgttttttgcttttctcttgactaaacatttcaaagaaacgatgctcaaaacttatcgatttaacattcgtttgagaataattaatgagaacatatcggggcttgtacaattactgagtgctttaagaaaactgtcaaacgaattcccaagggacatgtagtaaatgaacacgatgcagtgggcaccacaagtagacaccaacggggattgatatggatttttgttctttctcactccctttggaaatttgttgagaaataatgtggtaatagtggatggaatgggttgggcgagactgtcaaaatagagcactggtgcatccaatcccttcgcatagacagcgcaccaatgagagccgtccttgtagtgtgcgtctctgttcacaatgagcgctgcgggatactgtagtgcggagggagatggcaattggtcactggcgtagcaaccccgaaatattcgtgtggtcaacggatttcctttcaatatcgttgcgatttgcacgctgtccattcttcagccaaaaaattgaacaaagttgatgcaacactagactgacaattaacatcaaatataaagcaaagagtgcccaacagacgacttgttgaaaaaggttgctttcctctggtctatctttgcacagttgaattaggggtggaaggagagcagatattgactcttgttcgtcaattaatttttcactttttggagtcgttgtggaagagctaaaggtagttggggtaaaggttgtgatggaggtggtggtgacagctgatggtttagttgatcgagcgaatattcttggatttgttgttgttgttgcagtagtagaaagtcttgataatgataaactttttaggtactctgcataataaaagtcaggttgtttttgcggcggctgctctggatataaacagacaacgggaagagaaactcggagaatgaacaaaataaaactcactttttttgaaaacatttttatttgtgcacaaatgaaatgacaaaccgtttaaatagtagtgtctgtgcttattgatctatttttgtctaacatcacaagtgaatcacattctcccatcaccaccagcattattccaccttctggcactggctggttaaattttatgctcacagcggtagtcccattcttgatcaaaatcaaacaatgtcgcttgatcgtctccgctgttggtcaaattgaacacgtaaatgcagtgtgttttaccgtattgggcaaaagttataccgttgctctcggatgagtttgcaaaccccactgcttcattcatgtcattgaaagggcgaatatactttccgtttgggtagtccaggtcgtagggcgcttgtggataagagcgtccgctggcaacaatggaaatttcgcgcacattgaaaggttgaaaattgaatgggctgcgtctaattgtaccgacatagtcagtattagccaccaatcccattgttacacgacggggaatttggtccatgaacaaattggctgtaaactcatatcgacccggactgatgaacattgatttcatcattgttttcctcactgcataacgggcaggcttcagttcaagctttcgcgcaatgtccaatgctaagccatccattagagaaactttcttcacatacattttcaaacccaaaacctcaaaatgatagcggggtgcacccgctgtcggagcaattagcacaaagtcgttgtcatgaggcaaaatttcaatgtccaattcacaaaaattaatcagatacaacggttggttaaataagtcggtgtcaattttggcaatgaattgagccacgttgctgttagcaaacaaattacgccgcgcgatgcacccgtctcctgtctcaagtgcatcacctgtgtcccgataatagcccgcagcattcagatgggagtcctttgccgtagtggaataggagagttcgtgcgagaaatatgtcttataggccataagagcatttgaattaaaaatttcacgcccattgatgctcattttaatattacgaatgaaagtttggcctatcatttggatcggtgcaatgtgtaggtcgtcagctttcatgtcaatgagctggccattaacgttttccttccggattctgaactcggtgagcaaatagcattttgaaagatcaatataattttggctggagtgaagtttgaagtgatacggtgtgtcggtcagagggttgctagggagcagttcaaacactttggatgacgagacgctcacatttgtgggcggaatacggaaaaagtccaaagcattggtgattgaattcactgaatcattgtcgattttgtggaaggccatttatttattaataaagtccaaatgcgtctgagcgaatgcgcttttttgtctgctttacgattggtcgtccaattattgtttgatgagcaggtggaagtgctctctttctttttatactcctttttccgcttccaaactgtttaggcagaccacctttctccaatacagtgtctattcctcgctttccctctttgacaaacgcttccttaagcggcactccctcgtttccgactcgttctagcacacgttgtccagtgctcagtgcctctgagcctaccgtagtgcctacgcgacgaagaataggcaggaaaaaacgccaaagtccacgaaacacatccccaacgcccgcccctcgttgaataccgtaacctctttggaaggggctcgacccccggaagtagtcgaaatcatctttctctaatccgccaccgtactgcacgtactcatcatacccagtaatgcttgggtcaaacacaatatgaaccatttattttaattatatgtcaaatgaaacacaaaaatgaaagaaatcaaaaatttatcactttcttaaatatcaacacgaccatcgttgtaccgtaggcgaatgggaccagtcgacctttgtccattgtgcgcagttcaatctcaatttcgttgatctctcgtggcagcactcgcgcaaatattggcgagtcgtaaatcttctcattatactccccggggattgcaccgctgatagacacaaccctgagcaaggagctcagtgaattgccaattattatattctcggtcagcccttttgagtagactgcaaaacttgaaatgcctccgcgcagatcacacccgtatttggcaacctcatttgacacaacatgttggggattttcgagtcccaacacatagcccagctgaggcgagaatgacaaatgacttatgatctcttcgttaaagacaactttgaatttttccaaatcat

SEQ ID NO: 7490 - DNA, 1706 bp, Heterodera glycines
actctcgtgactcctacgattggtctattgtgggagtttgttgcaggtggtccactaaccaacgcggctgccactggaccggatgattgtttagcatcatcctgttcagtttttgtgggactaacggtctgtttatgaacagtttcgggtgtggtggaggtagtaggtgtagttgctgactttttaacagtgtttgtggctttaggttgggcactaggaggtggagctgacgtagtttgttctgcactagctgtagatgctactgttttaggagttgtaggagtttggactggatgctttgtgagagttgaggattttgcagctactacaggagctgttgtattaacaggagtggatgacgttggactaacagtagcagcagcagccgcaggagttgatggtttggttgcagggttaggggtaattggtggcttaacagaggcagccgactgaatagaagacggcggtggctttgatgttggaggaacaggtgtagttgcagttactggtttagcagagctttgagtgggcggcgtcggagacggctcttttgatcctacagaggttgttacaccatctttttgtgtttcttgataaagaggcggcgaatcaatcacattttcctccccttctttgtactttgggggagaaccgagcggtttcccatgctcatctaaaattggtggtggttgtggtgatggtggttgtgacggtgttatggtgccggtatctcttttgactctctttaacggtggtggagattcgagaggctttgtgcgattccgatcctgctccacttcacgagggagtggcagtagttttgcatcgctatggttccgcaatgttacggtcaaaaagtctttcagctgttccgctctattatgtgccgccttgggcaccggcaccctaatcactcgctgtttgtcctcatcaggagcgttgcggtcggtgaagtgaatgtcaatccactgttcgtccaatgtaccaatggttgaccatgagaaggggtaactgatactgtgcagcccgcacacccatgtaccattaaaatgcaaaggcttagggagccgaacacgaaatttattgggttgattttccgggtaatccgttacattgcttggcaaaaacacgaagaaactgttcgacatgattgtttattagcataaatagtgaaaatgtgaacgcttttatacaagctgagactcatgaatccattcccgattgggatatcctataaattttacaagcatctcattggatccatccgttcttttcctctttctgtacaccttctcaatgcggtaactggtctcggcatcttttcttacgcgcgtcagctcctgctcataaaagttgcctttgaatttctcaccatgctcatcccgcagtttgtaccggactggaagcatcgttttcaacacctcatcaatctccagaatttcgtccccataatttggcaaatatcccttctcaaattgtcccttctctctgctcatgcgtacaaattcttctttacggaaacgtggcgaccgtttcggtaggacagggtgtccgtacaatctcttccacactttttgcgcatttgaaaagtcaacatcaatcggacgcatcccatgaacacgagagggtgaactgttaataccatccaccattatttgtactgcatccacccaattcagtgtctccttttccgcgaaatatcggta

SEQ ID NO: 7491 - DNA, 1364 bp, Heterodera glycines
ttttgattaattaaacattcttaataagaaatacaaactttcatgtaaagaaaaaaaagaagctaatcataccaatcgaaacaattcaaaagcagtccgtcaaatatgaaatacttaaattttagaaaaaaacaggattcgacaaagaactaaatcgaaaacgtacgtccaagataatttaacctttaaataaaaaagccaaatataataaaaataaaaatattgttattttattttttaaatctttttctttattataactcagttatagaaaaatacgaaacatttgtcaaggattaattaaaattaacataactattaatattgttttttaattgtttaagcaaacgaaatttctacaaaacagtataacttttctcaaacgcaaccaaatttttaattcttgatatcattggatagcagtagaatacaaattttgtcaagtttgaacaaagttatcaagatttagtgaattactattcttactttgggctgggacactataatctgaccagtatagtctgagccgagtttagagcatcataacttttttatttgttgacaaaatccaacaaacttgctatcattcgaaagctcttaacaagctctctatcagcttcccaaaaatcacaaagatataccgacatgtaaaaaagctataaattaaaatatgcacaaaaattctgacttttgcgcagcattaatgttgcaactttttataggtttttcaatcgcttagaaatagcttatcaacagcttctaaacatatagggctttagaatgatgccaaatttataaaatttggccagctgtgaaaaaagttatgatactttaaactggctcagactataacggccagactatagtgtcccccacccgcagttgaggccagcagaaatgtttttttttgtctttccgtccttcgtaattacttacttaccttaccaattaacaattgactcccaatctccctctcaaaatattttttttgctcaaactatgttagaagatcactatttgatcaccattatcaatgtgtctctgttttagcatttcgagcgatttgtgaccgattgctgcgccaaatttgtgtgaatagaaatgtttgaacttttacgaaatgaatttttatgtcaaaatctaattttaataatgtgttgtcctgaatttgaaaataaaataaaaagagttgcgagtccaattacgggaaagggtcattttggcgtcaacgtttcggcgcaatgccaaaaattaaaaaaattacaaaataaagggttttaaaggtcggtgaaccagatttggacactcatttcaagggcgtaggcaggggggggggatgttttggaaaaaattttgacattttt

SEQ ID NO: 7492 - DNA, 2862 bp, Heterodera glycines
ataatatgtgcttgggcggggaatttttgcgtggaaaaagaatatagcggagtttgctaaaaatgcaaaaaacaaaaagtagataaaattcaaataaaaatgcatagttagaaactttaaagtttaaacagagtttagagtagacccctttttaagtaattttatggcatttttggtcagcagaaaaaaagtcacttgatttaaattccaatttcatttaaaaaatgaaaaaacattgttacgtaaagcaaaagcgtcgtatattatttagaatttcatcggtgcatttcgcgtaattgacatgaacacgtgatttctgataattttctttgcttgtttatacatagtgcgcgaaaaacaccttttcctttttattttataagatttttccaacagattaaacacagaaacagtaaaatataaaattacattttcaacaaccctctttaaaattctttgggcacaaccatcttctgttcactgagtagaaacggtccaacattggcctgaaaaatagtgtgccgaaatttagagatgttaacattcaaaattagccatttaaatccccactcgaggaatggccaccgagttcacccggcgccgttgccgctcatcaagtattttgtgaaacatcagggcgatcactgcctgtacaaaaaaaacaaaacaaaattctcatttccaccatctataagaaatttaacacccttaattagtcgcacatttattcccaattttatttatttatacaatatttagagaccggacgacaattaacggtaaatatttaccgaagttcgcttttttaatttaaaaaatgtgacgagaaatttttgcatttttataaatcgaataatttttgcggctttgtttttgatttaaacactcttaggtttcccaccatatcaattttttttatacttttctcaccttttttgccagctttttccattcgatttcgtcactttcgtgtccaacgctcgcccctgttagcattatttcagctgcttttccgccccgcatgccaattttgatttgagttgtgccagtgtgtatgttctttgtgtgaagaacattgtgtgtccatcagatccatctacttagtcaggctggatactgacctattttcaaaaaaaaagcatttcagctcctttaaaccctcttttttccgatcatatatatattttttggccacaaatagaaatatagccgccaaaatctctcaacccgaaatctcgccgagacaaaaaaacagcgccgaaatttaaaataagcatcagctaaaaaatcccgtttcttcgcttcactagtcgctttttgactatgtcaatttttttttgttgttatataaaatttgccataaaacgtcacttaaaatctgagggtggtaaatattctcctctatccaaaattcaatttcgttgtcaaaaaaatacccattgcatgtggtccacgctgtcctcgtcccaccaattcacgccaacatgcccaatttcatggcctgcaacacggactcgacactggttggacattatcatcgttatgcgtaattcgcgcttgtaaattgcgcgtcgttcccatccgtttagcatattaaataattttgctaaaaaaaccggaagatggattaagaaatcgtaaattttcttacaaatcgactcttatagctagacaaagtaattagcatcgaattagattgaaattaatcagcaatattacgtattttcagtcatttatcgattaatttgtggtactaattttgtacatattcagatcactttttccctatcacattttgcttatcactctgattcatcacttctcaaatgctgctgctgctgaacgtcgtcgtcatccaacagttcatccccgtcctcggcaccacttccggcttcaacatcgctgacgcatccgtcttcggcacattccccgtcggcattgtccatggcattccgtttccgatgcttgtcaaaaaaggcacagcgcgacggttggaagcaaaaggtggccaacaaagagacgaaaagcatctcgacacagagcaaaaagcaaatgtaaactgtgggaacaaatgaaaatcatttaaaaatactgtaaaagtgccacaaataatttgtgccatttttccccgctgctcacattgtgccaccgccgaagagggcaatttggcgggatcatgcgatatgctcggcaccatgtcgataatgccgaagaagtcgccgacaaacttttgcacggaccaaaacagttggcagaagtcgacgatacggaagagcagcaaaaaactgaaaatggggaaaacccgaatttctttgaaataaaattgaaatttcacataatttcaattgaaaaaaatgtgagacgtgccgatattcgtgcaacagcgaagcgccgacgggcacaattacgtaagagccgtaggtccaataaacatggaaatcatagcagcaaaattggatatttggaagtacatgtgtttgcgactgctcagctcctaggtgacagaatgccaaattaggaaacatttaaaaattatgtttgaagtgccgcaaaaaatttaatttccaaactattcaggatttgtttcacacacctctcaggaaatcgctgaagatgcacaaatcgagttgctcatcatatgaaacatcacaaacaatggcgaaaccggagctactggaaccttgagtcaaaaagaacacaaccacctccctgcacctcagaaacaacaagtttgtataaatttaaagccaaataattaatgctttgttaaaggcagagtcaaggcgacagaaattcaaagaatgtgttggtctcgtgcatttgtacggcgagaagacagaatatgttgaggcagttcgcaac

SEQ ID NO: 7493 - DNA, 2787 bp, Heterodera glycines
  unsure (1)..(2787): unsure at all n locations
gctgctggtagaagtgttggttctggacgccgtcttgccggtgcgactacaaactctcgttntcgtttcttcagagaggatttgtttcgggggttagctattctatctagttaaccatcacaagcctgacctaaattaggatgttcctgccggacaatggaagcatgacaagtttgcagagctctatggaggtggcaagaagcgcatgggtggagctagcctgggacctctcaaggcggtaaagggcggtgcggggagttccattggagcacgcattgcacggaatgcaatcgagcggaattctgggggtatggtgaagctccaagtttctaacttgcccggatcggtggtcactttggatttagaggtttggttattctaactggtaaatctcatgttaaccttcaggaacttttccaagacttcaatgttttcggagtcgctgttcattatgatgagatgggcaatcatttgggaactgctgacttgttcacagaccaacaatctgccaccaacatccttaacgaattcaaaaacatcgctatcgatggttgttcttaatttaagaatttctattaaaataaattttaaggccaagaaatcaaattttgtttggttactgaaggcgctgattctgttggaggtaaaagagggaacattcgcgaccgtcttcaacgaattagcggaggacctaatccgataagaaaaaagcccatggttcgtaaacgaatttctggaggaccaatcagaaaagtgtcgcgcactgttggaggacgacttaaaggttaatagcatattttaaatggcctacactaaatttgtttatatttattagttgctggagctgggactagcaaagcggcacctaaggcaaaaactgctgatgaattggacaaggagctggaagcgtacatgaagaagctgtagaaggaagtcacttttctgatgatgaggaatttcatttgggtcttcctttgtttctgtccttaccaattcacattttatttcatttattcgcatttggatgctcttttccagtatgagaagacgttaccaaaaaagattactctcattatctatttcaagcataacaatgtttgtcatttcaatctgttgaatggggggaaacaatgattgtgagatatgtgtggtgtgttcttcgctatttttctcagttgcataaattccttcatttcttcctattcagtcagtgtatcataaaatggtgatagtttaataggaaagtcaccggaagattggaaattgggtcaaaggtgtgcgagggaggagtaattgaaggggaggggatggaagatacgctggtggagatgatcagatcaattgggtaggggggaaagagtcgctcgggggtgtgcactttggcgattactcaaaccgcttattgaatgacggcgggctacggatccgcgcctgtgttaaaagcactccttccccggaaatgactttcgctgttgaggaaggggagtcccttttgcttggcgaggacctttctcaattggctcgaaatgacgccgaaaccattcacggttcgatttgtgcacggtacgaacggaagaagcgcttttacgtaagttttaaaaaggcagccgcggtggcacaaattcccgattggcagagtcgcattggcttctccgatttgctggcattgaccaccgaagggcaatccccgactttggccttctctgacccttccctttttgccccctttttgtcttccgatcactccaacgcccacatttttgcgacagcttcccaaacactaaatgaactctgcggagatggaaaagaagcggccattgtcttctgtggagaggcgggcgcgggaaaaacgacgaatttattcaacgcaattcgatttttggcatttgcggaggaaaagagggaaaaattgggcaaaggtaaaatatgaggggattaaatgaataaatcgagcaattgacagaaatggggaactaatggaaaggaacattcagtaaaaatacttgaagaatcattagagaatttggagggagaggggaagagaacttttgccatcggaccctaagtttggcaatttaattttaaacgaggaattgtagacctattcgtgttcaagccgatgttattggcctttctttaatcacgtacagtatatcagcaaatccttttacagtatatgggtgacccacaaaaattgaccagattagattgccaaaatgaattacctattcgagaaaaactgtaaattataacgagcattttatttcacaggaagcaacaacagaaatgacgcaaatgttacgcgcaatttattgacaataaaaacaataaatgccttagagaaaattttgggcgcattcggcgcagcaaaaacactgaaaaatgagcagtcgaatttgcacggatatgcgattgaattgcattacgaagggtaataaagcagaaaatcctaaatcataatggcaaaaacaaacacaggaaagcattggtcggtctctcttttatggattcgctggttccattggaattgtcgagaattattggccagcgaaagggcgaaggcaatttcaacgttttctaccaattgtgcgaaggaataaaccctaagcaaagagaaatgttgggaatgagcggagcggagaaatatttctttctgaaccaagtcggacgattgtcaaattttatgccttttttaaattttaagggcaattgccggaggggcgttggtgaaaaagccgactttgccaaatgggccgacgcactttcgcaagtcggcttctctgacca

SEQ ID NO: 7494 - DNA, 2240 bp, Heterodera glycines
aattgactttgatcagctcgagaggcttttcactcattcttgaaaaaggtgcaaatcgcaacagaacttccgatagctcattaagaaatcattaattaatttacgaagaccaaagactgacagtggaggcggcgttggatatgcgagatgctttcgccaaaatgctttacgatgggctcttccagtggattttgtcccgtatttcgctgtttcttcgaccggcttcatcgaaagaaaaaaatccggaattcgttgctgtttcgcgagacagaatccttttattggacttgccaggaccgagacgatataatgccaatggctttgaagagttttgcattaatttggtcgccaattcattgctaattttgcaagggtttggtcaaatttaaggcgaacgaacggctcgaactgttcttccaacagcaacggtttggccacttcaaagaagaacaactgcagaatggtgggccatcagcagcagaagagcgattgatggcttaaaatgcgctttttcagtgttcgcatcgcgcggaggcgattttggcctacgaaattggccaaatagtgagcggacgatggaattgttggtaaaaaggccgatgggcattgtgccgttgttggacgacgagtgcaaattccccaggggcgcggaggagtcattcctgcagcactgcaacctcaaccacttggacaaccccatctacgcaaaagtaagtttcgcttggcattccgcctgtcgctgctcaatcgtcgctccgtttcccttttcaggctcgggtaaaaggccgtctcgagttcggcattcgccactatttcggcttctccttttactctgtcagtggcattttgaacaaaaacagattcatccaaccgccctccattttggccgttctttcacattccaaagacacttctatggcctcgatttttgaagaaatgacggcaaaacgaacaaccgaccgatgtgaatctgtggccaacgaatggcacaaaggcatagtcaaactgtgcgaacagatcaaaaagtatggagaagcaccgaccatccaaatataaatgattcattaagaatttcctttgattagggctgctaaatgcttttcctcccttttcccacagttttcgcctgcatttcgtccgttgtattcgtgccgaaatgactgacggcaaattgaatccgaaggccctgcaacgccaacttcgcattctctccgtttcggaccattgcctcgccgttcgccacggattccaacacaaaattccaatcaaaaaattcgccgatttgtttcacgtccttttgccagaagaagtgttgttttcgatattatatttttaaatttaagttatttgaggtcgtccatggccaaaattcacaccaaattgccaaggatattttggatgcccagggcattcgttatgccggcctatttgaattcatcccgggtcatctctttctgatggagtctcttttcgctaaattatgccaactgaaacagtccacgctcactttggccgccttaatcatccaaaagaatttccgaaaatttctcgcgcgtcagcattttcttctgaaacggacggctaccattcagatccaagcggcttttagaggatggaaatgccgaaaaatgtgtgggagaaaggcatggacagagaaaaaaatgaaatcactgatggaagaaagactgagagtaggggcaaagaaagaggagcaaagagagatatcggaggacgaagagagcgatgagggaggaaaagacatgatgagaacaatgatgaagatggaggacatggaagaggagaggcggcgagagatcagtgcgatgctgaacagaactgattatgccggaaggaaggccaaagccgagcacaccaaatgggctctcttccgggagtgctccgactacgtccgatcgacttggccaccagcaaaagcaaagggcccctccttcggtccaacaatcacttttgaacaattcgccgagcaaatcaaagtaaatcagcataagtgaaagacaatgaaaaaacatcatttgttaaagtagaaagtgccattttcgttttgcctttgccatttcatttccttcagacagtgccaattggcgcccgccgtgagcccatcatcgcgccctttttggccacagattctgaggaagaatttgtgcagtcgctggacatgttcaaattggtcctcagctaccaatgccaacccgagggcattgatccccgtcgatggccct

SEQ ID NO: 7495 - DNA, 748 bp, Heterodera glycines
agggacggagaggaggaagagagagacacagagagagagggagatagagagagagagagagaagagagagagataaggagagatagagacaaagagagagagggagagagaggagagagagagagagggagggagaggaggaagagagagacacagagagagagggagagagagagagaggagggaggggagagagagaaaggagagagagagagaggtagagagagggagggagaggaggaagagagagacacacatgctggtatgcacaatgctaaggatatttatctgtagctagcgatatgtggatagggtagctgcagataaaaaaatctgcagataaaatctctatgcacaatgctagcgctaactatctgcagctgaagatttttttatctgcagatacccatccgcagcaactctctcgtcacacatctttttatcttttctatccctcaagagaaattttctaactcaaatttggttagcaaaattttattgcataaaaagccgtaaaaacttattcctggggcttttctaggtcgctgatcatgaatctgacatttatttcaaccaattcctaacccgaactcgaaaggtcgaattttcgggttttgttcaatcatcatgaaatgtaaatcaaaaaattttagaggtattaaaagtcatttagtacaatttttccaatttttaaacttatttttgggattttaatcgacatttctatcgaaattatcctcatctcgat

SEQ ID NO: 7496 - DNA, 975 bp, Heterodera glycines
gttgaaaaaccgacaattcagtgtcagaaaatttggcaaaaaaatttcaaaaaaccactaaaaatacaatataaattgagtggagagaaattctgcatgatctgtattgttatactctatgctaaataaatctggggccggttccgtctcaaatatttttggacccaaatttttttaaatttcagaatgtgaacagaaagttgagatataattaacagtgctgccaaaaatatgcacgaaaagtagccaaaatatgcacaaaaatctcgaaatatgcaaaaatatgcaaataaaaataccgatttttatacgcaaacacaaaaaaagaacgtgtttttcctattatttatagcatggaaaaggcaggaaaaaaatacatttgcatgtttttggcagccctgatatttaatatgcctaatatttttgggtgttcgtccaatctgacttttatgagtcctatgacaatttatgagtccaatatttttttatgagatattcgaaaataaaaattttttgaaatgaatttaacacagggcgcgtatctgtcctgatttatcagatttgtcctgatttgaagggtccaaatctgataaaattaaaatgtcctgatttgtcagatttgtcctgatttggagggagtgacccaactttgtcctgatttcttaaataaacttacaattttgaaattttatggcataatgtcactattttatcaataaaatataagatttatgacaaatttggttatttttttaataaaaatctgttaacaaatcgattaaaaatcgcaaaaaattttccggcggccggaccccctgtccatcctccaaaattttttgaaaaaatgcgacgcaaaaaaagcgtttttaaagcaaaaaagtcgtcgcttgacttttaatttaattgcaaaattggcattttttggtgaaaatctgttaacaaatcagaacgaaattacaaaaaaattttccggcg

SEQ ID NO: 7497 - DNA, 5468 bp, Heterodera glycines
tattcaattctaccaaggtagcaacaggctgagtgtgactcgaccggccgctttctcaagttcatcaaaaaaaccatgcagatcaccatcttcattgaaagaatcttcggccaaaaaaaattccgtttttttggtccccgcacggttattgggaaatagtacggagaacgtgctataaaaatttagttgtttgatgcgatttaagttcatttacttttcggtctcagcatgttcgccgctgtttcagccgctgctcctccaactacccctccagcaaaattactgcccaaattagtaccggtttttttaacgaatgttttaagccggaacttccagatgaaagggctcgccgcaaagcttggctttcagccacatgaattgagtaacttctgcctccccgactaaaaaggtgccgcagtacagcaaaaatcgaacgaaggatattgtggtcgccatgaacaacaaaaaagagccaaaaagacgaaatattttagataaaaggacattggattataatagctgtttgccatggaaacggctcttttatagaaggggaagcttactcaattgctttttgccggcggggtgggacagacggctgtcacaaattgctttttgccggcgaagaacggaaatgtttttacttatatttttcttggccattgccttcgaaaggatttcttcacaagctgatcacacaacaaaagggactgatttagttttgcgagatggatttgaatggaggaaaaaaatttaattgcggctggcgaaatacaagtgtggacttgtccaaggaaaagttgtatgggacgggcacatgctcctgttggatctgtcgatttgagaataattacgcaacacaatcatttgcctgatcaactaaagcatactgtatgagactataaattcgcaaatatttaaaatataaaaaaaagtttccgtatcgtacaatgcgttaaactaatgtttagtcgaatttattgtaaggtacgtgcgcgaaaagagaacctaaagtcgcaagcgcgttactgcattgaaagtggaggagcagtatcagcaaaatcgattacgcccatttgaaatcgacccaacaaggggactgagtcaaaatcgattgaaaaaatatattgaaaatgaccaagccataaaagaattaattcaacggtatgacaatctcgaagaaagaaatgatgaaatattattgcgacatttaaatgctcttcagtatcgtctcgccaatgctggctttgaagattggtagtttgtgtgcactttagttattcattgagaaaaataaatgtgctggttggagccttcagcaagctcttttaaattaaataatcaaattgtgaaaaaaagttaaaaatatttcgaaaaattagttgaaaattattataagtcattgaacaaaataattggtgaaatgtgttaaataaaaatatttggtataattaatttgaaaaaggaatgacaatttggcgtttcgttggccgcaaatgtccgattttcccttgggccgcaaatgtccggccgcaaatgtccgaaaatggccctaaagaaacgggccgcaaatgtccggaccgcaaaagtccgaccgcatttgtcgggccgcaaatgtccgatttccagcaggccgcaaatgtccggaccgcaaatgtccggaccgcaaatgtcctataaccttttcaacgtacactgaatcgtcgtcatgaatcgtcggcactgaattgaccggctccgtacaattttattcaactttgtagattttttcattcaacaataaaatgaataaataaaaaatttcactttgtttgatcaagcgctagaagactttgtgtttgtaaatcatcagatgcctcggaattccgatttccgaaaatttttcaaaatattctggaagaaattcgataccattttccggtggcaggtgatttcgccagtgagtgaattcgccagtgagtgatttcgccagtgggatttcgccagtgattgatttcgccagtgagtgatttcgccagtgaactatttctctttttctcggcgtctgtatttgatttcgccagtaagtgaactcgccggtgattgttttcgccagatcggaccaaattcatcccatgggcaaattaatactaaagataaactgcgtgccgatttgccaattgaagttagggcagcttctgctccttcaccatcaaatatgcgttggaattacaactatgccaaacgaaaacaccaagaagaggtggatgaattttgcaaaaaaaaaatattttaaaaactaaaatacagtttttcctataatacagtactccattggtaatgacgttgacccgttcggcaatgtgtacactttcaatgcgggcgaaggcatttacaaaatgccattttttgtgagcattccgtttttaaataatgcatatacaatattttctttttaaaagtaaaaggtttaaaacctccttttttgaggtcaatgactttgccgacggagtgaacagagtggcgatggactcctcaacagcgggcaaaacctacgaatttgtcgggccgcactgctacgaaatgtgcgagttggtaagtaaatcgaaacgtattttcatgtccatgggagtcgaacaaatgacgggattgaaatttaatgaaaaggaattttcattatgtggttaacgaacaagaaagacatttgtcgtttattaggtaaatggagctgaattgtatgtcataaatggacggggggggtcagaaattgcctttaccaaataagaaatatcccccatcaggccaaaattgaaaaaaaggctcaacatttttttaaccttttttttgcgtggcgcgctttttccaaaaaatttgcggaaggggggcgggggggtccggcggtgcgaatagacgccgccggaaaaatgctgcaatttattaacagatttattttcactaaataatccaaattccataaatgattgaagaggataatatgtgggcaaacagaattgcagattttcaggccgctccagcggatggcataagaggtccacacgaccgacggaaggcaaaatacatacggcaagacaacaacctgcaagctttagtcgctaattttgaccagcgtgatccgcttgaataccttcgcgcatgtgcctaccacttacacttttaaaaaattaagaaaatcattcaaaaatatatcacaatttaaactatgtaattattttaacaaaggtattccaaatatttgtgcgataaataaactcatgaaattaagtggaattcggttagaatacatatgctataatgttagaaaattaaagatagaaatccaattttatatagtattaatttgcccatgggatgaatttggtccgatctggcgaaaacaatcaccggcgagttcacttactggcgaaatcaaatacagacgccgagaaaaagagaaatagttcactggcgaaatcactcactggcgaaatcaatcactggcgaaatcccactggcgaaatcactcactggcgaattcactcactggcgaaatcacatagcgcccattttccactataattgtggctttactttgtatagctgacagtttgaaaatacaaaattggactcaaaacttaattaaaaatcattggactcataaaaaaattattggactcataaattgtcataggactcataaaagtcaaattggactcataaaactcgattggactcataaagtgcactagagccaaggatccttggggattacctttgatttcgcgataaaaaattgccatgtcgcgctccttcatagatttattcatcacttttttgccaaatcctcccattcggtaagccaacatccgctgaagctgttttcttgtggaagggaacctgctcaaaaaagtgaaaaatggcaacagaaaacagacagaaacgacctgtcggaatattttcgaaaccaaatgctcaggtccaagtaaatttggagaatttgattcattttgcgaatggcttcacttgaaacttcagacaacatggcaattgacatgagattaaaggtgagctgaatggcatttaccggaaataattaaagcatttttcaaacgaaaaccaaatgacggagttcgatgtatcccatcgacgaatcggccgaccgtccgcaaagaaaaagcaatttgtcgagctgagaaaatcttttgagcagaagtgctcccaaataacaaacgcctgtaaattttgctcaaataaaatgaaatttctcgaaaaacaaaacctttttttgttggttcgtaaacatatccgctctgttttaatttctaaaaatagttgaaaacacaaacattttcttatcaaaaaactatcatgtttcaattgaatattttccaaaagcatattgctggtcaaaaataagcatttaaaaaaattcaattacctaaaaaaggattttgcctgattaatggatttagtggaaaatgccaaatgtgggtttttagtcttaattttaatttaaaactaaggatatcgaaatttccgtatttttcatcaaattccggcaatcggaattccgacggtccgaaaaatttctgaaggaattccgagtgcaaaaatgtcggaatagacgagctaaaagggtcgacatcaccagaaaaattcaaggccggcaatacttgtgtgaatttgtaaaaatgtccaatcatttgctgtccgttgagttttttcagcattcgataaactctaagcgccattttccagaatttctggtgcctattcgaagatccgaatttgtaggcaattgcttcgtaaagtcggcagctcatttgtccaatgcttcctaattgacatttttgcatttcattcagtgcacctttaaattgcatgttcattttcttcaagtgtttgttgctttccttcattggtttcgatttaaacatttttccgttaccaaaacataggcagcggtcaacaaaccctaaaaatttatctatttttgggttactaattaaaatattgttgggtccgaaaatttgtttattcaatctttatctattcccttcggaaggaagtcgaatgttaccattttcatgtcgcgagctaggtcgaacttaaaagtctcaatggtagtaatatttatattttatttaaatttattcgcagaaataaattagaaattaggtagctcaaaattattaaaattaataagtctcggtattgggcgagagttctaagtgccctcttctattatgtttattaaaaatataataaatttaccaaatattgaaacgaaaaatttcggaattcgaaagactaattttgtccgtaatttaaattcatgtctattttttaaattaaagaaaaatagtagatggcacgcaaagctatcattgttccaatactaaaattgaggtaaatatatggttcgtacgcaacaaatttaaaaattttttgataatgcgaatctgagctcagcttttgtaaaatcactgatt

SEQ ID NO: 7498 - DNA, 3081 bp, Heterodera glycines
tcccgggttcctggtgtcgtaaaaaaatcttaaatttctctcaatcatgcagaaacagaagagtggggtgcggcgataggtggcaatataatcagaatagcggctttcgtagtccctgtgtattataattttataatttgaagcctcaattaacaatgcctccacttctgctctgtttttctgccagaaaaaatcttctttttcgagagcctcctcaaaatatttttgaaacgagtacattttaactgaaaaattaataaagaaaaaaactcgaataaataataatggaatgaacaaaaaataatgaaagggaaaaattaaaaaattttatttaacagggaagaataagtggcaataattattgaaattctctggtctaacaaattcacttccccaaatgattgctgcctgtgcatgaactcgttgaaaacaatgtctgggttcgattattggaaggggcgggcagggatgatcactgggtctgacagggcactgcaataaaggtccactgaaattttctcaattttccagcccggctcagcttctcggctcattgcatcccccattaattttttcaggatttttttaaacattttttcgggatcttcattttcggggcatttaaaatagaaagttgtcacgtgctcttttatcccaaattttttaggccaccccgacgcttccacctttatcttcaaaaacatccgcacatatcctttgaacagttgactgtcaaattgttcaaagtgatacgctcgatagaatcccacaattctatatcctagctctaaagccttccgcaactcaattgaggtgaatgtccccaaaaatgctctctgcgctggacgatggttacatttctttacatcttttgtcatcacaaactcattcttggccctttttgcacaagcccaacaattggggaagaggagcatgtcatcgatgtgcagggggagcagggggtacaaaagatttttcggtgggatcacttttactttcaaaagtccatcatagggtatgtcgtcgggtgttgtccaattcacattaaaattcctgctcactacaattttcgggactccaacggggtatggggtgtcttaagcgaaaggaaactaacaaaaattaagcagatttttaccataattaacaaaggggtacaaactaatgatgtcaaacattgatatctcaatttcttcggtagcctttgcgtacaaacaaaatggcatcgttcttcccccggcataagcatccctcggatttatcggtcccttgtccggcacactttcaaagaactttttcatctccttatttttcttcaattcctctctgacatcacactcctaaaacaaacaattaataaatatttctaaatgttttattctacccaaacttctccgatgaaaaatttttgcacttttccctcaaaatttccatgcgaatttcggttctactttgattctcttccattgtccgtccgtttggcgctatagtccaaggtaaaaaacatctcggacacccgtgaaatgcacacccctgaatgaataacattaaaatattgataaaatataatttttcttaacctgaaactcaattatttttttctctgcccctatcacacagtccactttcagcccaccaaattccacttctcctccgttacacgcatgccgcacttttactccttttctttgggcaagccactcaaaatatttcaccgctattttgctctggttctctgctctctcataccctccctctggcataattggaatatgcctgtccttcaaaaattttgccctgaagatcttcataacgactcccgcaattgtgacactgtcctttattcatccaaagccgatgtgtttttggaggggggagagcatcaattactcctgttatccccaaaataaccgccggaacttcaaaattgattccatcaaaatttcaacatcgttttcgcaatacgtcttgagttgttccccttaaattttattttcaaagaaaaaatgctattttccctacctagttcgaattccgtttgaaaattctcattgtgccatgcttccaattttacggcttcttccttcccaaaattctcattcttattgtatttgtgtggaaaatacaatttagctgcagtttttaaccccaaggtttttggaaggtccgccaatttattctgactaagcatccaaaaatcccgaaagtacactcttcccgcctttatttgataaattttcaaatcagccatcatcaactccgtcgcaatttccttctttgttagctcggacaagacaaagtgtgaatcgaacctcccagcataatgcgcgaaagcaatcgtttcaaatcgttgaaaacccattatccaaacgataaactcgctcattggctcaaaaccatccgctactgaccatgtgattttactggggccttcgcaaatctcacattcccgctcctctcccgcacaaatgttacaagtacgtgcaacactaacaagattaggccggtgttctcccccatctacagtcgtctccaggtcgtatgccacaattctgtaggctttctgcggtcgcacttgaatttttttgatgaaacattgccgccctgggtgacaaactttgcacagtttgcaaaacttttccccgcacgtgtgtttgttccgagtattgtgtgtctctcggcacttttcgcattttttgtactcaatacaagccgccttcttgtgcgcttcaaaacattccgggttgtaaaacttgagattgcattcgccgcagtgaatctcatcgcagacatccgtacatggaaacccgaaccccatccgacaacattttttgcagcgttccttatactccattctgtgtctttcaggtcgatcgtacgtcacttcacagctgacacagaagtatcgaacaccaaaaaaccagaagcccgattgatcccatcccatggtctcctttctctatcacacccacttcatttttacgaacaccctctccccttgaaaattggcctaagccccggtcttctaaaattatgtaacttttataatttttcaagcgaatttttgttaccatttcaaaa

SEQ ID NO: 7499 - DNA, 2005 bp, Heterodera glycines
  unsure (1)..(2005): unsure at all n locations
gttacaagtacgtgcagcactaacaagattaggccggtgttctcccnccatctacagtcgtctccaggtcgtatgccacaattctatatgctttctgcggtcgaacttgaatttttttgatgaaagattgccgccctgggtggcaaattttgcacagtttgtaaaacttttcccccacagacgtgtttcgaacgtgtttggtagacttctccgcatttttcacatttttttttactctttgcaggccaatttcttgtgttcttcaagaagtctcgatggcactcgtcacagttaatttccgggcagtcttccgcacatgggaacccgaatcccatccggcaacatttcttgcaacgctccttgcattcaattcggtgtcgttctttggtccaaaaggtcacttcacagctaacacaaaaatttttgacgcagaaaaaccaggacaccgatttgatcccgtcccagtgattgacttctcttatcacgcaaacttcatgcttacggacaccttcccccttgaaaattggcttaagtccaaatttctaaaaaaatgtaaaaaatgggttaatttcaagctaatttggttaccatttcaaaagccgcaatgcgaaacatatccgggaattccctgtcccaaaatttttgtacagcctcaaggtgttggattccaaaagttttgccatctgtgcttatccctgccttttccatcagttcaatggccaattgcctttgtttcttctccgttttcatcaaataacgaaatttatcttccgttatacttttccccataagttggtagtttcgagcaatttccaaagcataaaaaagacctaaaacgattatcaaaattcttttttaatttgatatgtttggaactcactaaatttcccctttggtgtgttaagccgacccgattccttgatttgggcgagggggcaaaagcgagacattttatgaagggagtaaaaaaagccgatgagttgctactgcgagaaaattcttttgggaaaaatacaattttgtttaattatcagaaatatcgattaaaaattatcaaattaaaaaataaaaatttataaatttatttaaattttattattggtagagtggaaaataagtagggggagtacaaacatcgaaaaagaaataaattccggttcttcgggccattggtattgatatatgatctgggcgaaacaatcttctcctcatggaattaaaccgacatttaacaaagtatgccaaaacaaaatttacgcgcaaaagccgatttgtttttggaggggggagagcgtcaattatttccttgatcaattcagcgggaagcgggcaggatatggggacgtgaaatgttttaaaatgaagagaaaaaaccaattaattcattcgacaatatcttactagcaccaaaataatgcacatgaaaaaaaaatccatagataataaaaagaaggaacattcctaaaatttcgtcatttcttttcattttttcataatctttgtcaaaggttaggtttagcatctaatttcttaaaattttaatgattttcaaacaatttaggtaacgggatttaacccttatcaattcaaaaaattaaaaaacaacaaattttatcaaaatcaaaattccattcattcattgaggcggacgtcttgggtcccttggtcttcctctccactcgcccagccgtcggatcacttccaacactctcggggggttgggatgcatttgcttaagaaaagatgtttcggtgctaagtaaaaagacagggtctgaaattaccggtccgtttggcagcgggtggtcgaatagtggcacgtctctcagctgtcgcggtcgttgccgtggttgcactggctgaaaaacatccggaaatatgagaaacgcacgaaaaacaagacccaacattaccggaacgtattctggtggatgatacggcacctttggcggcggatggggcaaattgcggtacggcgtattcacgttgaatttgtcgaacatgaa

SEQ ID NO: 7500 - DNA, 917 bp, Heterodera glycines
  unsure (1)..(917): unsure at all n locations
attaatataaaacatatatntaattaataataaagaagttataaaaaaactaataaataacgccaattattatactatcattacaaagttattgtattgtcaatcatacaaaataataataaatctcatggtcctttgatgttcgggatccgttattgcacaaatgccaaagaatgttatcagaaaaaataagaatgaataacaaaaatgtgcctaatttttttaaataaataatcaaaaaagagatttcatttaattcgaaatttataaaattgtaaaattttattaaattataaatatgaaaagatgaaactacaaatattaaaaattaataattaaatatacaaaactaaaagttccaagcattttaatgattaaaaatatataattaggtaaatttttatttgtgcaaaatctggttttttaaataggatatagctctatttcgcgctaaaagcttaatataacaaattgagattaattcaaaggaaacaacttaaagactcacatttcacgggttaaatttatatttcaggtgaaataataataaatttaccattgatgattattaattagacaaaataaagaggacaatattggagtggcaaagctccacctatacaagagaattattatatcaaatcgttacgtttattttcgtgtttataattttaaaaaaagcatttataaattaaccttaaaaattataaataaaacgattagttaaacttaaaaaatatttactatgatttataataaaacaattaacattatgtataatatattacacaaaataatgtaaaaaaagcaaatacagaatgcagagtatatgatattaaaaaggctctattctaaaataaatgcttttttaacattaaatcaaaatttatttccgaaataaatactttaaaaactta

SEQ ID NO: 7501 - DNA, 4682 bp, Heterodera glycines
aattttccgcttacccgccgtagttttctcgtcgttctcttttctccgactccttctacagcaaattcctatgctttgtattgcgtttgcgtgacttttttcgcactgaaattcgcgcggacactcggcgaatgccccgggcacacaattcttcggcatttgggtgagctcttcgactaaaaatggagagcccccgcgacaaatcgctaaacgttgggatgaattcaccattgaaatttcgaaaaatttacgttcgacggagcaacaatggccttgagagtcggaagagacgcgcgattgacacgaaaatccgtcggggcattgccccaacggcgttatttcactcgtgccgacaaagcaacgcaaaggtcggagggatttgggggtacgatagagagaatggccaaagggacaaacggctgacagaatgagaattgacatttaaatttagaaagataaaatgaaagtgataaattacttccattccgcggagcgcaacaaaaatacctaaaaagggagagaaaaacgaaagtgacaaatgactaatcaaattatcaatcaatcgatgagctaatagatcaattaattgatcaatcggacaaatcaataataattgacttgttatgggctgcggaaaaacggcaaaggaaattggaagggcacgagccggcgacattcgcttggcattctcggaccttcaaaaagaacaaagggcagtccggcggaagttgtgcgctttctcttcgctttcttttcccccttttaccgtttcgtccgccgcttcccaaaaaggcttttcgccctcggcacaaacggccgaagatggcgacccgcagcacacgtggcgatggcccaattcgtcgcgaacgcaaagaaagtcgcgcgggcagcgcaattgggcggcattggaatcgcattggaaaatggaggaaaaagcactgacaaagaaacaatgggaggggggggggggggtaaatggtggaaaaagggcccattggcacccgtcgccgctccttccgtcgccgtttccctcccggcgatagacaatttcacccggggcacaagctgaaaaatgagggcaaaagatattggaaagagccgcattaaggcaaagagaggaaaaatgagcaaaattaaaacggaaaggcaaattcgaatttgtaggaaaacacctgccgaagaacagaatttggtgcactgctcgcgactttcgaagttgttcatgttgccgttgcacccaccgaagccgaactcgccgcactcgcgcgtcacaatgttaaaataccatcgcgtcaacgacgccttgcgacaaacggtgcccacttgagggggcagcgaacaaatgaaagctgaaaaaaggggcggaatggcacatgcagcggatttacaagcagagaatgccaatcgacctttggtgggacagcagcgatgtgcgatcactccgtttgcgttgatcggcacgcactcgcgcgagtcgcggcttgggcatggctgcgagtcggcacagctcagaaactgattgctggtctggtcgcgcaacggctgaccgccgttaggacagccttaaaaggacgaaacgaacaatgccgtgccgtccactcactcacccccaattccgcaatattcctggcaaatgtccaacgattggaaattgttggcattcccatcgcacccttcgtattggaacgactcgcagctttgcttttccgcgttgaagaagaagcggaaggaacggccggcgccgcattgggtgccgcggtcggagcctaaggaacaagtccaagcccggaggggacagcagccgaagatttgtccgtcgaagtgacactcgtggttcagcggacagccttcggccaatgaacagcgcgtgaaaagaccggaaaggtcgcggtgggcacgcccctggggacagcgcggttccgctgaattggcaaaattggcccgaaatggcacagcaggggaacagacaggcgatattgcggcatttcatttggcactcaatcaactgctcaaaattgttgtcgttgccctgacagccggtgaagtcgaacaattcgcattggcgagtcccctgaggcaaaacgtcattaaaatggcactagcacccaaattaaaataaatgctaattgctcaccgcattgtaccaatatcggctgacacttcccgtgcattcgcccactctcttcggctgtgtgcaaatcgtttctaatgaaaagagttcgaccaaaaattgaaaagtgatcgtgcgaacgcgcggtagggcagcacactctgtgggccgagtcgcagctgtgcgtgttgggacagtcggcagctggcggaaggaaaaggcgccaattcaaatggccaaacgacacccttccccccccccgcctcttacttacccaattcgcacctttgccattggccctcggccacgcgcaacggttggcccaattcgcagaccactgaaatggaaaggaactgagggaaagccaaagaaaggagcgcccacgcttggagcagaagtgttcgcagtcctgcttggtgacgaagttgttgaaattgccgagtccgccctcgtaaatgaaattggagcacctcaaaacacaaccatttccaattttggactgcttctccttcctccttccgctcaccttccctgctccgcgtcgtaataaaagcgactggtcggtgcgcttccggcaatttgaatgccagggtcgaacaacgcgtcggcaccaccgctcgtgggcaatgccccgaaggggaaagtgcgcccacccgcggcactgcacaaatgggctgagaaagggacggacgcattgacagacgaacagaaaacgaaaacggaccgacggtggggcaacactgctgcagagagccgatttgcacgcaagtgttttcgggggcacaacttccgctttgccgcacgcaattggcgacggggaaatcgtcggagagcgaagcgcggagagagcgacggaactgagcggggccacgccgacacgctaaagacggactaacgaacggacagcaggtcgagacggagcggaacaaattggcaaaaccacttactgtccctgcaaaatgactcgcaatgctccatcgtccgaaaattattcggtgaaactccgtccgattgtgccggatccttcagacttttttgggctttttgacttaactgtgcttacccaaaggaattgtgtgcaagtaccggttacggagttgtacctgagcacaaattacagaagaagcgatgggattgattcaacgccaatggctaaaaaagcgaatgggtgggccgatcaattcaaatggctacgatcatttcgaattccgtcgctaataagggcctcaaagtgtccccttttgcctttgcctcaccaccaccgtgggacggatggctcttctccctgttccatcggttggatgcacacaaatgctatttagagagcttcaaatcaaaaacatcaattttaattgatggcaatgcctcggctatgacaacaaattccgtcgacagtcggtgcgtattcggggaaatattcgggccgaacttgcgggtggggcacgcaattgtacaaatccacaatgggcacatcgcgttcaccatccgggtaaatacaccttggaatggcaaaatcagtcagaaaacagtaccttttgacagttggttagcaaattccattccattcaatccattcccaacgcccttttccctctgggaatcgtcgattcaattcgggacgattcatttaaagaaatttgattcttgccttggcagcaagcagattaatatctgttgcactgcttggttcagtatccccttctccccccgtttcttaccaagtcgacccgtcgcctccatttgagtcgtccgtctcggccgaactgctggtacaaaggacaggcatatacgaaccgggggccaatgggtgtgtcgatggattggccaacaaagtgacgggggacggcgcttctgtggccggggagagagagagggggggggggagggataggacaaagttcggccgagtgagtctttcggttcttaggcttttcggctttacctgcgttattcggctcgggcaaaggacaagccggtggaacgctgctcttatatttgtaaaaccagttttaatgtgttcttcctctgctgtgcttcttactgcaacacacattgtgccgtcccgcgtctttgccggcacgtaataatcggggcattggcacagcccacccttggcacaacgcgcgccgggccacacggattcgcattggacatcgccaacacagccgctgtccccggggttaacttcttcaaacggaaaacaaagtcaaaatgatggccaaagaagggggaaagacttggccaacaaaaggaggagataggcacgtaattggacaggcaaatgcattggccaacggagcagaacatgccggactggacaggccaaccccaaatggatggagaggggaaaaacggagaaaacgccacctgacagtcggtgttttgagtacacaggtcgccaactcggccaccacctttggggaaaatgaaaagtcattgactgttctgtatcgcgactccaaatttgagattcgagaccgatgcccccgggcaagacccccttcgtcttccccccctccccccccacctgtgaatgtcggtctcttcaaatgccactcatcaacttcgtcag

SEQ ID NO: 7502 - DNA, 3157 bp, Heterodera glycines
  unsure (1)..(3157): unsure at all n locations
cgtatttgttcagcagtttttccattccgaaatgcctccccccactttcgtttccgtgttcgtgtgctccgcgacaagtcgtgcgattcgcgtttgcagcacacgtacggacgctcgcagctcctcgattcgttcctccgccgtttttcgctcttccggcgcattttcgtccagcaaattgtctttgcgtaataattcgcggcccttcagaaaaagcgattggttttctctaattgtccatcgccttcgtttgccaaaagccctcggaggagtggctaattgatttgcctacctttcctatcataatttttcgtgcctcggggtattcgcgcaacgcttaatgagtcaatttcatttgttgagttaacggtcccttcaaatattaccggtccaaaggtcatttttgttcaacacaaacagatcagtgtagccaactgatctcacattcgcagtccgtcggttgccatttttgctgcccgcgatgttcaaaatgcttaattcaccgaagacggcaccctccgacagagtggcgaacactttggcgccgtcgtccgccaccacctgcggcaaataagcgattgacaaacggccgatcgatcagtgctttcgagtgcgactgatcggtcaattaattgcctgcagcattccccgcttcacaatgtacatttcacgaccgatgtctccctttcggcaaacgtagtcgccgggagagaacacttgccattgcaacttcagcaccaattcggcgaggagaccagcctcacaatcctaattaggaaattaggagtgattaaaattacaaatcagcgattataagtttattttagagactttgctatgtgtaaaatataaagcatataccgccgatggacattttgaaaatgttgtgatttattagctaattggtgtcattaattgccaaagcaactgtcgccaatgttttttaattttccgattagcgcctaattaaaaatttaatgtgttagtttagtaaaattgaaattttctgcccttttaaccattctctcccctcccacagttttcttcccccgcttttttctcgcctggaaaatgcggactttgcgcagcgtctcgaaatggacgtgcattgcgatttcggcctgcagtttgtccggcaacactttgagcacttgcgcgtcggtcagtccctgcttattggcccacaaataatcgaaccatttgatcactcgcacttccaacttaattttcggaatgtccatcatttcattatcaaaaatgtcattcctttttgcataaatttccattatttttccaatttttggtcttccatttgcttttctttctttctttggcactctttcacctgtttgccaaccccgcgtaagtccatgtactgcttgatgttgtcgattcggttttggaactcggtccgatcggcactgatattggcgatcatgctgaaggggaagtgatcagttcggacgaaggtccgtcggcaagtgatttgcgaggtcggctgaccttccgacatttccgacgatggtggcgaagatcaaaacaccgcacatcaaatcgatggtgacgaaggcaaattcgatgttctgctggggcccgggcacttcgccttggaacgggacagacagagatcagatcggaggttgactgacctttgccagtgccgtaccgattgtggtgaggatcagcgtggaccagtagaagctgaacactccgaatggcaatgccctccttttctgctcacctgtagatgtaccgtcgggtcagcgtgtcattgatgccgtccggcatgctttgtttgttgtttttgccgtacacccacgggtcagagcccaggccgatgttctcggagatcatgaagtaaaagctgaataaatgttcgttagtgtccgtcccgttttgtttcccttcccttggtcaattcctcccgcccccgcctctcccccgtgtctccccccacctttccgccgccttttccccgcgtctcccccccccccccgactcgccaagcgttccaatggatgatcaccgcaatgtaccacaccaccacgccgactctgaacgcgtttggccgtgccgtgcgcgtctccgtctgttccataaagcgctgaatgcgttcttttcgcagcaaacggttgagccgcaaaatgggcagaggacgccacacaaaaaaaacgagaaagtcaagcggaaaaagagaagcgctgtcgacgacgaagtggcggctgcggaggtaaagcgagcggattttgcgcgcgtcgcgcaccaacagaccctgctccaaataacctgaatggcacaaagtgattttgataatgataatgggttgactcagaaaaatctctgcccgatgctgccaaatggtgcgacgagtgaccgaccgcaaaaaagcggtcttttggccctcccccccccccctttagaatttccgatccgaaattcgcccgttatttttgtgcgtccattgccaaaacatcggaaggtgnttatttgcttacctgttctcgaccggacgaacatgtcaaccaggtacaccgaatcccatgcaaaggtccaaagtgagccacaaaaagagcagtcggccggcagccaattcgacaaaaacactccgagcaatgaccacctgtggtggtgattaatttgagggtaaaaagggataaaaatgagcaaacggaccaacaaattgtacacataagcggtggagaccaaggcattccattggtagaagtaattctcgttggcatcgaacacaaactttgcccactttcccttctccatttgctgctgttgttcggcagagacgagtgccggcgccgttctccaactgaacgccggccgcgctcatgccaaacctcgacatgaaattggcctgctcttgggccaccgcgtcgtttacgcgatttctgccacggaagcgccaaatggacttaaatgacgcatttttgccaattgagcgcatctcgaggcaaaagcaccttggaaatgcctctgatcagagacgggttcgagccccacgttcggctgctgctgttgctcaacttcgatgtcggcactttgctcaaccacaactttgcccaatggtgccgtgtcctgtgggctggtcaccgtaatttgtggtgaagccggcaccggcactccgccaacgaccgatccgtttaag

SEQ ID NO: 7503 - DNA, 6853 bp, Heterodera glycines
  unsure (1)..(6853): unsure at all n locations
aatttcggtaaaatggttaataaaaaattcaaatttttcttagaattttttgnnttttnnnaanaaaaatggcatttccctttaggtatatatttaancncgancncgagtcggggttaagggtcggggtcggagttgtcggggttgcaagcgcccaggttcggggtcggggttaaccccgaaaatggccaaaaatgtcggggttcggggtcggggcggggttgcaacccaaataaaatcttactcaattctgactttcacaatggacttaattgtaatatttaattaaattaaattatactaaataattattaatttttctttattacactgtttccgttttcaatttttcgctcagtcttgagtccaaatcggccaatgcctgccgtaatgttgccaaaatttgttcgggcgttggcatatttttccggcgctccaattcttcttgtaaggcagaaaatgtggggaacacaaaaatttgctgctcagtcaaatcaaaggcataatatttggtgaaatcaatggctttttcgccatttggcgcctctaaaacgaaggcatgcacagtttcctaaaaatttcaaaaattttgaaaattttaaaaatccagggttggattttcgaaagggtataaaattgggttcagccgcctgatctgatgcaggaaatttcgaagctcaccgttactctccaaactgaataaaaatgtcttgaaaatgagtttctaaggctttttggtttaaaaaatatttctataaccttttttcgatttaagacaatttactccccgattaggacaaaataaaatattttttgatataagtttgcctaaaaagcaaccaaatttttaattcttaatatcattaatagaaaacacatagggctaccgaataatatcaagatttataaaatttgattcattttgtgcgaagttatgaattattttctgtaaaaattttttattttaatggttttttgagtaacgacacggtacctccatgactaattaacttaatttataaaatattgtttaccattattattattattatttttaaattaaaaaatatttttcaataaacaaattttatgtatgtgttattaaataatatttgcctttgttgcacggaatccaactgacaacccagtgaccattttattgatgttcacttggagctaaattaaaatatatttaaaattcaaaattcccatttttggcattacgattggtgtgttgtttttcagcttcatatacatccaaaattgcttctcgtccttccagtcaagccttgtttcaagcaccgggaattgcacatcatctccaatcacttcgacgtcataataatccactgcatcattgttatcccaaatttggcctcttaaatagcgcgaaagtgttgttggcgctaaaaaaattattaaaaaatttaacaaattaaaattaaacagaaaatttgaagccctaacaaataagtgtattctactaacctgcaaaaaattcaattttttttaggttcaaaagtttgaaatcctggtccctgattgcttttggccataactttgttcaaagttaaataaattttttgaatttttttaggctaacagaaaactcttcggggtacgaaaagatattaaaaattaaaatgttagttgcttttgagcaaagttatggctaatttttttgttgaaaatttttatagcgattgggcagaaaccctaatttaaacaaatataaacaaacaaatgatgtaattaaaatttggataattgtttttttttttgaaatttgaaaattatttaaaaagggtttaattttggtattaaaataggttttactaagaattttttttagcaacttacgttctttgtaaagacgttcaccaattgcgaaatggtaattgtcgaaaaatgccaaaataaatactttcaacagaaataaattcgcaaatttcatttctgtaaatttttattttttcggcaaatttttaaataaattttttacattaaaaacataaaatgaagaatattgatatacattaaaaggccattaatattgttggcatatcaattttgaatatgctgacataaagcattttccggtgttattaaaggcaaatatataaaaaatatatttttatgaaaaattttcttttataaaattaattgctatattttataaatgatttcataattattattttacacgtgaattttatatgttggaaaatgctcagaaatatttccgatttatgagacatgacacgattttttagcattggaaatccgccgtatgcactagataaataaaaatatttaaaaaaaatttaatttgcatttttttttgaaatttttataggaaataatgtttaaaatttcgagttttattttcgtgttgtgtttggttcgcttatgtgtgtccatggttagccaactttcttcaccaaaaaatgtggttaagccgcgctcgacaggttaaaaaatctaaaataaatttaaaaaatagaaattaatttattaaaaaaaaaatgaaaaaaataatatttttagaattaaattcaaataaaaaaataatgaattcattatcaatgccgacaagtcaaaaaatgtccaattcattacgaacttatggccataacagccttttgtacaattttcagacttacaatggtaaaatttaaaaaaattatttaaaaattataattttagaggatttaaaatacccaaaaaaccggagaaattctcatatcgtaaaatcatccatttcgagaggctcattttgggatggcattaaaattcgttttaattacggcaatcaacttaaaataatgttggaaaacagcattgaatataagaacaaaagaaaatttttgtcacttcaaattgtcggcacaattgaagaacaatcagttagtttacagaatattaaaattaattaaaaaataattatttttatttttaaatttatacatataattagatttgcatgagatcaagaatttgggaaaagccgagatcgggatttttcgggatcataaaagtaaaacagaacaggttacaatatttaactcggaaattttgaaagtaaattttttttaatattttgtttgccgtattaatttttccaaaaaatttttggtagacggggcgaggcaggcaggccggcggtagcgatagggctttgccggagaaaattatgaaaatttatttcgaaccccatttggacaatcttaatttcaatttttcttttaatcttaactcttccagttttacacattctaccagtgcttatttttcccggttgcccaaccggcacccggaccggaagtaaacttaaaaaaccgtgatagcgacctgggaggatcggtaattcccaaatcgatcccggtcttggtcacgtgaaagcctacatataacggaacttttttttacgaaaatatataaaatcctattaagttatttgcatttaaaattcaattcaaaatataaaataattaaaattattaatacacttcaaaaaagaaaattattaaaatttcaaatttttaataattttttttaattgtagcctggccaaggctacaatgtgtcggcactccaagcagcggtagagaaggaagaagaaattttaatgggcccccaaattggtggatttgaacatattttaaaaattgctactgtaatgatggaagcaatcaaccagttaaatgccgcagcaattggaccggtaaaatttcaaaaaaaaattatgaattttttttctagtattccactggcgtcaggttttctgtagtttacgggaaatccggctaatctgaattgcgaattttctaacaaatttgcgcctaatcgcgtgacagatagataaatatattaatccatagcaattctcgagagtcttaatctaaagattggttattcaaagttatgcgtccggtgtgactagaacccacggcatttatgctgtgaaatgccctaaccgactgagctacggcgcccacctttagaggttcccccataccctaaatcccactttctcccacattctgcgtacttctggcaccacaaaaaatttataaaattttcaacaaaaaaaaattcccagcgaattttaaaaaaaaattaaaaattagaaatttttcaaattttatttttctacaagataccagaccgaataaaagtggaacagttgcgcttcattggcctcgtgcttgcccaccttgtgctccgtgatgacccaattgttgatccggagactggcgattatgtgttcattgcgcaaatggagccatgcattgatccgatggatccgcacgtgtggcgacaaatgcgcgaagagttggacatacaagtgagcgtaattttgaaattataatttaataggcacgataaaatttcaaattttatgatttttttgttgtatttttcttttgtccttaaatttttgaaaattttgttttcaattttttgaaaataatttctttttttctagccatttcttaaaaaataattttagaaactttttcataaaaatccttttttttaataaaatcgtccgttttggctcgtggcctggaaccaggcctggacttgaattttttgtttttgaaatcaaggttttccgtgccgaacctggacctgggtttcttttttactatttgacctgaatcttgattctggacaaaaatcctggaaaaccaggtctaaaaatgcatgcctgggtccaggtccagttcgaactctagtttttagtaattttctaataaaattcaaaataattttataataaattttttaaaaagttatcgatcttaaagattcgtgcccaattcgacgtgccagcaaattttggtcgagcaaaagcatgcggacggcattttggctcgagaaggaactcgtttgagcatttgaaccgcaaaattatgcgtggcattccgaagagcgcggaattggtcaaatggcgcgaattggcggaaaaatttcgactgatctcactgaatcaccacaaattgccacattttaatctcatttttcgtacattcatcgcttttggtgaagaggcacccaaacttattcttcttgtctgcgcaagtttttttaaacaaattttaaattaattaaaaatattacgaagttgagacaacaatatttcaaaattttgagttcatttcagtttgatttttcatctaagtatttatctaaagtggagactggtgacgcaaatcgggatcttgctggattctcgggatcccgcgggatttgctcgggaccggaatttggacaggatcaaaaggtccctccctccctctccatcgtttttccaaaatcatgggattgatcggaattttgccgggatcccgacatgggatccgtccaaccaagttgtcaggtatacgggatcccgaccttggggttcctctcgagccgttttccaaagtctttgggatgatcggaattcggtcgggtcccgactacggattcatttgaccccagttatccggtctttaatagaaagtttatcccaaattattgaaaaacgaaatatattcggtcaattaaatctctatttattcttttaggtgttattggaaggagcaatcaatgaatatcaatttgacaattttttaaaaaagggatcaaacgcagacttattagcattcattcatcacatgccaagcgaaatcttgtcaaaacaactgaaatctgtcgcgaaacaattcggattttgagggattagatagatcattagacattcacataaatttgttgataaaaatgtttagactaaatgctaattttactcggataaaggcatagtgataaaaatgttgttgaaattttgatcatcacaactctccaaaagtgatcagataaagaaaaattggggactatagtaatttttactaaaatacaaaccttaaaacaaaaatgtaaataaaaattcaaaaaatttaaattcaaaaaaatgtgagccaccttcaagattagcgggccaggacgttatcgtaccgccgttttcgtaccgccattttcgtaccgccgtttttttaaataaatcatttttatgtctctgaaattacaattattgcaacgaaattatctaaaaaattaaaattatataaagtaaaatgatttattaaatttttttattgtaaaaaaaataatttcgaatgaaatgaaaaattttaatataacaaataaaaataattgaatcattgtgatttaaagtagcattattatttgattgatttttttttttgtttttacaaatttaatattcatttccttatttcaatttatttttacacaattttatttaatttatacaaaaattaaattatttactttttttaaattctttttcgaattcatatttgaataatgagcgctatgttaattaaaatcgtagatttcgaatttttttaaaaaccctaaggggggactctgttgatgtgcaaaatttatttaggttcggaagtcggtattggttaaaactgatgtgagattcgtgatcagggatcccaaaacccctcaagaacaaattttctttagtagaaataattttacaaaaaaaaaaaaaaaattcaaaccaaagcccccctaccccttttgtttttaataacattcaaatcagacgacttttcaacgagcgacgaataatgaagcaatttattattttaaatgattagataattttgttttcatcatatttgtttatttgttttcgaatgcaaattttatagatatatttttaaataaaattattattattttccatatttctttcgcaacacaaaattccatattttttttatatttttagctgattttcattgaaaaaaattcttaattttgt

SEQ ID NO: 7504 - DNA, 3971 bp, Heterodera glycines
  unsure (1)..(3971): unsure at all n locations
agggcatatatgatgaatgattgggattttcgaagtctctaaaggggcncngngaagcgnccggcnannangncgaccatttcgaccaggangannacacaaanagcgggcttaaaaacagagcgtcacgttttgctgatggtgccaaatgtgaaaccatggtgaaacctaattttgatctcgcccgtcagcccaatctattgcttaataactcggatgtcatttttagcatacaccgtaacaccgatgattttctaattatggcaccgccatatgtttcaggaaatgcagtcatagcgaacccgcacacatatcgtattaacatacatgatattagaatttatgtaaaaacagtcgacattacccagtcattaaataacgtaataagcaatcagctacaaaccaccccggccaaatacccgattagaaaaattgagatcaggagtcttttcatcccacggggcacttctgatctctcacacaatgtttttaccagcattgttccgagacgtttaatcgtcgggtttgtttcaaccggtgcgtataccggaaatcctaaagagtcacccttcgtctttgaacatgccaaaatacgctctatcagtgtcgaagcgaatggaaacattttccccgggtccccctattctcttaattttgatagaaacaaatacattcgagcatttgttgacatgtatacggggctcgggatggacgacggagaaaggacaatgtcgatcaatatacaaaaatttgtaaacgggtggtgtttcttcgtcatcccgatgacctctactctagaggacacccccggttttgaattgattcgaaacggaacgaccagcatcaaggtgcaatttaatgagcctataaaggacggcgggtatgagatgatcgttctgggggaatttgattcgattttgtctattaatgctaatcgtgtgctcagtagcgacggaagcatatgatgaattcttacgagattgaaatatttctatccaaacatccgacaacccgaaaatattttatcggcgtttttgcttccgacaagatgccaaaattgaaggacaggcattttccgtactgttttgtggcgaataccgaccgggtgggcacgataggtgaacactgggtcgcctgttttgtaaattcgccgacagaaatagaatattttgattcattgggcgattatcccaacgaagatttaagttcatatcttaacctattcaaacgaattctcattaacgaccgcatcgtccaacatcaattctcagatgcatgtgggcaattttgcatttatttcttgacacaacgatgctatggaatcacttattgtgaggtcattgacggtctatataaggttcgcccgagggccgatttattagttaagcaatttgtcagtaatgtttaatttaattgttctcctaacgatagtcggtcaactcagtggagaaagggttactattctttctgatgcacaactttttgacgacaagtatctcactatgacaaagagttcggtcaatgaaagacagttcggattcgatcgctcgagactatgtactataaataggaatctgatttcagggtggagtgtatcaatccaagaaattaattcaaagaaaaaagcggacccactaatgttaagctttaccaggattttcgacaattaaagccccgagcgtgtttttattacaacgatcatagttatttaattttccaaaacgaaaagacaaatgaaacttcgataacaagagggagtcaagaaatggttgtcaggaattttcccggtggggaccttagatttgatcatattgatggtcgacttttcgtaatcagtgacgatcgaatagatgaaattgacattagatcaatcgagaatttatggacccacaataatgaaaccgaaattattactaaaccgatcgggtctatgccatcatcatttaccgacttactaataattgagggacaaatttatctaattaaggagaagaaaatatacaaagatcgatttgactcaaacgagatacttcccaaatatgtgtcagacacagatagtgaattttttaattttgtcgtgttcaaagaatttgagaaaattaaagtttcaagttcaaatatttgggtatattttttgtcaattttagatttggtagtggtcgtcatctgtatttcagttctcagaattttaaaaataaagaaaaaaggcaaaaactcatcctacagtggtgaagtaatggtatataaggatttgcaacgaatatgaaaatgcctactcgtgctcaaaatgaattctctcgttgaaattctatgcgattttaacgaatgcgaaccacatgaactttctgaaattctaagactgcggaagaaagaaaatttgaaatttttgagaagacacgccctaataacgagacaccttaggcacaatcagtttatctcaccggatgacatcgcatttaacggttctaatcgactttttgcctaccgaggtttcctaggggttactgtcgaacagcacctctactctagacatcgggtcaaactacaattccctcaactaccgtgtgtaactatgtaccagaataatggtcataggtgctattttccccttgaacttttggattttttataaaaatattacggctaacaagagtgggccttcactttagaccgttccaccccagctagtcataatatcactttaatttttttttattcaactttatttaacaaaaaaaaaacaataaaatacaaattaacaaaatccaaatggtatcacattaagttcttcatcgattatccccttctggcagaccggcctgtacattttgtgcttctccctcgtcaccacttttgaatcccgcgttggcctaaatattgattttttaatgagtcaaatgtttgaaaaacgtacccaaaatcattcttgtacacgaagaacgccgggtcaacctcccctttcccgtaactaagaaccatctccctgaatgtatcgtaatgcaaagtcttcctgttgtccacgtcgaatgtaatccccctaattttcataacgtattccgtctcccccgtctgcttgtttttcatctttaatgcgtactgcttcgcccctccacaacaatattcttcaatctcatgcccaccgtattcctcactcatttctcccaaaaatttccccgtcgtaatcggctccacgtccctatcgtgcctaacaaaaatactgtccgtgtctgtgtacaaaatctccccgccatttccctcggcctccctcataaattccaataattttaaccgcgccatactcgtcgtcctggaaaattttaaatattaaaaattattgacatttatctcaccataaactgataacaatgttactggacttgtgctccatcacaaagtcctccttgtccctgtagatcactctaatcgcctcatccgaatattcaacaatatcacacatctcaactttatgatcacacgcaattttataaaattccgacgccctatcaatcaccgcattcttattcaaacaatttctcatcgaaaatttcccctaaagttaaaagttaaaattcttctacaattccttaaatgtttcttacccataaactattaagcatcaatttgctgatgtatcgtaatcccggattcttcttcacttttgccaattcaatatctattccatatttttctttatattcctctctccaaatattcttctgctcctccgtctcaacccccttcgggaaaccgctcgcctcctccttcagcttcaaaaataatcgcacgtatcctttaaataagtcatccgcctcttcttcgtaatgccacgctctataaaatctgtccacagaatatccgcactccaacgcctttgcctgaaaatggtcaaattatctaaanntttaattcttacccaatcacgctggtatatgtcgccacgtatctccgctgtgtctcatcatgggggcaat

SEQ ID NO: 7505 - DNA, 3015 bp, Heterodera glycines
ctcctcggtaaggggtcaaatcccttcgtaatatcgttaatcaatatcctcctaaactcaataatcgataacagcaatatctccgtgtcgtttctgcaataatttcgcaattcgtcattcaaataaaagggtgtcgtctccttgttttcgtggtacctgaaaacaaaattttatttattgttgttttttcatgttttcttaccatttttcgaattttgcatatttttccttattcatcgatcccggcgaatagtcctccatcggtggtagatgttccaatcgtattccataattttctttcttattgtagtagtaggggaaaaagggtttgtcctcacagtccaaattgaaggtcgccttcagcgactcgagtttcaccggcattaataagcatgagtctctccatatcagcattgaatgtttcctcgaattctgcactttaaattcataaattttcagtccgttgatgagcggtatcgggttcttcccggtacggcagagataattaaatacaaaatgtcctgaaattttaggattaaaaaaagtaaggattaaattttatcattaccatcaaatcgtccggcgttgtgtgcaaaaatgtacgtatcataactggtaaaagcagttaaaatccattccacaaagtccttcgtcggctcatgtcccaccgcctcgctccaatccttggtcctctcctccccacatattttgcaattcgtcctatttttgtcgtcacagcattccgtacacgtcactctcaccgaaatataattaatcacatgctccttctggtcccccttgtaaaccgtgtcctgcgaagtctccgaatcctgaaagttaggttttattttgttgattttattaaaacttacccaaacgacaattctgtacacgtccttgtcttctttttcttcgatcggcataatataacatccacgtttggggtcgtggctcacactacaaagctggcaataagtctctccacattcatggtccttcttcgggttaaatcgataagttttgtcacaaatcacacaacgtttccataatttgcaagtatgtccttgatgatagttgtagcattcccagttgtaaaagtaacgtcgacacttcgggcattcaatcttcactccactctccttttggcagggcacccctccaactctgttgcaataataacatctcgcccggcactccaacgtatgaaaaacatcccgcgaataaaaacattcgcaatcaatacagaattttctcccacgattaaaaaagcagacgtaattcttcagaccatcccagtgaccattctccaaaaatatcggcactacattttcacgtcccatagggcccttccacaaaacacggattgatttccgcggatccgcagatttctcaaatgcaacaacccggtactttccggggtatatctcatcctgaaaaatttattaattttgcattttttcatttaaacccacccaataattctgaacactcgataaatgctccactccataattcatttcatttccattaatctcacaattccgtaaaagttcatatgccgtctctttctgtcgcacaacattcttcataaaacgaataaacgaatatttatccataaccaaataattcatcgacgaagccagtgcgtagaacaaacaaaatttatccccattagaaatccttaataaatattattattataattattttaattatttcaattattaattttttttttgattaaaaaaaaaattttttttttttgcttattttaaataattatttaaatttattattatttttttctgtttttctattcaaatattatttttattttcttttttattattttttttttctgtttttctattcaaatattatttttattttcttttttttattatttatttattttttttcttcattaaatttaatttaaaaataattatttttaaatttattttattgttttttttttctattcaaatattatttttattccttttttttttttttaaattttttttttattatttatttattttatttgcttttgcttcattaaatttaatttaaaaataattattttaaatatatatattttttttttcgtttttctattcatttttcctacttcgttaaattatttaaaaaatacttaccttatccgctggtgttccttgaacccaaagtcaaatttatgaacattcctcggcccctctccactgggcattgtcacacacgttattttcatcgtgattggctcagacagcaacagcattttcttattctcctctccatccccgctctgtcccagcttattaatctcctgcataataacttccgcattgttctgcgggtacgccctgtacggcacccacaccgggaaagcaagcccggcgcccgtaatggccacaccaaacattcgtactttcctcatcatcctttcttccgtatttttaaaagccacctgtatcattgtgtcgaccgcatcctgcatcgcttcatcggggcgctccacatccgggttgatcacaaattccgcaatattcttcgtaaatccaaatttttcgcaaatcgtcgaacgataatccactaatttaaaagtttccatttcttcaataaaattgtttctgaaaaattatatgattaaaaatcgaattgcttatctctaatatattatttaataatttatttaaatgacttacccgattgatcggaaatcccattttttagtcgacggtccgctttgttgagaggttccattgcgttttgcagccatttttaataatatttaataatttctaaatatttacgcacaattttattttagcaaaaatccaacttttggttgaactgattgggagtgaatttgggcggcttttatacgagacgagtgatgtgcaaaattggacctgtcaatattttgattgacaggttacctaattttggtccagattgcgaaatattggaaagaaaaaaaacaaaaaagtcacgtgcatatgacgaaatgaa

SEQ ID NO: 7506 - DNA, 797 bp, Heterodera glycines
ggtagggaattcggcggtagggaattgggtcgatccctatttggtgttatgagcaattttgtctgacactggggcgtacccatagtgctgttataaatgacaggttttttccaccttattctttgcaactagcgccgaaaatttctagaaaacaaacaagtccgttaaattttaggaataaatttaattcggaccaaatctaattttcaaactttttacttttaaggctgttccttgtcaattatggatctcagcaagcttgaaccctgtctcaaagaatattacttgaactgttacccgtacgatctcattttcaaatggctttcatattcgaatagtgagtgaatttggcatttagggcacttttatggtaatgctttttgtaagtaatacccccaaaagtgccggcatttattttcatctttcgtattgagtaaattttcagagaaccgtgactatttgtcgaagagggaatttgctttcatcctcgagaaagatgaacatctccgttttctttcctttgtcgaacccaaagaatttattgtaaaattatatcaacttcggtaatcgaaaagaatgggggtcccaaatataaaattattattttttatttgagctcaaaatgagtaatttgggggttttcgagggtgctgatcacgaaactgaactcggatttgctcaattccgaatcccgggcccgaattcgaacaaaaaagttggatttttttttctaaaggtacatttttctgggtaaaagcttcgaattcatttaacaactatttattttgatcaaaata

SEQ ID NO: 7507 - DNA, 1308 bp, Heterodera glycines
tcagaacaaagatggctctgcgatcaacaaatatcgggtgcacccatttgttaccgaatcgtaccgaaaaatcatggaatccggcgattttgagcagttgatcatggaacagggatggttggactcgggcgaccaatggaactccacaatccttgcccattggactgaccaaagtttggctgaactgctcgacaaaagcttttcaaggtgtgcattttttgtttgggatttgttcgaaattattgggattttagttgagtctccgccaatttcctaccaagattttgggttttggttcacaattttcgtttttatgtcgaatttgcgctcattgtttaacaagaaatccaatttttgggctgtgtttcagctaatttcttaccaagatttgtattttgtttcaattttgttccgaattatctctaatttcttagccaaatctcgaactatgaggagttccggctccgtttttttttatactaaagcccaacaattaatttggttttccattgccaggcttcaaacgccaaaattgcgttgggaatcgatgaaactccgatttgatgatgcaacgcgaatcaatgcgcgagggatcaaattgccaccggttttcaataaaaattttgggtaaatatgtaaaaaaatgcaattttttagacaccttccgatgaagcgagacgttttttcatttcattggtcatgaaatttgcttatccgcaactcgacgcaaaagtcactgctgggtgagtcagttaaagacaaattaaaatggaaaaaatttaaaagcatcttcggagcattccgaatcccgaacctgaattcgaacaaagagttgaaattttcgatcttttctttaatgatggcggttgatgcaattctaatacatttagtttgaattcgaaagtaaatcttttctaacaataagcataaatttaaatttacaaatttgaattatccattgtatttagttcaaatccagtttaggggttcgtaattgcacgaaaagaatgcccattcgagatgagagacccttaaaaaaatttttcaaaaaaattccaggctcaaccatttgctgaaatcgcccttctctgttcatccagaaaatggaaatgttgccgttccgttgagtgccaaagaaatccgtgcctttgatccgaatgtggtgccacgaattgataaattgttggcacaacttgcctcattgcaatccagccaagaaaacaaggagaatcagcgttcaattggtaaaaagttttaccggcaaataaccagagattgcttttattagagagagaccgagattgtgtt

SEQ ID NO: 7508 - DNA, 3852 bp, Heterodera glycines
aaaagcaaatgaaaaggcaaatgcaaaaaaaggaaagaaaaaaggtcaatgccaattgactcaaaatattatttttcatttcggctgggaaatgatgaaaatcgcaaaaaaaaaatttaaaaaatttaaggtgcccacatagttctgcagcggaccgggtcgattgggccccgccgattgggccccatggggcagccacttttttcgtttcacatgttttaaaaaaattaaattattcataaatttattaagtatgaaattctatccattcttacaaaggcaataactcgtacaatagcagttcgtacaatacatttattttacaaaattaagcttatagcttgggccaaatctaacaagggaaccgtcagaactgtgtcagaaaatgcatgtatcataactatttgatagtgcagggccggctactctgaatttttaatgttagcggtgtgttgaagccaaatagaaaagttattggacctcaaaaatcaaaattttgactgtgttttccccttcagggaaggtggtgaagtggggaaaattaaaaaaaacatcagtgggttaaattcttatttttcggaggtccaggttcgaacccaacatgaaaaaaatacattttaattaatgtgcaacaaagttaacgattaaaaaaccattttttatttaaaaatatacataggtaataatttttctttagtgaaagtaaaccaaaagtcgactaaaaaagtgactgccccatggggcccaatcgtactggggcccaatcggcggggcccaatcgtaccggggcccaaccggcggggcccaatcggcggggcccaatcggcggggcccaatcgacccccaccggagattttggggttaccgggccagagttcgagcttctaattagccaatttggccgatcccgggccgcctggttcaaaaaagccgtttaaccgctcgggcccgagttttttttttttttttaccgtgctagggcagcctgggctggttttttaaggttcatagagcccaggctaggggcggtctcaagaattagacaaaattaaaatttacatttattatatgagtgtcaaaatttttgaagcaaaaaagtcctcgtcgatactcttccaagttgaggtcctggttgtgggtttatggattcatttttctctcccattttcccctttaaaaacttttcaggtgtttttttggaaaattttttgacaaaaacttacaatagtattataattcaacataaattttcgaaaaaaaaaattttcttataaattgtctatttcttttatgttttagtctatcgtcaaacttcattggctccacacattgctgtgtttgaacaatggaccgcacaaattctccgttctgaagggcaaaaatgatgaacaacagcatcaacaactcatttctttcatcattgccatttttgaacactttaactgtttaatttaacatttgattttgccaattcttttttttaccaagatttgttctgtctgaaaatggaccaattacaaatttttctaatttatttgtgtgggatttgaaaatgttgtgtttaagagcaaatgtctgttccaaaaccgcgtcgattcacttattttgagcgtctcaagtccacctttaatgccgtccatgaccaggaaaccaaggtaatccaaattttctttttttaattactcatacaccggtcggtccattcgaattacgcccctttttttgatggacaattgcccgtctaaattcggagcttggtttacaaaaatgcatatttttacctgacaataagaaaaatacgataaatgcttattgtttgaaattatcgagacaaacacaattcttgtaattctgcaaaaacaatcacttgggttttcataagttttatttgataaaaaaagaactgcttacgaaaggaaaaccaatttttttttcaaattcgattcctcattttttgcacagtttctgtgcgacaaattgctctccttcttcgaaaactgttcctcaacaaatcccgccgcctcgtcggacattgtcgatttcactgacacatcgatggaaagtggcgttggcaaatttttgaaaaaccatgacgactttgtcaagcaaattttgggtcagtgatgaaatgtttttggggatttcaacttttttttgaaaatgggttaaattcaggcaaatatgtccatttctcggagagaggggagttcgacgtgttcggaattgaggagacaatgaaaaacaaaaatcgggtaagaaattacattaattcacacatttttggcccggttcaccgcccaaaactcgccaccaagacaaaacattggcaagcatatttctgctcctactgctgggtgttgttgattttgaaaattaattattcaaatttgttcaacattcgcaattttattaattttatatagtacaataaacattcctctccctccttacaattagcccaccggaatctcaaatttgtaaaaaattcaactaaatcgagtgcctcattcccctccaaaaacatatgggtaccacccacccatgcacccccacacccaaatttttgtaatttcccaattttgatttttgagatagtgttttatctttacattttcagcacaatgcaatggtgaaaacggttgaccaacactgttaccaagtgctgtgtttgtgcgcattgttctgtccggtggacatgcaaaagggcgtcatggacgcactgtttgcccatttgtgccgtatccaaccggacagagtgttccgccccgtggaccatgcactgtggacagcacttttgctgctgatcaacccggtgaagctgaagcagcaatgtaagcaattatggcgaaatatccatttttatggccaagacatgggtttagattcgaaaaaaaaattttaaatgaaatttggtaacaaattcaaaattttgggaaaacatattggcgggcgacggggagtgaacccgggtacattttattctctccgctcgacgtttaaaaaacgtttgaaattccaaaaaataaaacatttaaaatttttaaacaaatttcttgacttttaacaattccaaagaaagtttcttcgtttttggcttacaatattttatcatatttgtttatcggcatgaaattgggaccaaaaatttttaatttttccatttcggtgccctttgacctcttcccatggttagggactttgacagcacccaaaaattaaggcgacggttctgtcgaggtgttcaacaatttcatggcggtgttgcgccagccttccaaatgtgatgagccggacaatttttgtttgaagggcaccatttcacttgcgttgggtgtggcaataaaatatgcacgaaattcactcggtaaaaaaaaaaaatttttttttgcttttaaattttcctcaaatttttcaggccttggcatttcgcatgaacttgacgaaattgagttggtcaacgacggcatcaaaaacatggcatttgaatacatgcaggcgttcattgtgaaggcgccggcattttttgaattccctttttcaattgacgtggtcgactcgctgatcaaaaatttcatttgctatttccgcgacaaggtggacaatttgattgtacagtttaacaaatggtaccaaaatggggtcaatggcatttcgtagaatcgattttgtacattttttccaaaaattttgaaaataaactttaaaaaacaaaaatttacgaaaaaattatttttttagagaaaacttttattaatacaaaacattgccacaaatttaaaaaataatgcgctgttaatgcaaatgtcatattacttcatccaactacgaacccctaactcgaaattttagggt

SEQ ID NO: 7509 - DNA, 5861 bp, Heterodera glycines
cacagtttaacaatgttattttaattattaaagctatatttctgcagcacctttttctccgcgacattatttaattgcataatcctataaagagcccaggtcagaagtcaatataaacattaggaggtcgttttgtgataagtaatgcgatgaaacatatctgaacataatcattgcataattatagcagatttaaaaattggtgtggtggagccttagcagatcctggaattactccaccaatgaagacaacggaaagaagcataccttattgcgtaatctgacaaaaaaggagctttaaatcattagaaaatggcatcagaaacggcttacaagaaatgtttcccacaaattgtaaaatcttcgtcaaaattcatcattttttgattttcacagtttaacaatgttattttaattcttaaagctatatttctgcagcacctttttctccgcgacattatttaattgcataatcctataaagagcccaggtcagaagtcaatataaacattaggaggtcgttttgtgataagtaatgcgatgaaacatatctgaacataatcattgcataattatagcagatttaaaaattggtgtggtggagccttagcagatcctggaattactccaccaatgaagacaacggaaagaagcattccttattgcgtaatctgacaaaaaaggagctttaaatcattagaaaatggcatcagaaacggcttacaagaaatgtttcccaaaaatgtaaaatcttcgtcaaaattcatcattttttgattttcacagtttaaagcatatgcttggagaatttcgctgattgccaatcataagtatttgtcgttggatcggtacttccttccagtgccatggcgtgttgttggtttgccctcttttctttagttgttggcgacaaggcttttgtttggctgctgtgttcgaatgttcggcttattcctgcggaaggagctgcttttccttgtgttcgcttgcggaatgatactggtcgcgtggaatttgatgaactctgctttgttgctgttgatcttcgcagttctttcggcagtggagcagttgaatgtttgttcgatgagctgatttgttgatccgcaactgggtcttgtatgatctcgacatcggatgagtttccttcgctgtcggaagaaagatcaatcacgattggtgttgtgctgttgggaaccgattctcgcttgcgtcttggtcgtaacgttgcagcgctggacaagagcttgttgacttggtgccttctcaatgttttaccctctcgatgttgtttggctttctgcatgtgtgtcggtttactgcctgtcgattccttgttggtgaccaccatcacgaaagagacgttggatggttggctgagttcgattcgaccctttccgctgataatattgccaatttttgattgacaaattgtgaagccgcttggcaattgttcaattggttgaatctttagctcgtgccaaacatccattcaaagcaagatgtctggttgccgtggcgcatttggcaggttaagcttcttctgctgaagctcgtcgtgatccaccgcattcagttgtagtaccggcatttcgttcaacaggaacttcaacgcgttcaggttgaagatgaatctgtcgttgtcaggacaaagaatgccgattgcgacgcggtcgcttaagtatctctttggctctctttcgccaaagcttgtgaggaaacattcttccgttccaaggttggtcagctccaactgcttggctgcactgcttgagatgaacgatcggtggcttcccgggtcaatgaacactgttgccatcatgctgaggcctggttgtgccggattgaaaatcgtggcccttgctgtcattagcaatgctctggtgtccctgctttggacggcattgcacatctgctgttgttcgatcgctgttgatcgcctgccgttttggtcatttggcttcttttcactgtacgagttgcttggcatattgatgtcattctcagacctgcactgatctctgcagagtgctgtgggatgccgacgtttgcaatggtagcacttggacggtcgagcgcagttcgatgcttgatggtttgccttcaggcatttgaagcacaacttcttttctctgacgatgctgatccgttcgttgagtgtgctcacttttttgcactcgtcgtgccaatgattgccgttgcagaacgtgcaaggatagggcggaatcctgttgatgctttgtgcttggtctcgcgcttgtggatgccgactgtttgctagttgcatgtcctgttgcttcttataggcttgctgccttagactctcatccagtgttgaggcgatgaatgactcatgccgttgtgtgcttggttgattaggccttcgtgacctttggtttgctgttatgggcgattggacgtgtgctgctgaaacgacttctgcctttgattgaacgtagtgatgtccatattcgcccatcacttcttggatttggacttctttgcggactgcttcgttaagcacgtcccggaattttgttgttgtccaatttgccggatcctctccctttttgttgaggatgttgcgtaggaatgctggagtcagctttttctccaacatgaggaacacctgcggtccctcgatgtcctctccggcattgttcagctctcttgtcagtcgttcgagctgaagcaggaattcttttgtgtctcgaagacttcggcacggcttgagattggccagctcaaagtgtagcgctctgatgtgctcttcgggtgcgccgtaagtgtccttcagcaactgaaggaccgtctcgtagttttggtcctccaggcggaacccagcgatgagttcccgtgcttctccgcccagaagattgcggagcaagttcagcttctgtgctttgctgattgattggctgccgatggccgatttgaaggactcgtagaattcgggccattttcgcttttggccgaagaatttgtcaagctggattggctggaattggtagagcggtgccgtgaatgtcggtgctgccattggtggcattgctgtttgtggtggcggatttgcctgctgatccgcctttgcttctctttctgttctgcctcggtaaagtttggcatcggcactgagcgttgcttcgagatcccgcagatcccggagtttggttgtagctgcgtcatggcgttcggcaattttctcatgcgtgtcgaatttgacgtattctttctcgcctttgtctttttctgctccttctaggcggtttagcaggtcaatccaattgttggagaggtcgcgtagattgtccagttgtgcttcgattgtttggacttctctgttcacgcgagtgcattgagtctccaatttgactgcgttttcccagtttgagaggtcggcgtctggatgtagtgaaagtgccgtggtcgttctggcactatccagcgccttgagtgtgaatgtgatgcccttctggattaggctgaccattgtgggttgtttgccgtgggctttgcgctcttcagttgttctgctgctgctgttcagtttgcgttttgctgcgcttgttggttactgctttttgttcgagcagtttgtcgttgtcggccgtttgacttgtctgcgccgtcgaagtattgccgccacggagagcaagcagtactttgtcactggggacacggaggtcgcccagtaactgaacaactaccggcacgaagaccagacagttattcctagacctacgcttacaacccccaaagtcaaattacagttggcacggagaccgaactgtaattagtcgagtcactgttggcacggagaccgaacagtgcccaacaaagcccaaattttgcttccctccttcccttcctatgtgtttaagttcggccacgaagagcacgaacttatccactttccgaatgctttccctctcccctttgtcaccggttgctgttgctgttgttggcggacgaagaatccacccaggagcgccacttgtggaaacctccacaaaatttgcacaaggtagtgccacggggaccggttggggcagatgggctcggtcggtgggtcgggggcaattggtcgaacacacaattcacacaacaaaataatgctttattgttccctctcaaacttgggtaattaaaccgatatttaaatgtgaacaatataaaaaataaaaatgaaatgcgccatcaccggggggacaaatgatcacaatcacagaaagaggggccgtcggggggataatcacagaaatgcgggattcaccgggacaatccaagggggacaaatgttgggccaggagaagtgcaaaaaggtggaaagagagaaagggaccaggaaaagaaatggtcaaaagtggtccgaggatgggcaaagggagaaagagagagagagtgtgtgagagcgggcaaagggataggcattgattgcctgtaaaagcgaaatgaatgtgaattgggaatgatttgggagtgatttgatggccatttaaatatggaatagggaaagagataaaaatggggccaaaaagtgaaattgttaaatttacaattaaaatgggccgatcactacaaattgggggagcaaagtactttggagggggcaaaattggcgaacaaacgattttttttattgggggggaaatgggcggacaatttcgcacagttgcgattgcgggagaaaaaagtggggaaatttgcggcggagggaaatttggggaggaacaggatgtggaacgggcggggaagggattaaaaacaaacaaacacgggagggaaatcgatcagtcataccatccccttatcacccccttttacatcattttaatgctaaaattaaattttgattttacgaaaatttcgacacgagcataaaaataaataacaaattaacaaaaaaagtaatcagattcaaaaaaaacttatcttcaaatatatggcattaaattaatcatataaaaataaaaaatttcaaaatttattataaacttattaaataaaaatactaaaagtaaaaaaagtgctaaaataactatttttaaatttcgtaaaacaattaatattcgaaaattaattaaaattttctagcaaggtgacgagtccacaaagaaaatagagattaaagggaaggaagaaacgagtgagctatatatgctttagcattaaaatttatattaaaaaataatcaaaatatttgcataaataaaaaataaatatcgaaaaggcaaaataaaaaacacaagaaaaaattaatcaataaattaattattatggacagaatcaataataaatatttgaatagatacaatataatttattttagagaatttaaaaataaagcaatattaatttgttaaagcaatttaagcgacgagacatgactgacgaaagtacaaagactaaaatcataaaaagtgcaaaacaaacaatttggcaaaatatcggaatatttgtcaagtgtaaagcctgcgtataaaaaatgcaacttataaattaaaaaaataattcaattaataattcatatgggatttttatgtttttacatattttttctgcggcatagttatgacgagagaagcccaacaataacattttctccgaacaattttcgatttagagcgaattataaaaacataaaaacacatattttggcattttggcacataaaaacatatggcacatatttcggggttttggcacatattttggcattttgagaaaaattttcaataaaaatacaagaaaattgaaaaatacacccctaaaaatcaactttttcacaattcttatagaattttcaaatttttaaaattttttaagaatgtagaaagtaacaaaatcgaattcattaattc

SEQ ID NO: 7510 - DNA, 3007 bp, Heterodera glycines
  unsure (1)..(3007): unsure at all n locations
aaaaacgtgccgcgaaaaaagcggtgtgaaagcaaaaaaggttattgatttacattaatttacatggccggagaccccttcgcaaaattggaaaattggccgctgatcccttgttttgcaataatctgaattntgaggtctatatctgaattttagtgttctttatcctgaatttgaaaaaaaaacttggtcaccctcaatatacatatacttctctgaacaattctaatgctaaaaaacaggcactcgcgcgaaaactgaataaaaattttgtatttgaaaaattgtgtccaaaatttttacgttggaaaattaccggtttttaccggtaccggtaccggtaccggtggaaaaagttggtaccggtaccggtaccggtttttgcattaccggtcagtaccggtaccggtttttttacaattaccgattaccgctcaactctatttaaaacacatattttgacagtttttgtccatattttggtccatatttggccatttttgagctttttagtccatatttcgggcttttttagtccatattttatgtccatatttgacgttttttagtctatataatttacaaccctaatcattaataaaattaatgtttattgacgaatcttaaaagaataaagcggagtacaattttaattatatgtatgggcaattaaaaatgattacgggaaatgaaaaggataatgacagcaaatttatgcgcgaaatgacaacaaaaaaatatggcagtttttgaatagacaaaaggtcaacaatatttcggcacagcgaaaattttttgacgaatttttttttgttgcaaaaaatactgatttgaatttatctgggatgtagcaacaacacatatacttaaattttgagtttgaatgtgtcgaccaactgtcaacacctttcgccgtttggaacaccgacaatggaaatgagactgtcagatattatgaggaattgaagaaaatgtcatgtgaacattaatgaggaaaatttatttcaagatgcattttacgttcaattatatgttaataaaaaaaaagtttgtcaatatttttgaagtttttccaaaaaatttgattctttttaaatttggcttcatgaaaaaatattcatgctacatataagaaattgtgagcatcgttgttgggaatgtatgccgacataatagctcggaaccattgccagaattcaggcattggtatcacggattttctcttggaatcagctcaatttttagattattttttgtgggccctttttcggtgtttgtcctttgtccctggactctttgtcggtgtgggccctttgtcggatttggccctttgctttgtccgtgggtcctttttttgtggatcctttgtcactgcaccattttaaaagtcactggttgagaacaaaaaaatattccatcctctttttcatttttataacattatcccgagactcgaaccgagacccaaaaaacagagacttttaaaaaaattaatttattcgattaaaaatcgtttaaaaattttgtttgattcttttcttaaacaattcttcattttttgatttgactcattaggaaccttacaatccaaaacaagactttaatcgagtcaagactcaagatcgatactctcgaacatccatagttttaacaaatgaatgttaattctagagaccggaaatttcaaatttgtggatcccgctgcgggattggaatccaaaattttttgcgggacgggatcccgcgggattaatcccgcaaatcccgcatttaaaatttgcgggatcccgcacaaggactcatttgaaaatttaaccattttcacacctaaagtaaacaaaaaatgaggctaaagcatatgctaattctaacaaaaattttttttattattatcaaaaaaacattggaacaaacagcgccgcatacactaaaattataaaaatatttttcaattattattttttaaatatgccattatgtggtgttgttcctaacaaaacctaagcggcgtttctgaaaataaataaatattgaatattttaatttttttcaacttttttgtacgaatatctgacatgaattcttcaaaactaatgccatatataattaaaaaaactgaataatattaaaattaaaaaacttacaaattagtgtccatttgtcaagttagtaatgcaaagaagaatggaatattgatcattcataacgtttttaaaggaccatcaataactttaattgcaatgtaaaaaattaaagtcaatataatgtttaattaattttattcggcgatcaatatttcatcaaaaatgttgattatcctattaaacaattaagttcatgcttttatttgttcgaaaaatctgtcatctttagcgttttgggagtccatgccggttttggcgtcctacggaattttgcttaatttttgatttgctatttaacaaaacccccacaatattggctattttaggtgtaactattgttaaaaaatttatacaaaattttaaaaatttcccgggtttcgaacttgtatccgagcttttgaattttatctattaaaatcctcattaatttattagtcatagtgctttttttgattatttttgtgggctctttgtcggtgctagtcctttgtctttgtgatatgatttaatttatttttaatttctatcaaaagttctaaaagtcaaaaatttcaagaaagccacaaggactgatttgaaaatttagccatattcacacctaaaaaggaacaaaatgagtctaaagcatatgctaacacctaacaaataatgccattaacctgtcgccaagctttttttgctcatcactcaatttttgttgtacaaatttttgctgcttcatctttgaggggccagcaaccaaaaagtgtatttcttcgccgtcgacttaaaattaaaaatgattttttgaattcatagcataattttttttttgcattaatataataaatattgaatatttcatcatttgtttctattcaatc

SEQ ID NO: 7511 - DNA, 4032 bp, Heterodera glycines
tcggtcgttcttcgctcaaatccgttgcaacacgtcatcagcaaaatgagcagcttggtattgcctttgcacggtctttcaaactcagtccaaaattttaaatttaacttagaaatcgaatcccattggagttgcaattgcattaaagcacaaaaaaaccagcataaaaagagcacaaatccaaattatgccaccatgcttaatcgaattattttaacttgagagaatatctttaagaaaatgcggagaaatttgacagggcttatttatacagaattttagaccccaaagaaagcgtcaaattatttatggaaaatttttttatttaatttaaattattctttctatacatcttttattttttgcaatgtttaatttcttttattcactttttatttttcctctccttgtcacacttttcttcgatagaattaatttttgctcttagttttttctcagtttctcttttatttttacatttttataattcccatttattttatggtgtttaatgattcttattcaccaaaattctggtaatgtccgtttatttcagggttttttatgttcttttttctaagaaatgttttatgacttagatttattcataattcgaatatataaaaattaaaatttttgggtttggaattcctaagaaaattaggattaaattttgcaaggcaatttcttcaaatagtcaaaatattctccaaattggtcccgattggcggcattgaatatcgcaaacactgttggcacgccaccaacgcagtcgtactgtaataaatagggaaaatatgaaagaagaattaataattgacaaaatttaatttaaattaaaaaaagcatcatgaaaaacgatttggcataattagttaatctatttgaaaatattatttaataagttttgcttttcgttccatccacataaagtgcttatgctggttagacattgtcacattggccaactcggccaaaatgcccgagtacagtacatcctccaggaaaaagccgttagttttcgggctgtgtgccaagacagctttgacagtgtcggtgttggtcaaataaatgttgccaagcgcaaatatggggaacaattcaccagggaaatcttccctcgagatgtacctgcaaataaatttggggctgaagaagccactcgacacttggccatttcgtcccgggcactggacgatttggccacggacaattggcaacagacaattggtcagtgcacaatttggtattttaaaaaattctacaatgttcaagtcaatgaaaaaatgaataaaaaagtgaattaactaccatttgatttccctgtcccgaaatggctttcgactggcgtccatatccccaaaaataatcagcggatggtcatcggcaatttggcgaaattttttgtttatccaatagtccatccggcgcagatggaccaccgtgtcgtcgtccaccttcgccacccattcggcaccggcacagtgccgttgttgccatgtcagagcaccgaaccactgcaaatataggcttatgtaaatccgacatattaaatttgtcaaagaattgccaaaataaatgcttttttttctccgtttttatcatttgaaagaaaattaattattaattaattaattgtcatttgctgatcactttgagatgtaaatgcttgtacttatccacaaagccgtgcaaaaacacaatgtcaccatgctttttctgctcctcttctaatttttgtttcacatctgccgcttctcctgccgatgggtcggcaacgaaaaaacggagaatttctccgggtgcctaattaaatccaaaattatatttatccaatcaataaaaaacaattaatgtccattttgttcaaattttaaaattcaaatgagtgcagccagtcctattatgatcaaatttagtttttaattgaatatttcaattatttttttctcactattaatttattcgacatttctcattaattgaattccttaaaattcaaaattgattaacccaattaaataatttacacaacgtgtttcatcaatacaatgatgaaaccaacttaattagtgctttaaattgtttcccccgttatttcgccaataaattattaaattaataataataaattcaattaaattgttccctaccgcttctttcatccatgtctctctcgcgcccgttcgcctctcaaatgaggttctgcccgacattgccaacatgatcagcttggtgccagccgcacattcgttgccaatttccatcgaacagttcatgcgaatgtttttgaagcgaattgcaaattcctaaaaatacgcaacagtatttctagaaaagactgtaaatggttcaactaaataataatttagaggtaataaatcagaaaagtgattatttataagctaaaatcgtaaaaatagcatttttggacaaaagttattaataaattttattattttttcgtttttatacaaaaaagtaaccacctcaattgaaacaaatgcagttttgttggcaatctgcttcagaagcgggtcagccagaagctgcattttgtttgtcactcgcaaaaaaagtaaaacaaaaagcagaattaatggtgccgcaattttaatttttttcattttttcaagaatagcttttattttttcaaaaattatccgcaaatgtcccaatacgctaaaaagtgcgatttaagtaatccattttaattcgatcaaagttcaaatctattctccggcctccgtcacaatttaataaacataattaaactggtaataagaaaatgcatgctttaatcttctaaactactaaaactgaattcattttattaaataaaaattttatattttgtaaataaaatgtacatttcagcagagaaaaattgctatgagttttgtttttagggtcaaaaataagaacattttgcgaaattgctttaaatcagttatttttaaaattatccgatcaaaaatgttatttaattattatatttttcgtctcccattatcgcttttaacaattttggggaggagataaacaaaccataaatatcagacattctggatccattaaatcagatttttaacattttttgcggcacagttttccaaaaaactcgggtgaatgtgcgtggaaaatttttaaaatttttaatggattttgttagaaattagccaaattcagaaatttcctcttttagatgaaaataagacactacccccaaatcataacatttcttagaaaaaagaacataaagaaaccctgaaaaaaacggatattaccagaattttagtgaataagaatcattaaacatcataaaataaaggggaattataaaaatgtaaaaataaaagagaaactgagaaaaaactaagagcaaaaattaattctaaggaagaaaagtgtgacaaggagaggaaaaataaaaagtgaataaaagaaattaaacattgcaaaaaataaaagatgtatagaaagaataatttaaattaaaaaaaaataaaattctcgataaatatatttgacgctttcattgggtctaaaattcttcaaattttaccgcattttttagagatattctctcaagtgagaataattcgattaagcattgtggtcataatttggatttgggcttttttatgctggttttattgcttgttaatcttagaataggaatgtacctcgtctcttccccacttccttaatatgaaaattctactgctgtcccgatcggctttggacgggacgaaactatgctgatcattttgcactcggttgatcagcttaaattcggctttacgcagacatgttcaacctgttcttcaatttcggctaaattcaaaaaaaccagaacattttagcctggtgaccggtaggcgaagccagggaaattttaatttttatacgattttcacagtttctcacttcaaaagctaaaattaacaaagaggggaaatatgtaattgcatttggtgaattccctccgggggagatgacgaacagaagacatttatgaaaataattaag

SEQ ID NO: 7512 - DNA, 1442 bp, Heterodera glycines
gccctattgatcagaaattccatttttatcagcattaaaaattatgcttaacagaggcagagaataaaatgaatatttattaaaacaattaaataattgtaaaatggtaatttaacaatagctcagcgaattggattaagtaggttcttgataattttaataataatttaatctaaagtcatctttccgttgaacaattgtatcggtacccattcagccaaaaagttttctcgattatgtggaaaacctaagtaaattagatgagtgcaaaaccgaaattcaattttcaaaaaaaaacaagccttacctttgccgaattttgaattgtaaaaaatggtggcattatccggcatcagataagcgacccaccaaccccatgttgaagtatttgctgttatcagcaacgaatcgcatgttatgatggaaaatgccaagtcattaattcgcggcattgcttttggcaaataaacgttgacaattaactataaaatttaaatttatcatattaataaacctacttttcgagttattagggcctattttctaggtttttaattttaaaccgaaaagcctaaaaaattttgaaaaaccatttttttttttgcctattttggcaatatgccaaaacttatttaaaaaaatgcaatgaaaaagaaaaacacattcttaagaagcgaccaaaggaccaaaattattatttattaaatttaaagctttttagaacctattccatttttaaagcttattttatgaattttttagagcctaaaaatataagccctatctatatattattacctgttgattgatttttaaatccttcaaaaattgtttgtcttctcccaacaagacgacagaaatgtttttaaaggatcccttaattttgaataaaaatattgaaaacgtaaattgatttaattaccattaaatatttaactccgaattcgatgccctgctcagtgaagtctttattggaagcccaagcaaaattaacaaaatcacctctacgagtatacacacaatatttatgtgattgatcatcactaaaattttttaattaaattcatattaaaattgatttaaaatacaaacccaaataattcttttttgtatttgtcaacagttctacagagtttttgttcaatccgaaaaatttgacggatttccgttcgtcgagtttcaaaatatttaaacgattggaatgcagttcccttcaaatctaataataaatttaaaaattattttaaaaaatgttacatcgatctttaagtatttttctttgatccttgaaatggcataccttaaaacaaaattcaccttttttttaatgtattcatgaaactgccaacttttgtgggttgtcataagaaaaaggcggagaaaatgccctcaagtaaaaggtttcgttttgcttttcagtcgaattctaaatgcattaaatt

SEQ ID NO: 7513 - DNA, 3101 bp, Heterodera glycines
  unsure (1)..(3101): unsure at all n locations
cctaaactttatttattatgaaaaaagtatggacacaaaattttttttatattttggtcactttttcgtgtaacaaataaacttttctnaagtttgctngtagataaaaagctaanggtctatgaaaggtaccaagaatgttaattcggtcgatttgacagaagttatgacgatttttttgttttttaaagcagtgcgagttggttttttgccaattcttacccttccaatcagatccagaaattgtcaaacaaaagataggatttctgcaataggtacggtatcaaaaaacgtatttgcacagatgccgccatatggtccggctcacaaccaacagcaacaaatgatgccaccgtcggcgctggtcggcgttccaccgggcgcagctgcaacgaacacttggatggattggaattcgtcagcggcgatgccaccacgcggcacttacccgatggcgccgacgaacgccatgaaggcgggcacacagacgggcacgtacattccgccgcagagtggcggaatgatgccaccgcctgctgggcaggtgccgtactacgccgttgggatgcccacgtcgaccactgctgtgcacggtcaaccgatggaaccggctgcataccatcagcaacaacagcagcaacattaccaagccgttcagcagcagtacacaaattaccaccagcagcagcagccgaacatgatatacaactcacagcaacagcaacaaatgctcttccatcagcagcaacaacaacagctcaatcaacaaatgatgatgcagcagaggcagcaacagcagcatcgccaaatggtcgcgacggcaacggcaccaccggcggcagggacagcacagcagaaagcagaacttggcggagtccaggcaggacaaccggcggtgcaactgggaagctacgcgtcgtcagcagctggtggtggtggtggtggcatggcgccggcggcgggcggtccgtcggcagtgaattctgctgcacagcagcaacaccaatggcctggcagtgtgacgcctgttgaggacctttacgtacgttttcatcggcgggttggttttggaaagagcaaaaatgcttgggattttgttttaccattttttatgtccccatttctacgcattaacctaaccatcgccatgtatgatataattgactaaataacacatgtctaagtagttgtacaaaaatttaacgcatttaagagcacgttgggcgatttgctgcccgtgccaagtgaacagagggactctgctggccattttggtggtgccgtcacctcaaccgccatggcaccacaacagcagaacatggcgatgggcagtggaggcgacgtcggcaaagtgacggtgaactttttggacctgccggagatttgatagtggacccattttttatatacaccaatcgcaaaaaaaacatttacattcgcattactccaactttctccaggacaacaccattgagaagttctattctggccaaatttgatttggcagcgacttttaagaagaaaagaagcatcggttcgctcatctttacacactttctattccttaactttaccacacaaacacagatattatttttttcttgcgcattttttcttttatttgcttaagtattttcttgtaaaattagatatattcactgctacaaaatatgtatgtgtaaaatgaaaagtataaatggttttttgggtacgatctgttgctgaatttatggttaggaaattttggtcggattggactcgaagttagcctaaatgttggttaatttgtttgagccgcgcttcgtaaaaccgcagaactcttttcacgatctcacccaattcttccaaatggagaactcactccgaaccagcggttttttaagtgtccaatttcaaaaaatgttaatttatgcgcctccgggttatgtaaaagattatttgtttgtgtactctttttgcttgccgcctttgaactcacaaatatttttttctgattattttaaaacaaatttgttgaaaccacccggcgaataacaacatttctttatccattctgaccaacaaaaaaggggtaacaatgggttttttatctttgtgtgctcattcatcggcaatggccaccttctcggacacataaatgccgtccaggaatttccgaatgtccttgtttttcacagtcgtcgactgttggatgcgagcagctgaatttttgcctaattgcaatgcgaaacttcatggcaagagtccgatttgtaagtagcagttttcccgaaagggcattattccatgaaagccaaccccggtttttgactgccgaatagttaaaaaccaatctcagcactagagcccggtaaaaaaaattttttagaaaaaaatattgacttttctaaaatattgatttgcttattttttaagagaatagatggggatagagagagatagggagggcagagagagagagcgaagaataaagggaacgataaaaaaacctcggccgcgcattcaaattgccgcggccgcgaccgcgcaaaaaaaaaccgcggccgcgcatcgcgcattcaaattgccgcggccgcgaccgcgcaaaaaaaaaaccgcggccgcgcaccgcgcatcgcgcaaaaaaaaaaccgcggccgcgcaccgcgcattcaaattgccgcggccgcggaccgcgcatttaaaaacaaaattttcaaaaatttcaatttaactataaaattttcccaagtgaaaatttttttgaaaaaaaatttgaaaatttgactgcaatttgttacgaaaattgcctatattaaaatatgtatccgttaaatttttttattttcgtttggggagccattcgaagaatttttccattatatagaaatttttttttaaattttcatgcgggggggggggaatcttgaattttctgagtcccaaaattttggatttttttgaatanattaacaatctattaaagtgtggaatttgaccnnnagagcaacactgaaggtcagaaggtttagccactagcccaaatatttagtaaaatggctttaatgaaataaataataatttttttttctcaaaatttctcattcctcaccaattccctt

SEQ ID NO: 7514 - DNA, 1124 bp, Heterodera glycines
acccccattcttaccagtgcttaaaaatgggcgcggcgccccgcgcccacacaaaaaaatcccgcggccgcgcaccgcgcattcaaatttgccgcggagcgaccgcgcatcgcgcaaaaaaaaaatgccgcgaatcgcggtcgcgctccagccctgatactgaagtttatccccccccccatttttcgaaaaaaattaaaatttttaaaaaagccgtgtaaaacacttttctatggggttttcagggtcgctgaatacgaatacgacatttatattgccccttacctaaccctagacccatccgaataagaaaatctcaaaattcggttaaaatatatgctgttttttgtttcagattttgttattcattgattgaacaaatgattcgaataaacttgaaagtctgcaaaaaaaagtcggaagaagcgttatttgtcagacaagctacgactgtttcccactcgacttttggcagaagtgaggcgatcagcgactgatgaagcctttcaaacgtatcggtctcgtgcatttgtacggtgagaggacaaaattaggtgaggcagatcacaaaacattcaagtcaaaataaaagtaacataaatcctatttttcaaaagtgtaccatttcaaatccaactgacaaagagcacgatttgggagtggagtttgtcgaatcaaacgcagttacaaattttgacaaccatcaaacaaccgccgactttgaacggggctgaagtttcaacgtggcctttgtcattccaaagaggacatcgtctcgtatgacaatcgcaatgtcaggcaagatctattgtctttttaatgtatgagtaaaattgaaaaaaaaaattataaagatctctgttacgttgacgctacccgatctgtttattgttttattgtcagtaaagaaaaagagtccacaaaagggaaaatccgcttacattgaggacaaaacattaattaaaaatgtcctcaagagatcaccgccaaaataaaatataatatgaaatcaataccaataaataaatagcgaccaaatcacttttagtttgaatggattaaaaattcgactttaatttttccggtctattttacaggaatgaaatagttttagttttattttt

SEQ ID NO: 7515 - DNA, 2040 bp, Heterodera glycines
  unsure (1)..(2040): unsure at all n locations
taaaaattcgactntaatttttnccggtctattttacaggaatgaaatagttttagttttatttttaaatgatnntaatgagttatttcaataaagcttnntatcgagttggttccaaattttagttactcgccctgcaacaggtataaattttttgcctagtttatatttcgaattaagtctataaaagggaatgttaaagcgttcagaaggtttgaatatttcaaagggattcagatctgttcggccataaattattttatgagccatgaacagatcagacagctttcgcctgctttcaagtgtcgcagttgaaggtattctaatctttgttggtatggaatgggtggaaggctgcatttgaaaagaactcttttggtgaaatatttttgacatttttcaatttttttaatattttttagaagagatggattccaaacctcaggagcatattccaataacggtctaacataagttttgtacaaaataatccaaatcctagaagattttgatttaataacccgaaataaagaacgcatacgtaaatatgcattctttattatttgtgcgacatgattggaaaattgcaatttattatcaatatttatgcctaaatccctaattgtatccacaacatttattatatttccatcaattttatatatttctttggggtttttgttccctaaatgaagtacaaaagtttttttaattgagattctgatttgccatttatttgcccattcggataaattatgcaatgctttatgcataatttctgtgtcagctctcgctttataacaaatatacaatttaacatcatcagcatataatttaattctcactcctgatggcaaagcatcaggaagatcgttaatatagatcaaaaataataaagggcccaggacagagccctgggggacgccagagcaaacttttttattcgaggataaagcctcctcaattttaacacgaaaagtcctattactcaaaaaatcctttatccaaattaaaagtttgccccttataccaattttttccaatttgtataaaagtaattcatggggcactgagtcaaatgctttttgaaagtcaatataaatacagtcaacattttttccatttataattgcctcataccaatcttccacaactgttattaattgactcgttgtagacctatttctaacaaaaccaaattggtattccgaaatttttttgttttttagtagaaaattgtaaaatgtctgcttaaaattctttccattaccctgcaaagtgagcaggttaatgaaattggcctatagttttcgggattatttttgtcaccctttttaaaaagcggaaaaacaattgattccttccagatgtctggaagtgaaccagtgtctaatgagatcctaaacaagtcagtaataacagttgacagagaagaatggcaaatttttaaaattttatagctaatattatctggagaagtgccatttttgttcggaagttttttcataagattttgggtctcgatgatgttaaaatttatatccgatataaagcattgatcattttctataatattacccaagtatgtattgcttgggtctgtttccttattattaaatgaattggcaaataagttggcaaatatttcacatttctcagcactgttatgatagcatttatcttcataaatcagattaggtatttcaaagggattgacattaaagttttgtatatatttataaatagaatttcttcccttttgaatagcctttttctcaatttggttatggtatttattttgtttgtatttttaattgaaaaagatatgctatccgaatagtgcttttttttagatgggggcaggttttaagcttgcctgaaaaaatttaagcttttcctttaatgggtgctaaataaaaggtttgggtattttaggagtcaaaatctttctttggtaaacgcctttattggaatacacctccatttaaaatttcttaacaacacattggtaaggggggaatatttttgatttatgctaaa

SEQ ID NO: 7516 - DNA, 2539 bp, Heterodera glycines
acttattattttaagtgaccgaaaatgattaaaccaataaatcctaggtccagtccaacctggaaattcagacccatgttttttcaaaatgttgctatctacttcccattaaaaaaagaaaaatgcaaaaacgaaaattaatttaatcaatgaatttcattattggctacatttcatcacacaacaatgccgaatcctccgatcagactgattgatcatgctttgccctccgtggccaccgccggcacggcgacggcggagtacgacttgacgaaggcgacgacgtcggcactgttgttcagattcagctccttcttcgtgttgtccgacattttggctgtcagctcttccgtccgcttcaccttctcgtccaaagtcgtctttttgtcttcaattatcaaagtcaactgaaaagggcaaaaaaataaaataaattgacatttaaaatcaaattactgacaattgctttttcaataaataatttcattgctttttcacctctgcgctggcctttttgctgtcctcagaaagtgttgccgttttcgttttcacttcgctttccaattccgcgtcgtttttcgcttttgcctccaaaattttgttgacagccgtcttaattggggtaattaataaataattaattgtttcgatgcttttgttttgtttgccttcagctgttcgttccctcctttttctgccacttctttcaatgctttttcctgctcttccggcgttttctctgccgttgcttcggccgcgtttttcaatgcttttgcctaatgagtgattattattttaagtaaacatttattataattaattgcttgactttttgtataattaattgacctgtttaacgcttaagtcatcgaccgctttgttcacattatcggcagcttcagttaagacggccggggcactgggctttgcttcttcctttttggcctcttccgttttcggctcctcctttttggcttcatctttcttagcttcttccgttttgccctctcctttctttgtttcttcctttttcggctcctccttcgtcgcttcttcctttttcgcttcggcttcttcctttttcggctcctcttttttgccttcgtccgctttggtttcggttgccgcagcttcttccggaattggctttgcttgtgtcagtgtgccaatggaaacggtgcaaatgaccagcagaaagatgcaaagcaattgggaattcattttctgacctaaaaatggaactgaaaattaactcaatgatttaaaaataattaaattaaacaattaattagaaaataattagtaaatgatgtgcaaaggaactgattctcgcacattttatatgttttaatggaccattgggcgggacgaaatttggggagggggggggggggggggctcggccaattaattgtcgaagttttggaggtcaatcggacggtcgggggacggacggaccagtttttgagcagttttcacgtcgcatcgcacggtttagcaaaaatatcattttttggcttaattagcgaatggaaacgaagtaaaaaaaaagggcacaaaatttgtgcagtaaagaaaatgaatttttgtaatgaatgacaaagaaagaaagaggcaatcatttaattgacactaattagaaaatggaaaaataattaattaattaattataaatttaattaatgaaaacagttaagaagaaaaagcaaattgggaaactgcagcagaatccgcccaattcaatgaatcattcaaacacagacaaacccttggaaaaatttagttcctccgaatttatgaaaatggcaaaaaaaaggaaaattaagaaattcaattcaaataaaacgaaatttgccaggtatgtactgtatgtgaaatgcaatggtaaagaaaaaccaggacttatgagaaaattgatgaaaaagccgcgattaaagcctcgagaaagtgaagaaaagggaaggattcttgagaaaaataaacaaaaacaaaattcatttaattaatttgaagaatcgtaatacaggctctccatttctatgaattaaatttttagccctgctggccagtcagcggactgaaaactctacgactttttcttttgttaaattcggactcaaaaataggcaattaccgtccgaaataaaacaaaataaaaaatcgaaaccgaaattcgtcatgaaaaactaaagtttgatgaagaaaatgaatgttttcgtgcttaaaaaagtaaaacgttgcaaaccgaaaaggaaaagacggatcagaaaggttccattgcttttgatccaaatgtttttttaaatttcgtttaaaaaccaatgttttcggggccgaattctctcagcgcattgtcagctgactggtcgaaaaactccaaaaaatataataaaaaaaggattggtaggaaccaaataaattgaaataattacaccggggacaaaactattttctcttacacatgttaaattagggttacacgggtccgggtatttgggctaggcaaaagccgcgtccgggtccaagttttcaaccggaa

SEQ ID NO: 7517 - DNA, 3320 bp, Heterodera glycines
  unsure (1)..(3320): unsure at all n locations
tttctcatcattgccttcgcgaaggattcaaaacgcaaagcgttaccaactgagccatgaaaaggcagaaggaaaaataataaaaagaaagtaaatgtntattcttaatgttcaagtcccagaattcctgcgaattcgcacggggacagtttttttcccatccaattttagcgaatttttatactctttttgataagccgattcaaatagagagtccagtccatttgatccaacaaatataaaactgaatgaaaagaaagaatccgtggaaaatgtcagatcggtcaaaatttattttgcaaaacaaactgatggaaaaaaagtgtggacattattcacaaatctcaggcaaggattttcgttaaatgtcatattttggtgggggtcgaaaaagtcgggccgcaaatttccgtaattggcccttaagaaatgggccgcaaaacaaggcgcaaatgttgggccgaaaaagacggactgtaaatgtcgtttttggctgagtgtcgtaaaagtcgggacaggaccacagcaactaaatggatattaatttatttctctgtttttccttcccttccaattcttaccagtgaattttgtacgataagacccggacctaccgggtcggataccgaacatttggattcactgaaattcggatccgggtaccgggtcagtgtcttggaaaagccgcgtgtgtctgtactcggtggggtacccggacccgagaaagtttaattgaaaattctttattttataaaattaatagaatattttttaataatctattttcggccttcattttttactcgtacccaatacaaaaagtgcgcacttgaccttcgctgtcgtcaccgatggaatctctcgcttctccccattttttttattgtaataaattaaatccgatttttaaaattaattaccccaccgatttgtttgacatttttactattttgattgtttattgctgttctgtgctctgctcctcctccgcccgttttgtgtgtgtgtgattagatcaaagtcagaaaatcataattttgcgcggcgcccaccgcgcaatgccacccaccgctacccatccctttgattacccatccctctccggttttggtttgattacccatccctcttctccccgttttggtaattctcctcgattccatccgactcacttctttgtcttcgtctttgtccgcgtcgttgtcgtcgtcgttgttgttggtctccactccttccttctcctccgttgctgctgctgctgtgacactacacttccttgacctggataggtttcggtgggccgcgcgtccaccattatgaatttgccgtggggtgtgcctcattaattaattgactctcttttcatggtcactcttcgtttcgccttcggcgatgccacaccgtcgggcgggggaggcaatgaatgatttgggagtggcacggacagtcaccggcggcgcacgtgtggcgcgaccagcagcagaccaccaaacgatgcgccgggcgttggtcgtcgtcccccgcggcgtgggcgaccggcggcagcaaaaggcaaatcgaaagggtggggcgacccgtcgccgcccggtgggcacgcctttcggcgcgttgccttgctataaaagcggggcattcattaagcgaagccacacacagtgcacaccaccaaaacagccaaaacaacaaccgtgggtggttcaacagcagcagaggaaacccaatgaaagcgaaaacaaaaacgctctctctctcattaggaccaattagcaaaatttaattagagagggaaaggattttctgattaagcattttcaatttctaaatcccgctttgaaattataattttgctttttgttccttcagaaaatgctctttttcccaattgccactgttttgctcggtgtcttcgttggctcccttcaggggaaacccaccggtacagcaaaaagcgatccaatcaaaactaattatctgcgaatttcagaacaaaatgccgaaattaagccggcagcacccctcggtaaaaaagaaaaataaataaatatttttacatttttcatttttaaatttcctacagaggcaactcgcaacgaaatcaaagacacgccgcaacgcacagagaacaaagaaatttcgcgcagcgaaatcaacgaaatcaaagagattccgcgcaacgaattcaaaacggcgccaatcactggtgacagttttgaatatttaaaaaattaaataaaaattaattgttttaagagagccgtgaaagaccgttcattaaaagcgaaatcatccgcgacatcagctccgcaatgaacttcttgaacgagcaaatccgggagtactcggaacgaaccaaggacagagtgagtggagaggccaaggggaagcgaaacggaactcaaaatggacaattagcaggaggaattcaagggcatcattgaggccagaaacaaactcgagacggccatcaaaccattgcacggaggtgagcaaacaaattagggggcagcactaattgggctacatttggacaaattttcagtgatggagtccgacatggcttcttcgagcctggagacgtcgatgaccaactcggccaacatcgcccgacaagccctggaggagttgcccgtgaaacaggcatggcatttttgaagtaattagcactaattaaccctatttaatttcacaggtccgacaaatggaacaaattgcggaggagggaaagagcaaaacggtggaggagcaggagagggcactgcgcgagtacgcggagaagaacagcgaaagtgtgaaggtcggcggagcaacccccattcaacacaacaactcttcctctaaacggtcccataaaatttcagaaggctgttgaccaagtgttcgtcgccaaggaccgggcggacatcgctttggagacgtacttgaggagccacgctgacaccttctcccaggaggcgcgaaaggccaacgaccaggcaaaaagccaaattcaaaaggaaaagcatagctaaaatgccaaaacatcatttgcagatgctgttcgtgatgaaggacaagaagctcaactcggaggacaaagtgcgcaaattggaggagtgggccaacactttgccggagaatgtgcgcggagagctgcgcgtgcgcgacttgcgcgagctgaagcagctggtgcacctgtacaacggactgacgcccgtcctgcaccagggcatccaaggcggcatctgaacggaggaagagaaagggaggaaagggggcgatcggactgatcggacggaccgaaagtgatcggtgatctgttgtcattgtgaacgaaaatgccg

SEQ ID NO: 7518 - DNA, 2362 bp, Heterodera glycines
  unsure (1)..(2362): unsure at all n locations
tgaaaaatgtgagtataatttccgcggatgatacnatattaatggaaatggtagtccgatctgatggcatcccatcccatttcaaagattgttttcctctttcccacctttggccataaaattcatcaatttgcgtgccaaacttgaaaaaatgccaccacttccttctgctgaagacaaaaatatttaatatttaaaaaaattataaaatgataatcaacttgcctttcggtggcatttgttgtggttgtccaaatgcgttttgcccaatgttcggttgttgttgttgttgttgttgtgccatcatttgctgatcattcaaattgaagccgttcgggccaaattggccttgaccatttggcggttgattaaacgcattttgttgcggcattgcttaaagcaaaataaataaattaaaaaattttaaaaatatacgcgcagaatttgcaccgccaccgcccgtgaatttatttttcaatccttcccaaaaattggtccaatcggcgccaacacttgcaaagaataaagttggcagaagaaaataaattgaaaaagatttaaaattcattttgatctattaattaataaaaaattaattttttgaataaaagttaattacatttggttacgaaataaaatggaaaattttaggattaaaactgacaaaaatgattaacacaatttaattattggcctaaatgaaagccgaaacgaataaatggaagcgcagttgtgtcaacaaatcgaaaaaattaaacaataatgactgacaaattgaaaaatttaaactggttaaacttaattaatttaaaaataaaaattatatttcttattgctagtcagatatgattttgtcggagagattaataattactacaaaaataacataaaaaagaaaaatgaaatatataaaaaaacgctttagtgaaacttttgaactcacttaagtcctccactcaaaagaaaaggtaattttaattgttgcaaagcacgaaaaaccaaaccaaggccaagctagtttaaaatgcacagcaattaacaaagttaaaaaacaaatgattcacaccaattaatttatatgcctttctcagtaaatcaattcattttttgcctctttcagaattacgaaaattatcaatatttaatcaaaactagaaaccgatacacttcccaatcgacttctcacaaattaatagaagcaattattgatattatcattttacaatttattttaggatatttccaaattttcaatgagatgattctttaaaaaatactaaaatagaattatcatttgccaaaaattatttattcatctgttttgtcatcattttctctattttcaattaatttgcaaattttttgattatttatttagcatttggttgcctaatatttaagcaaattggctacagtttatgatgacatttgtttccaaaatgttttcccatttctccacagtagtccttgtactcttttcatacggtagtgtcctcggtttcttcggtggcggtggcttagggatgggcggcggaggtaaaaaggcgaaaaagaatttggaaattaaattaaaaaaccattaaaacataaaacatttgcaattttaattagagcctggaaatttcaaatttgcggatcctgttgcaggattggaattcaaaaatttttgcaggaccggatccggccggatcctgcaaatcctgcattttaaatttgcaggatcccgcgcaggattgcggattcttagaaattttgaaaaaatttcaatgaaatttcaaaaaaaaatacctgacaagaaattttaggggctggcgggatgcattaaaagggcgactaagatttttcgaatgggccagacggtaaaaagagatcggaaatcaaatctgttaatggtcaataatttgactattttttgcttttcaaaaatgctttttttcggcgcaattgaccaaaaaatgaccaaatgtcacaccttttgactcaattctacaggattaatgtcgatccagtggtgccgataggcgccgccgggaaattttttttgcaaattctaggtgaaatttgagatgaaaattgaatttattttgattgattttattataaatttattcaaaaattttggcattctgttctttaaaatttcaaaaaatcaatgaaatcctgccggatcccgcacaaaaatcaaatttgcggatcctgttgcaggattggaattcaaaattttttgccggaccggatccggccggattaatcctgcaaatcctgcaatcctgcaaatcctgcattttccaaaaaaggcaggattgcggactgggatcctgcaaaatcctgcgcaaaagaccggtcctgctccggggctcta

SEQ ID NO: 7519 - DNA, 4379 bp, Heterodera glycines
tggccaatttgaaacccattaaaacaatgccaacaatcaccgcctccactcacttcccggcccggacgaacacgtcccgcttgtgcagtgcgtgtgccctccgtgccgggcaacgaatcggcagcagcacaccgtcgggcaggtaaacgtcgtggaacacgggacgaacgaccgtggagtggtcggaagggacggcattttttgtttctccgcctccgatcgcggtggtgttctgaagaatcagcagttcgccctccggtgaggtctcccaaattcggtgcaactgacgatgctgagcatcatcgatgttattgtaattgcattggtagttaagagcggtggttgagggaggcggaagggaagttgggtgaatttcggaattggacgaagaagggccgggctcactcgggtgcattgactggtgttataatacacaaacggcaaagaatacaaattgagttcaacttcacatgacataaaataatcaaagacaatttttcaatattgtttttggccaataaaaagcaattaattttaaatttggcacttttttcgtttaattgaccaaatggctttttttaaaaaaaatcaaaggcggcgtttctttgttttgtgcccagcgattcttttgcaattcaaaaggttcccttaatccactaaataagaaaagtgcctgaaatttgatgtattaattatgatatttatttagaaatattatgaaacgacacgaaaaaataacatacatagacacaacagatggtcaaataacattacaatattactttttggtcacaatttctcgtcccatttatttctctcatccgcgcttctcagtgccctcgcgataatccggcaatccaaattgcttcgggcaaaaattgtcaagcgaatcgagcaaggcggcaaaatttggacgcgaacggagttctttctcgggccaatcattcggcagaaactcacgctgaggcaccatcaccacctgaacaaggaaacaaatttgctgatgtaccgtattgtaacagttttaaactcgaaccgtgcatcccgcacccaacgcgctttccactccgttaattgagtcctcaaacaccagcacattcttcggcgaagtcggtttggcagcaaaacgtccaatggtcacttcgtatgcgtccggattcggtttgccaatgcgtacctctgaaacagttacaataaaacaaattgggtttgagcgttcattcgcctggatcactcccgcacagcacacgaagcggaatcttcttaagccattcgtcaaatttaagcattttgcttgcaaactcctcgttgtccgatcccgtacagatggccattggaatgttgtgggcgtacaaatggtcgatcaatttggtggcaccaggcaattcctaacaattgcatttacacttcattaaatgaaataaaaagaagcgaagcgtagcaaagcaaaaattttaaaaaagcgaaagcaaggcacaccaattgcacctccgtaagagcgcgcatgatttgaaggacgtgtttgtcgtactccgcaatgtattggtccatcgtaacgcgatccgctatccccgcatccttcagcaaaaccgtgaccgcctccgtctttttgcgtcccatcattttgagcttcctgtcgttgttttgctttattataacgtattaaacaaacaaaactcccacatttctcgagtgaattttgctccaaatttctccaacgtccgctcgttggccgttgtataatgacgttcagtgtcgatcagaacaccatcaaggtcgaagaccacgtgcgtaatagtagaagccatttattcggagcagaacttaatattcaaaggaaaaaaggcgctagttaaaggttgagctatttgaaattataatgatcagttttttaaatccttttgaatggcaaatttttaaattttcactaattatttacttttaaatagattcatttcattgtttcgattccctttgacgtattgtcctctttttcaaatttatttgttttgatcattttgattttttttggacaaatctgtttttctctccttccctcccatctcaccttctatctccctcccccctacgttttgtatgtttgtcatttccttttgccccaccatatacctatctcttcacattatcgtaaattgtggcggacgaccgtattcaaacgtctctttctttccatcgtttaaaaaaaatgtaaaagcatttagttgtatagtatgtatttgagcatatgagtggaatgaaagagagaggaaaaagggcatgggggagagcaagactttttttgttgatttttttatgaaattatcacagtactctccttttcgtcgacaaaatgcatacgatcgttttctgatttttgatttcgctcaaaatccaaattaaagttaaaattttggcgttctttctttaaaaaaataatattgtcgaacagacccaaattgagttgctttctgcaatagagaaagccctacattttgcaatttagttcaatattgcgagagttacaatttgactgccctattcaaaaataacaattttacttaaaatctgttaacaaatgtgactcgaatttgaaattccaggcgacgcctataaattaaataattctttgttttgtttcgttcttcagtttctatgtccaaacaaattcgaacttgttgggtgtggcgtaagaacaaccgttggtggcgttatttgccgcgacgtaacgactcccacaatatcatcgacatggacgagctgggcgaacaatgtgccaccttttccgacccaatgcccgccgatccgcccaaactttgggtggcgtggctttacaccgatttttacgggtcgggacgaaagatcaggtgaacggacacggaaaaattcatttaattatttagcttttgggttaatacttaagatggtgcgggttcccttttgaaaaaatccagttttgtgataaaacattcgttcccttttttgaaaaatatccagttttttttcgtgataagacattctaagttttcggggttgaataaccgaatccagcatctatttcgtatcgaaccctgattattcggataaaaaattgaattcaagtttttcgagtttcaatttaaatcatatttgactacacggaaacgaactgaaattcttcaaaaagataatttaaactttcaaaatagttgaattttcatgttttgttcgagtccgggtccggtgttcaatataggccgaaatagaacagatgtcgggttcggattatctgacccagaaaactcttattatgtttttatcactaaaaatcaaaaaagggatccccaccatctaaagttttaccattttttgttttagggaccaggtgacaaagcttttcggcaaagacgcgaaaccgggcgaaatgcaagtgttcaaaaacacactgtcgaccaacaaacagttatggaagataaagcatctgctcgaaatacggccggtaacatttccaaacggagagccggggcaggaagatgcgacacatttggaggtgaaaagcaaattggaaagcgaaattggcaaatgtcttttaagaaattttagcaacaaataatggcaactgtaaacaatgtaaatgtttagataatggcagatggacgctgtgtaatcagccggcaaagtttgcctaatgtcgacgactttcaactgattgactacagcaagcagttcaggttgaattacgacaactgattcgtacggcttttacgccaacccacaaatttagcccgcgttatttggcttctcgactgatgtcaaaggacgtgaccaagcaggacgtgtacgaggacaccgtctacaacccagaaaatatcagcattggatgaaagaagggcggcataattatgcaaaatttaagatgttctttttgatgtcatttgcacttcatttcggatttgtttaaaaattacactttgttgcaaataaacattttatatgcattagaccaaacaaatatctttcaaaatgtattaaactcaaaatattcaaacaatacaacaaaaaatggtgtttccgccgtatcactttccaatctgcacttttgtattcgttgccatgaccggtgctccttgtgcttccatatttagtaacttaaaaatttgttttaaatgacctaacattcgtcccacacttcgctcaacctgatgttcttgaaaacgcatggacaggcgttggccggccttaatgccataattcggtaatagtttagatggtcccccccccttttttggcagaaaattttttgttttaaacatccctgaaaacatgtttctaagggtttttggggttgctgatcacgaatatggcattcatttaggccaatttcgaaccccggacccgaattc

SEQ ID NO: 7520 - DNA, 2071 bp, Heterodera glycines
aaattcattttttgttcgaatctgtgcagaatgattgttttttggtgttgtaatgatccgtaattagtctttgctagttttaatctgttttagatcataaaagtgaattttgaaaaattcgactttttgttcgaattcgggtccggggtccgaaattggcttaaatgaatgcaatatttgtgattagcaacccaaaaccattagaaacacgttttcacgcttttaaaggaaaaaattttctgccaaaaggggggggggaccatctaaactattacccataattcattcgttatttcccttgggaaattcaccttcaaaaacttgtccatgcaattttttgagcaccgttcctccttctcgcttatgtctctgctggtgaaatcgcggatgcacgcgtcgaaacactgctcggtgactgcgttatattggaataaaaagtcgcggaactgaacggagtgatgtccaatttaaaaatgtgaaaaactaaacaaaccgttcgaaggtcagtgtctgttgcgccttgctgctgtgtcatcgtcaaaagtgcactttttatataattaataatttaagaaaaggtaaataataaggtgatttcgtttaaacattttgttggacaaatattgaaaaacaaaaacaatttatgcgagatcaatataacattcaacaaatggctgtccacaacaatttcttatttcttcagtttgtccggtctaaatttattcaatttgaaaaaacactaaaataaatagcatacttcgccaattgtcgggcgcatccggatcatcatgatcatcatcgtcatccgcgctacgcgctgaattgtgttaggcgatttagtttaaaaggcataaacttttaccttgccatggaataacctccggctcttcctcggcctccggctctgccggaggcagccgattagctgccatccgctcctggcggcccctccgcttctcctcttccttccgccggtgctcctccaaaccttccccctcttcgtcggtcgccaaattcgatctggcctcctaaagatattaggggtcaaattttaaggaaacaaatgcgaacaaaccagtattatcaaaacgataacagcagagacaaggagtacaactagaattgctgaaaatgatcaaatggaaattacactaggtcggtccctcccatgcctacccttcttccacttcggttcgaagacgttcaaaccatcagactttgaagaaaaaaagcgatgttgaacctatcaaaaaaggaatcatcaaaaatgaggcgcaaattttactcggccctttggctttaccaaatgatttgcaaaaccggctgaaaaattagaggggccaactccgcaaacagtcgaatgcaaaattgagttgagacgcccaacccccaatggcaaaaagcgatgattggtggtgttgcaaatgaagcgaaaatggtcggatgagcgaacggcggaagacggaaaagaaatggacggacggcgctggcgataacgacaatagtcgacggtcaactgaagaaagtgtaacccatcaaatgatcgaaggaaaaacatacactcaaagtgcgacgatggatcgccagtccacaccattgcaatttgtcatagcggcgaatgtgaaacattattcttagaaaaaaaagttgagggggaaatgtgaacgaaacacaaatacaaaatattcataaaagcaaaaactgtataatagtgaaactaaatgcaaaaaagcgtttattcagttcttctctcttagagggaaatagcaacaaataaatttgcaaaacaaaatatcaatcgaaattttcctgtccgtcattttgcgttttcgtccccccctctccgccggcgtatttcttctgttgattgtctcgcggctgttctctctgctggtcgctcgctgtggcggtgttggacaaaaaggccaaaattcccttcgtacaacgatttgcgtaatggcctttttcgccacatttataacaggtgatatccgcctaaattaaaggcagtgagacgaatgtttctacccaaagtggaaatttaaattaccacattccgtcgagattcatg

SEQ ID NO: 7521 - DNA, 6144 bp, Heterodera glycines
tgatgtgttaaattgaatattttgacctctctctgctctattttatttctataaattgtgttattttctcccttacctctgacctataattatgttttcctttctttttgttgttttctctaattatgttgttatttttaatcgatatttcctttgctaaatttccccgcatgtctccatcaattcattcttctttttcatggtacattttacttcggactgttctctctaaatatttggtgtgcatttaattattcgtcaatttcttcggattgaatttaaaataaacgtaattgaactgtccctgaccgaagtgcctgtcctaattaataaagcattggcccctttccccgcctgtgttaattaattaattggtctacagtccgttcgcttgtcttagcggagaactcgcgatcgccgtcaatcccaaaaagggatgatgaattatcaaatgaatgccaaatggcatcaaaataaacaaaaaccccgtaaaaagccattgccgtccaattgtgcgctgagaagaaaaaagtgtccgtttgtccgtctccgccggcctttcctttgtacgggtccacgagccgatattccaactcgaactgttgccgatcaccgccgtcgaaggcggggcgccatccgaccataagccaagtggtgccggactgaataagcctggcctgaagcggcgtttgaggacgaccgaaaaaggggaaaacaaataatggcatggattgatcaaaggcccttccgtttgtcaattttggcactttacttggtgcctgcaatcgaatgtccaccgccgccttcgccccgactccgttcctcgcctcacaagtgaacacgccaaagtgctgttcggagacctctctcagctccaaaaccgcctcaaactcgtctacggcatctaacggagagggaaaagtgaaggacagcccccctcccccctcccgcgtcactgacctttgacccgcgaaatgtgccgtttgtaatcgccccctccaaattccgtgccgatttctgttccgtctcggctccacgtaacttttggttcaggccgtgccgaaatccgacacacaatttgagccttaattcgaattaatttattgccatatgcaaattatgttcgaattttcctaccgatgcgccaatctctgccgctgtcagtgccaatccgtccacaaatcgttcattcaatgcaatcggctgatggatgacactgagcagcgattgactgctgacgggcggagaagtggccgaattgtgggccaagcacgagtaattgcccttgtcagcccaactgatcgaatgcgcaaatcggagaatggacagaatggaacggacgcaactctcatcggaaggacaactgaaaaagggaaaggcaacgactaatcaagtgagttaatgacactaattaagggaaaagagaaagggaagcggtaactaaaagggacaattaagaagaagacaatgactaaatgagggaacaaacaatgttaattaaaggaaataagcaatgaatgactaatgaattaattgggtataatagtgaatattaattactccggggatgcgtcccccatgcgttccgtcactgtccaatggacaaacaattcgatgggcaattgcactccgtcccgcagccaacgaatggacggccgaggaaagcctcgcgcttcacattcgatggtcacatcgttggccccattgttcagtattttgcttggcattggcattcgcgaaatccgcgcgggttcgacaaccttttcaatttaattttccgaccgttttgttttcgtttttccattaccgtaatccgaacggtcgcttcttcgccttggccgagttcgttgtgtgccacacatcggaagatgccgttgtgtgccaactgcgcgtccggcagtctcagctgcgctttgttccattcggtggctttccgttcgtacgcccctttcgttggcggccccgcccagcggaaatgcgccgacggactgcccgcgtcgccgtcagtgccgcagctgagcgtgatcgtctcgcccacgttaagcgttgtctgtttggcactgattgttgccgatccaggccgacgacggacatcgacgagcactcgggcggaaccggtacggatgacaacggccgaattgggggaagcgacggacgatgatggcgatttggacagagaagcggagacggaggacaaggcaagcgtattccatgcggtgcaggtgaaattgccggaatgtgcgctggaatgggatggaaaaacaaaatgagaaaataccaatcaaaaaaagaccaaccgattgaccgcttcgatcaccaaccgcgacccgttacgttggaagcccccaggtccgctccatgcgatagtgtccgcctttgggttggcgtccgcctcgcagtcgaccaccagccgatcgccctccgccgggctcaccaccgaaccgcccgatgcgcccccggcgactgttcgaatgcgtacggttggcccgtaaagaacattgagacggatgcgatcagaagccgagtctaacgaattgacggcagtgcaacggaattcgcccgcgtgtgcgcgtcgcacgtgtacgcgccactcgcggtcggcgtgcgtttcgcccgacggcaaatgcgtccaggcgaaatttgttgcgggtggattcgcatcagcggtgcactttagctcggccagctcgccctcctcgatgttcaattcgggcactgttgggacaaccttcacccgtggcgcgtacaaaacctgttcaacaaatgccgtactttctgttcgatccttttgtgttctgtcactcttttcttatttcgtctgtttctgtatttcgtttgtttcattgtcttctctcttcctggttacactattttgtttccctttcactctctcgctctcttctctcgccctttctcacgttaagtctgttcgtctccgcattgatcacttcgccctctcgcagtgctttgttccaagtttggcatgttaaataggcgccgttgtcgctgcgtgtcaaatgccattgtaacgtgcttatcgcgcgtggctttgttccgcttccaccgccaccttcgtgccgttcgtggaaccacgcgtccggcacccgcgtgcggttgtcgaaaagccattggaagcgcggcaaaggatttccgtcctgcgactcacagcgaacagtgacgaattcgccctcgcgcaccgcttccgtcggttgggcagtgatttggggcggcactaaagcagaaaaacattcgctgtttttaaatataaggcttttttgttattcgagctttggatcggatgaaaacccttcaacgaaaaaataattcttcgacaaacaatggcacttctttctgtgccattccctcccttctcatccaattcagtccgtcgcaattttttcctttttggcggcatattttgtggcaatttgatctgttcggcaaataatgacaattgtcggacaaaaatgggaatgagagagagagagagaaagggaaattagagatcgctaaaaatgcaatgaaatttaaaaattctaatgaaaaattacttataattccatgttcaaatgctttctcactttgattgtctctgcacaatttcctcccctaatacttaatttataattgtttaatgtttcctcgttcctctcacattttacaatttaccactttttcagattgttctttcaccattggcgaagtgccactaatccatctgtgccaaattaagggattaacgcattcaccggaggataaattcgccattttcactattggggggattttgatttggattatatacggaaaaaacaaattccaagtaaatccctctcattttttgtttctttttgggtattgaatttcaacattttcgtttatgtaaatttttcgttcctccgtaatttgcaaaaagaaatgcgatcttttgataatttattggatattatttttttgtctttgcgtttttccaattacaataagtctaaaagtggaaatgccatcgtcactaatctgataaaaatgccctccccccaaatccccccaaatcccatcatccatcattgttattgttcccttccacttttccccatttataatttacgtttttctccgattttatctacgccttgtttttttccaaattcattccttcgctctttcgttatgttttccctttgctcactgtccaatttcgtccccgggaggcaattatccgcaaaagaatcagtccatttgggtaactttgcccgggggaacctaaattttgattccaaggaaaatttttttgaaattccaatgttttattagctcgggatcacccccttttttgaagaaagtttttttaatgtcataaaaacatgcttccaagggttttcggtatccatttcgactaaattcgaaccacgaacccgtttcgaacaaaaatattttttaaattctcactttggttcctaaattgaccaaaataagccaaatttagtcaggaatcattgcaacaacagaactaaggtcaataagcacagttatgaatagggatgatatttatagtttcactatttttttcctgagctccccgtagcctgaaatgcagaaaacgacccccgcgcgaaaacgtcagcacgaaaacgacggcgcgaaaacggcggcgcgaaaacgaccccgaccgctttttttgtttttatgtcgaaacataatgccaaatatgcgtataatttgattttaaaaaatctgaatttccatgccctggctttattgatgtcggatgtcacttgatttttgcacacggcggcccaattttgggctccaagtacaattatgctggatttttcgtcttagtggtctgtgagttagtcaccaaaaagtgggtctccggttcaaatcttctttgtttgtgtataaatttcatttttaaagcaaataaataaaaaaaataataaaaacagaacgccaaaagaacaaatacaaacaataaaaggtaaacattttattttactcttgattttatgaatttttttagcttataactttttcaataatagaccaaataaaaccattttatgctcattttgaagggaaaattctgaagaatatttcttaattagtcaaaagttaaaaaaaattgtttattggcaaataaatgattcatgtgttattttatatgtcagagacatggaaatagtatgcccaaatgagagaaaaagaaaaaactttgtcctgggtcaaaaattttttcctagggtcagatttccttggaattttgcataggccaatattttgacctcctctagcgattccaagtttattttgtgaaagttaagtttttaactcgagatcggctcttctattttatcaatggaaaattccacaaaaattttaaattttgcaaagttttggcgttctgattactaaataaaaatccagaataattgtacttggagcccaaaattgggccgctgtgttgcataatacaaaatccaatccccagaagctaactcactttcattttaagataacatttactaattaaggattaacatgaagaaaaatgctaaactcattaaaaacaacaactccgttcgagttgctgtgaggtttgtacaaaagacatgtccataatttttttttaaattttaaaaattaggatcagaccgcaaagtggtaaagaaaaagaagagccaatttacctgagcgtaattcctggcgaaccacaacttacaattgggcgcgataaatcttttgcatacggttctaagcttaaaagttttatttgtaaaagttggctaatttttgagatttcgtcttcgaccaactgactccgcaaaagaccgtttacgacaaatgtgtgagggaactcgttgatggtgccttcgaaggatacaatacctcagtttttgcgtatggacaggtttttgtttaatttgaacaaagttcaaaaatgtttgtcggccgttcacagactggcagcggtaaaacatttaccatgggcactagcttggagggagacccggctaaaagaggcatcataccaaatgcggcacaacaaatcttcgatgaaattgagggaaggcgtgaacaggcccgcagatctggcaaagtgatcccctctttggaggtttccgctcagtttattgaggttcgttg

SEQ ID NO: 7522 - DNA, 1878 bp, Heterodera glycines
  unsure (1)..(1878): unsure at all n locations
tctagagtcatttnntggcacaacttagaggcaaaaacaaaaaaacaaaacttattaagtgcccttaattgcgcctccgattcgtccgcccaatgcgcgaagattcggtccaagttcagcaacgccatggatttatctgcaaatggcagaccgtaatttttcaactaaaaaaaccagcataagggaattatatttggaatgtaaaaaaattttatcctgaaaaaaaggttttttttataggcatttttggtattttactttttgcgagttttcgccggaattaaaataataaagatatttttgtacggttgtgacgattagcgccgctgggaaattttgaatttttacgatctaatagatttgtattaatgaattgttgagaaaatttaaaatgagaaaaaaaacgaggatttcgaggtcaaaaaattgaacgaaacattccgaacaaaaaatttcaggtaaatcacacaatatcataagtttagactttcattattaaaatgcttaaatttgcaggcagttttcgacggacaacagttgcgcaactgcaagcaaatcaacaacacgaagatggacaacaaattgcagctgtttctgccaatagccacctgatgctggcgcccgaatttgccgcagtgaaatcggcactaattgtccaaaaggcattccatcgatttgcactaattgtccaaggcaaaccgacgaagtgatttataattaaccaattattgttaaggtttcattgccggactgacttttggccatgcattgttcgcttttttcgtcgccgatttggttttggaccatttttaaatttagtaatttttgggttaaaatatttacaatcatttgtagcattttctgcaaagcaatgtgtggatgactgctcctgtccatggctttttccacttttgtcttgcgattggagttgtcgatgcgctggacaggtgacaaaattgttaataatattttatttttaaaaattgtttaattttattaaaaattcaaataataagcaaattaatttcaaaaattgtaattctctttttgccaccactttaaatctttttattattaatttttttttaatccaatttcatattgttttaggtttaagtttgtgacagttttccaaattttttgctctcttccgtccgttggcattttggcctgcttttttgcttttttggcatccatttcgtctgcacaaattgagcaactgttggcccaacaaacagagaacgaagacccaattctttggtacaataaccaaattaatatatttttttacattttataattaattttcacccctaaagggatgttcaaattttgttcaccgtttggcaactgttaagcgccgtccgttccgtcagcgctctgttcggatggcttacaatggcatttcgcccaacggcaaatgccacgcgcgaaactctctccaaaatgctgccgtcaaattcaatgaaataaatcaaacgttttccgaagtcgttttaaattcatagaataaaatttatttttcatgtttttggacaacaaatatgttcaattgtgtaagcgggcataactcctccataaatactataagaaacatcaggaaaatcagaaagtatgaacaaaaaaaataatgcctttcccccgaaaatttccataaattttatttctcaaaaattcctgttttgaatcaatttttatatttgttaagcaggttcgtgtgccggtggtgttttgggcattccatatcaaattanaaaaaatatagaataaatcaccaaagacagtttgttactttccgacaaagctctcgcccagtcgaatatatttttatatttatttttttttcaaaatagacttcatgatttttcatttttaatt

SEQ ID NO: 7523 - DNA, 1863 bp, Heterodera glycines
taatcatgttcaaatgatcgcattaatcgaattttcgtaaaggtaaattttgttgaagatatattctgacgctataaaaaaggccaatttgtacaaaataaaaaaaatttattcgtatagtttaacgaaagcccaacgttttcttataaaaatgattgtttcaccaataagttaatccaattatagctcatttgagattataaattgcttatttggtatagggaaattgcgaaaactttccttaaaagaaacattatttatttacattctacaaagatttttttataatttttatttatttttaaataataatttatgttttatagtttaattgtttattttttcgaaaatttattcgtttgtttaaaagagattaaaaaataataatcttaaaacattatttcttataatggttaatttattactatttattataaaatttgaaataataaattttttttaggtatgaataaattatattttcccttattatttgttgccacaattttcatttatgccgtcgcattacctcgccttaatctgccgattaataagcacaaaaacaatactgaacatttaacaaaaacaggtattttgatctaaaaacataaaattttatgcttttttaaaattaatttagttcttattttttactttataaaatttatattttaatttggtaaatttaaaattatttattaaaatgttatatttataaactatttaaaaataatgtgttttataaataaattatatgatttttttttaatttaaatattcaaaaatggtaaaacatttcccatttagaatatcatcattctcagcatcaacaatcgtcaacacgttcatcatcaccaatcatcatcatcatcaaatttcccatttttggcacaaggcccaacgccagattatgtgcaggaagccagcgaaaaggcacgcattgaatactggaaaattttcactgatgacaaagggcaaatgccgaagggcgaattgaaagcgatacgattaaaatgggcggaatgccacggcatgagggtaagagaaataaaatgaaaaatttaattattaaacaaaatataatgtttaatgaaaatttggtggggggggggcgggtattaaaaaaactaataaattattgaaataatgacaataatttattttaaaatattttatttggtcggcttaaatttttttgcagaagcagaccgataatactttttttttgatagataggtaccaaataaaaaatttaagaatttgccgaaaatttttatttttagatcttgaagcataactttaaaaaaaactaaataaacatttcaaaattcaacaagaaattagaaacaataaataaatacatttcctgtaaaaattgtgttaaataatgtttcgaaaatttaggatgaatatgaaatgtatgaggaagagcatgagcagaaaacagatggcttttacaaattaatgacagcaaaccttggcggcgacgcgttaaaagcattcaaaaaaatttgggtgattttctttatttatatggttttacaatgtttttaatattagaaaatatttaaattaaattaaaaatttataaaaaataactaaaaggacatcactcacaacgatgaattatcgcgcaatgaggaatgcagaaaagcacaggttgattgatatatgtaacttttttgtcacgataaagtcaaggagaattccatggttgccgaaatggcgcgccgtcggaaaattttttttaaatattacaaaaatttttatgaaaatatttagggatgccaaaatggggaataccttttaaaaatagggctaatgaataatagcaaagaatttttcacttacgaaccaaagaaa

SEQ ID NO: 7524 - DNA, 1333 bp, Heterodera glycines
  unsure (1)..(1333): unsure at all n locations
tattttttgctttagcatttaataaattttttaatgaganataaatttaaaaataggaaataaatatttggaataaaagaacgaaatccaaaaattaatataaaataaacgctatgaaattgaaaataggagaaagagcgcttacggattggaaaaaaatagaaaggaattggtgcaaaaatattccaaagtaagcgaatttaaattgtggaaataatctaaaaataaaaattaagaaagatgaagcattttcaaagttgatgaaacaaacagtttagcaagaaaataattgcaaagaaattagatgaaacctatgatgatggaagaaagaaatttgttcgttaaatagttttcgaaaatgccaaaatatgtgcaaacaaatgcatttttatcatattgtgtttttgttcttttaaaaaatccttcaagattttcaaaaaaaaaaaaaattattttcatataaattaaaaatcagattattttttaaatttattaacttgtcgcctttcattccagacactcccgggtgcattccatgccttctcggcttgccaggcacatgtgaaatgcctttctcgacccttgaatacaattcgggcgtcgccattggcatcagccaactctggataacctttttcacccatatttaagtaaaataatatttaggtattacaaaattaaatataatttaaattgtgtttttgatcaatatttacttttttattccaatcaaattttgtcattttttcctttattcttattaacgatttatacacacattaaaatcaaaattttataaaccaattcgcaaatttcgtgtttaaaaaataatggttcatctgttcaaatgcaaataattaaaattgggattttggggggggggggggaggattttttggaaaatttcattgttaatgaatgatgaattaacagatgagcaaatttggtgactgtggccgacctaaataaaattgaattttttatattttcattatttcgtaattttgtgaataatttctcttttatttaacaaaaaataataattattattttagcaatggaaaatatttttttcaattttattttatttaccatttttatcgtttttatgaaagaaaattgttttgcatgcggtaccgatgagtgtccaattgactgcgaagacaaatgtaaaaattaatttttaataattaattaattaattataattttaatatattgtttttaaaaaattagacaaatgcaaagacagaagtgaattatgtaagcagatggagcaccaatgtgagaactttttcttccgaaaatgtatgagatgcgcatgcccanaaaa

SEQ ID NO: 7525 - DNA, 3528 bp, Heterodera glycines
tagcgttttttggcactaatttggaatgtgcgcctttttgtaaattttaattttaaatgaattagacttttttttaaaataagccacgtctacacatttgccaacccaaattttcgttttcattttggcacccaaaaaaaatagtcatgcggcaaaatcgattaccaatcaagtcatctatatatttgatttattgtaaaacattttttgcatttattacttgtataatttatttgcctattaaagaaaagtctataaattgtatattttatttatttcataattttcgatttgaaatcaaattaggcaaattactcaaaaacaatcaaaataacagtttttgtttatacttttgctaaaaaaatcaaccaaaatatttaattcttgatataatttgatagccctaaaagtaaatacaaaaaaagcatatattgagactcaaaaaaaaaaattgaatgtaatacgaaattaaaaattttattaagtgtaaaatgctgtaaaattgacaaaaatttaaacattcaatatttaaattcctatcatttggccaatcttctgtgttaaaatatcggattcccaacttcatggcgccattattagggattcttttttcggcacaaaaaatcgcaaaataggctttaaataggcacaaaaataggtaataaaatttttttataccgatttttatgtagcaaaacacatagaaacttaatttaaaaaaaacttaatcttggttatatttcaattgtaaatgaaattataaatattttaatcttttttgtttcaaaatgaacaatttttaaaccaaaaatctttataaagcaaaaaagagattttatgggaataattttcgtaaaaattttttttcagttcttagaggtgcattttttattgcatttttgttaaggatttttccgaaaattctgaatattaaatattattttcttaaatattaatattgaccaatttaaaattaacaatttgcaattgggaaaaaacataaaaaaaaagaaaaagcttgaaattcctagatttcagatagtttcataagtcattcaaatttacggaaatgtttttagaaataaataaataaataccttaattgaataacttaattaatccattgcataaacaatattgaataaatatgtattatgtatataattttatttgatttcgtcaatgaatcttaaatcatcaatattctttcaccaatagcaatgctaaattctttcatttcatatgaacacataatatatttaatttaattttatataatgaatattcaatattttatttaataaaaaataaaaatttatatattttgaataaaaatatacaattttcaggtatttcttttgcattttcaaaatattaatgagtctttcggagcttttcctaaaggaactgataatggttcagaaaatacatcgtgatctgatcagtggtccaaatccggtgaatttggcacaactttacaacaattttgtagcgacaaattgtgctccattgaccagaacgaatggcaccgaaattggacaaattggacatgaacaacagagacaatcgccaattggcacaaatttggccagctcttcacgacaaactcaaacttggccaaatggtctgcatcggcagcaattccgtactgatgaaaaacgaatgcccaactcatcacaagtaggggaacctgacgaaaaatcccatttggccaaaatgccgtgccaaattaaatttcataaaaaagattggcttagggtcagtcacaaagtagggcgtgtaattatatgaaaatccatattttttttcctaaattgtggaaggccggaaacgcatgaaaacatgtttttatcttggtttgaagcttctaggatagagttctatactaaaattttccatatttcgcgatttatgtccatatttgtatattttgacattatgtccatattttcgcattttttataaaaaattctcattcgaattcttcctttattaaagcggccctttgtcccttaaagccggaaaaattttcaaaaaaaaatttaggattttttgagaatattaataaaaaatatctacaaaattggagatttatgcaaaatagtctaaaatggaatatttacgatttttaattaataaatttaagctttattattatttgattctaaaatgatttttaacactatatatagccattttttaaagttttactttacatttagcgaatttgaagaaatattgagaaatttattgctcaatctagaaaaaaattatgtccatattttatgatatatccataaataccagccctactgataagaaagatttgaaaaatttacacaatttttgaagaaaaaaagattttttgttcttttctctaacattaaatttcaatatttttgtgttttccattattaattttttttaatcatttacaaaaatatgttgtcaacaaatttggttgaataaaaatgttaaatgtttttcaggcttctcatgtgactgcttccggtgttttggcgccaataaattcattaagccatcatcataaaaatccaagtgtacaaacaaatttgcccgcaaataaaaaagatcaaaatgcagaagtgaaggaacaatttgaacaacaaagtacatcaaatgccactcaaatgccttttgaattggcacaaattgtggcaaaaagtgatcagcaggagaaaaatgggacaattttaaacagaaaaacatcaaattcaatgccacaaattgaggcgaagaaagtggaaaatttgaaccaaggcgcgggaaatgatcaggaaatagatgaaatcgatctgttcatcgatattgaaacgattgacccctttgatcagcctgaaccgtcaaaaagattatttgttgatcgaattcaaccaaattggaatgatcgacgtcagtgtttaaatgtgattaattcagaaagtgtcggaacatcatcaagttttgagcggtcaatttacgaaagtgctgacaatgagtcggcatcatcatcatcatttgatcattgtggtcagaatgcgaatggagaaacagaagaatcggcaataatggacaaaatatcaaccaaaattgatcatttggacaatgattgggaggattttgctaattggaagaaaagcgctgggataaaagttgaaatggtcgaaaacaagcaaatagaaaacaaaagttgtaaagaacaaatttggatcaaagaagaagtttcggagtttgatcaaatggtggaaaatgatcagaatgccaaggaaaatgaaaaaataaaaagtgccaacgatgaaaatgaaaacggtgccaaagaaaacaaaaaatttaacagaaacaaaaaaattgttgtacaaaatattataagaaagtgtgaatgggctgaatgtgaattgaaatttgaaaatgacaacaaattgtatgatcacctcaaaacagtttagttttttaaaaaggaaatttaattaaaaaaaaaaaaattaattttaaacaattaaaaattaagacacatattgacgaactaat

SEQ ID NO: 7526 - DNA, 4471 bp, Heterodera glycines
ttacagggtagctgagctcggtgtccaggaacaccttcgttgctgtacagctggtttgagtcgtacacctcccgctggttgatgtgcactttcaggttccggatgaacgttgcgccgggcatttggataaggccgaccgctgcgtttgccggcacatcaaccacaaccccatcatctgccacttttttgagcttgaactctgtgcacacaaacaccttgctaaggtctacatagctggtgattgggtggatctgaaccaacggatttgtctgctactgcatgtaaaaaccacctgccttaaaatgaaagggcctagagcttattgggttcatcgtcaggtactccctgtagctggagttggacacagcgcagctcgttgggggtatggtgaagaagtccagccccgcatttgccacctcagcacttgacgcatccacttttttatacaacattttgctaataataaccgagtgagtcaaatctttttttctttaacagagctttttgggaaacagtttgtccaacaacgtctgagggtttcaaaatgatttcagcttttttcccgcctcctcttctcttccttcttccgcgtcccttttgtagtgatgaagaggccttgtccagcaattttttcgctccctcttttccttccgacaccagcgcgtctttgatgttgccaccctttgacacctcgttgaggaatcgtgcacccgtctcgaggccctctttgccaatctcggcagcaatgtttgctgcatagggtcgtgccgctgtgaccattggacgaaggtagcgccacaggttgcgcagcacagagccaactcctgctcccttctgtcgggggacacccaagaaataaccgtatccccgctgaaacgttggtgccccctcaaagacgctgatcggtccaccgcctccactttgcggataaattttctcgagccgtaaatttgagccgtcaaaaatcacgcgaaccatctctctcagaacgttaacacctttttaaactgaagagtcaaaacaacttggccaaactcaaatggcacctcccttaaataagtgattagaaataattgccctgctgaagagcctaacctcccggtcagagtgcgaatctcaacgtcaagcacatccacctcccttgctatgattttgtgaaacaacggcgcctggaagtccttctctaccacactacccgactttccctcaacggcaatcacttggagcagattggcaaaggtgttgccgacaatcatgctctcaatgacgccactgttcaggtaaatgcacaggtggctcacaccaccacccaaatcaaccgcatattttgcaagctcttcatttctgatctgctgctcttgttcatagcccaacacgtaggccagctgatcagtcagcgtaatgtgcgaaattttcccgttgaaaactttgagctcaaatctgccaatttgctcggtgaagtaaaagcggaaccctttgaccagctcgatcagctcctccttttcctctcgcgttttcaccgcatagttttcatcgtacacctcttgctcaaacagctcacggaactccccaatattctgttggatgtgcgcggatgggttaaactcgggcgcctcccaggggagctctgagtgccggacacggtacttgtgtacagcattcacaaagtggtaatcatccgtttcgtgcagatagtgtacgtctggggttgggtctttgccgtgcaccagcctcatgtacccgcctcgccacggtctgaactctttgagcagctccaactctttttgctttcttatggcctgttgctgtcgtttaagctcttccaactgcttttcctcctcttgctttttcttggtctcgttttccgctctctccgcttccgcctttgccgctctttcctcttctgcctttgttaccattgccactctctccgcttccgcttttgccactctctcttcctctgcctttctttcttttgccactctctcatcctctgcctttctttcctttgctactctctcctcctcagcctttttatccttggtctctttctcgcctttcttttcctttgctattctctgctcttccttcttttcccgtgccagtttttcctcccttgccttcttttcacttgcctctttctcttcctttgccttcttttccttggctgctttctctgcagtcttccttctatcttcttctgtcttacgacgcctctcctcttcttctcgccgtctacgttcattttctcgctgctttctctgctcctcttcccttcgctttctctcttcttgtgctcatttttcatgccgcaacgtttcttgttgagccgctgattgcttggtcaaatatgaaagtgggtttaagggcgcttcgcccgtattgtcttcttcctcctcaacaaacgagacgtcaagaatctcgccctcctcctcatcgtcgtcgtcaatgttcccaaaacttgcatgcaccggtgcggacctttttcgtgtcaacagccgttccacttcggcaatcatgccatgatgaatgcccctctcaagctgctgtggcgagagaaaacttccctttggcacacggaaacggtattttcggccgtcgtgcaggtgaacaatcacatattgtcggtctgatgtacccagctttgcccaacttaagccaaaaatcggacccaatagccatgattttcgcccacctgtttgggtaaattatgccagacagtccaaccatccacccggccccatcaaacaccaacttctttggcaagtgcactttgaatttgtttgttttatttccaacaaagcctggcgtattgctcggcaaaattacaaagaaagagtttgtcatttgatcaacaagtataaattcttcaaaatgagatcgtccttatatcgtggtgtgccatctcggttcactttcccccatctttgatccagcggaaactctttgccatcgtcgtcgtcgtcgtcgtcgttgccggttcatccttctttaggtgcttcatgatcagatcggtgcagtcaaagttcagctttgcacagtcttggcaaaacgattgggtgaactcaaggcgttgctgctcgccattctgattgatgagtttgaatcggctgttcccctgccggaaattgtcatcacgacactctttgcacatgaacgtgaacactccatacttaagaaattttcctattttttcaaattaaatattagccaaaacctttgggcgggccaatttccaaaatatggtcgggtactcaaacacattggtcggttgttttttgggcgattcatccactaaaatttggctaatttaaagaaatttgcagaaaaagccaaaccttcagcttccatggcttttgctttcttcattgcggaagcaatttcctcatggattttgtccaagcgaggcttgcgtcccctttttgagggccccggttgcaggtcaagcagtgtttgagtgttgttgttgtctccaattgtgatgacgtcatcatcattttgaggggaaaaattttcccgtttcgactcatccatttctttaaatttaaaattattataaaaaacccaaaaaaatgattacttttgttctcaaacaccaattgatcattgatttttctcggggccattacgattaagaaatagtttatgattataattgttaaaagcataaaatgaacctgcgaaaaaacacgtaattattgattgatagtgagaggggtgttagcgcgcagcgacctccagacgggctgtcccttttaatcgacaggccacgcccatccacaaacacatagacgagagtgtagtggttagagaaagatacaaaagggcgccaattcaaacacacagtgaaacccaagccaatttattgattttttacagattatggtactccctctgactgctgccctatccaaactgctaaactgtaaacccgaaaatttagcagaatatttgaacaaccccgaggcggtgaacaaagcgaacgcttacctggccggcaaaaaactcaaaacaacctaccagggtcgtgattccaagaccaaagaggtcaagttcggcacattttcggtgaaagccgctgcggaaacctacgcctttgagggatttcttggcaagtttccaaaaattcagtttcggtctaacacacatgcgttcagaggttaaagtccaccagtatttctacataaagcaccggatccgcctactgtaccctcagctgaagtgcattgttgagtaccacaacaagggccactgcaaatactatcccttgggtataaaattttgtcaggaaaaaaatcaataatcattttcagagttgttggccgttgaggagggcggtgagagtgaacccgtcgaaagacctgccgctgaaaccgactacctggactacttgaactttcgcagtgggtggcaatcaacactctactgatcaatgaagcgtgtgcggccaatcggaaaagttgggcgaatt

SEQ ID NO: 7527 - DNA, 2430 bp, Heterodera glycines
  unsure (1)..(2430): unsure at all n locations
tatttttctgtataggtttttgctggcaacactatgctaacgtttactgtatgtatttgccgatttaaagtctatgctataaggaatggatgtaccacaaataaacatttttaattttagccattatattcggctatcattaagactaattgtaagccattccattaatggtaaatttgttgactttttaacatcttgcttgaatgaactattttgctacgctgaattttataccgtattcaatggtctgtgactacggtgtattatcattagggatgtacacattaattttattgatttttttatataaaaagattttttaattcgcgttttttataaaagttgagcgtgaaatttcaattgtccttcaaaaaatttcaagtaattcagaaaatgatgacgaagttaaaaaattcaataacattttccatgactagttttatgtcctaaaaattgcatccctaatcatctcatttagcgtcactattgcttgaatttttctttgatatttatgattcaattatctatcatctcccgtacatatcccaaaggattgtttcgcccttttcttctcacaattagtcacacctcattagtgcgcaacgcatcagcggcgtttcgttgcgcttgtacaatgcgctcagcaccgccaccagtgggtccggctcgtccgcctccgtctccccattcccatcatttttgttgctgtttctgctgcaactcgctgccgccaccgcttcgccgattaaaaactcggccatttcgacgtgtccgctttcgcataccgcgtacagcggcgtgcgtccgtccgcgtccgccagtcgctggtccgcctcaaactctgtgaccaatttgcgcaccgcgagcagcctttgcccacgtacggccagcaatagtggggaagtgaattctgaaggtcggcaaatttataaactattataattaacaaaattaaattcaaattcactcgcccgtgtccaacgcgttgattttggctcccttggtgaacagcaactgaatgttgttcaccaggcactgctcgtcgtccgccttgaagttcgggttttggaacagcaaatggagcagagttcgaccacgctcatcaggtgcattcacctgtttagcattttgatttataataaacaaagtttccattttaacttacgagttgaggctccagccgttcttcaagccctaacagtccaatcggagaaaagagggccttttcacgaaggtgggccaacaactttcgtctttccatgtcttcgaccattcgaccgtgcgaatctgacaacaaatgaatgttatgcatgatagctaataatcaaaattaaatcgttttcaaaaagattttaccgatcggagaatgttccgtcgatgatccgccaatgcccgaggaggacgagcgtgagcaatacgtaccagcagcagcagcagcaggaggagcatgatgggggtggacacttgaaaaagggtataaattaaaaaataataaaaattattattacgaatttgagtgaattgtctgctgtttgttatgagagactaatgaatgatattgggcgggcccaaaatgctgctgcttccggtcagttagctgatgaaattgactgaaaatttttaaaattatatattctttattttatcccaagaggaaagttctcaaataattgagagtttaaataattaattaaaataaataataccaaaaataaatgtaattaatttaaattattttattttttcacccatgctcctgctgttgctggttgttgttgttgttgatggcattgtttgcgtgcacattgctcgtcaaactgttcagactgtccgcgtggcgaatcagcggaatggccgacgcggcggtagacgacgcgcaactgtccgtgctgatgctgccggcattgaacatcaaatattgctgttgctgctgcggctgatggaattggtaggcattttgctggtggtggttgtgttgcgtgtacgcgttgaacagatgctgttgtgtgttgccgtcaatcagcggcggctgatagtggccagggccgaccccaccgcacaaagttgccagcgaatttttggcgactaaaaatgggaaaattccattttaaaatatataagaaattaaattttgtaattcaaaattatggatcacttttcgactcttgtgctgggaattccggcttccacgtttttgcgtatcgccgttgtcggctgcgaatgcgaccgcttgcgaacactgtgccagcggcggccgacgcaatcgaaaccatcgcaaaggcgagcaaagcaaaccaaaagaacagtgaagaggcgcgcggcttaagcgcttncgactgcagaattgctatgngaatgtcgagattctgaagcagagaaaacgacactncattagtgctaattangcgtgggtaaatatttaattgattt

SEQ ID NO: 7528 - DNA, 1882 bp, Heterodera glycines
  unsure (1)..(1882): unsure at all n locations
ttttccatgccttctttggcgnataggncaattgccagagccaacgacgccctgagatgggcactcaatgcgaccaaaaattggcgaaacagtgccgtatcgttgaaaagtgtggacggatggagtgcgaccgccaggaacagctcgccaagcagcaatttgggttggtcatccgccgtggggtcgggctcatgcgcgtcgtggacacagtcgccgccctgtgaattttcaaatttaaaaatcgtttaaatttttataaaattgggccggtcatatgaaaaggttcggcacatcccccgtcccctgggtcaattgtccattctatattagatttatattccaaatgtccacccacgtcccatccgcagttcgcctgattgcactgctcgtcacaatggccgtccgcgtacactttggcacagtcgaccatccacggacacgtcgcctggtgtcgctccaaacagtcaaagccgtcgaacaagcagcgttcgttgttgcaaatcttaattcagaaaatagacggatttaaaaattaatttgctaaataggtataggaaaaataaaacaaattaaaaataagctgagttgtggtgacataaaaccgactcacttcatcacatttgccatccgcaaacacatgtgaacaatagcttgcctgtgggcatttgccaaagggttgtgcctgttttgtggaacaatcgccgccgtcgaattggcacgcaaataaattgcactaaattaaatgaataaataaatttccaaatttgttttttagaattaagaacaatggttattgttttaataataatttttttaatttccagatttttcaacaaatcacctccgaatcacaccgatggtttccgtatttggcctcgcatcccgctttcttgcagttttccttgtccatcacatcggtccgattgaatttgtcaacgggcactgaggtctaaagaaattcaaattttttttatttcataaatatgttgcccagaaaatcacttcacaatggcgcccagtgaacccgcgcgaacattcgcattggaaatggttgactttgtcgtggcattttccgccgttggcacagacacttaaaaaaataaaattaaaaagggcatgcatataaatgttattattatttttgccacattttttcacagtcgttgcgattctcttcacaattcaggccaatccaacccggggcacaatcgcatcggtaccgatcgttaccaatgttcacacatttgcccttgtgtttgcacggagatgggcctgtaatttaataaataatatttttattattttcagattaatttttaattaatgcaattttatttttgttttaatttattggtatcgaaatgttattcaaaattaataaaattatttttctatgtgtactttttgagcacggatttcgctcaatttcgcactgttctccctcaaagccggtcaaacatttgcatccccacgagccatctgatgatgattttaaagtttaaataaattttggattttaattgccaacccttcgtcttcccgcattttccaccatttcggcatccgttttcgcaatgtctttcaattggcatattctcacacaatgtccccgaaaaattctttgggcaaatgcattcgaaatgaactgctaaatttgcaaaaacattaattaaaataaattactaaaaataaaattacccccattctgctgattgtccttcacacttacacattggccaccatttttgcagggatttttatgcaatggacagctttgatttctaaaaatgttttatttaattattattttttattntaaatttatttttacaatgctntctctgcattttcggccgactgatcacaaattgtgcccttccat

SEQ ID NO: 7529 - DNA, 2091 bp, Heterodera glycines
ttgaaacaacgcgtcatctcatccgaacattcgtccacgtcatccgtgcaattttggcccttaaaaattcatttgaaattgcaatttgaaatcataattttctgtttttccaccttccatccctcatcgcataagcatgtgtagcttccgttgaacggattcgtaaaacaatggccatgttcgcacagattttcgtggatattgcaaatgttttgaaattcgcacaaagcacctaattgtttggtagttaattgcttttgtaaatttctggcattttgtaccaattcggtccggcgcacaacggcaatcgtaccgagcaatgccatccacgcatgttgagccggcgtaacacaaattatccacacagtcgtcaatgttgatctcacaaaatttgcctgaaattaaattaaaaaaaacacaataaaatttaaaatcagtgcaaattcaccaacgaatccgccaacgcaaatgcacatgtaggagccgtgccgattcacacaagtgcccccgtttttgcacaaagtggcgccaaaccgttcacattcgttgatgtcctgctcacaaaaatcacctgcaataaaattcaatttctttaaattataattattttttataatataaattttgccctaattaccccccccccccaattttatctgtccccctcccccatgcccttcctcacccaccttcaaagccgtgcatgcatttgcactgcgacgcgtgccaattcctctccaccacaatgccattcccatcgcgcacgtcttcggcccacgcgtgtgcacatttgccgccgttcaaacatgtcatcatgcccatgtcgcactcgtcaacggcacgctcacaatgtttgcctgaatggcaatttaaaaggtgagaatccataatggcaaaatattaattttgaattaaatttttcaattttcaaagtaccctcaaagccgggcaaacattcgcattcccagcgccagtcaaaatgcgcgtccaatgcccaaactgcagttgtggccacaatgttctcgtggcattgggcaccatttaagcagggaaaatggttggccaggcatgggtcagtgggacggtgcggcacttcacagagatagccgacaaagtccgatggacactcgcagtaaaagccgccaatctgttgggtttaaaattataaaaacaaaataatgataatgggtgattacggtgttcacgcatttcccgccattttggcacaatttttcgctcagttggcactcgtcaatgtcctcttggcacctttgtcctttccaccccgtttggcattggcaatgactgccgttctggtcgttcatgcaaaacccattcagacaaacttccgtagagctttggcagaagtttatgtccgcacatattttaccttcaacaaaaattggcacaattattacaatatttattttattgatcaatgcttccaaaatacagtaactcgataaaaaaatggtataatgttttttccagaaaaaacatctaacctcaaatctactctaatattgactcattaatttgcgctttgctataataataataatccgttccatccgcgccgcgccgtcccccccccccccctagagatagcaattttctgaggcccgaaggaaaatttgagagggctaatttatatgtaatattcgaaagtgccaagctaattagcgattcaggcgcgcattggggcctgaattaagccattttccctttgatcggtactaaattggccgaaaaagagatagccattttctgaggcccgaaggaaaatttgagagggctaatttatatggaatattcgaaagtgccaagctaattagcgattcaggcgcacattggggcctgaattaagccattttccctttgatcggtacaaaattgggcgagaaagagatagccattttctgaggcccgaaggaaaatttgagaggggtaatttatatgtaatattcgaaagtgtcaagctaattagcgattcaggcgcacattggggcctgaattaagccattttccctttgatcggtacgaaattggacaaaaaagagatagccattttctgaggcccgaaggaaaatt

SEQ ID NO: 7530 - DNA, 2548 bp, Heterodera glycines
ttgtcggttggagtccaaggggcaagcggtgcctttatccgtgctttttgagccttttggcattcttcacattgacggacaatccgttcaatttccgagtccatgcccggccaatagacgtgttggcgggcgagtgccttcatgcgcacaattccggggtgtgccatgtgcagggacttcagcattcggttgcggagcgattggggaacaacaacgcgattttggtagagcaaacagccctcgatttccaaaatgttttcccttttcggaaaatacggtgcgatgtccgggtcgctgcttttctttggccaattcgatttgatgaatgccaaaattttctttaaaatctcatctttcggtgtcgcctctgcgatttcgtctgcagtgacgggaagttgatccgtcttggtttgcaggagtgtgctgatatagcactcggtttcggtgcagatattggcgatcaaaatatcctcctctggtcggggataatttgcgatgaggcgtgagagaacgtcagcctggccaaatgatgcggtgttgatgtaccgtatctcaaaatcgtaattggccatgattagggcccatctttggagtcggctggcggcataaatggggatgcctttcttggagccgaagatggccagcaatggcttgtggtccgtgagcagtgtgaatttccgtccgaaaagcatccggtggaatttttggactgcgaacacaagcgccagagcttctttctcaatttggctgtagttctgctgcgcgttggtcagaactgttgaggcgtgctcgatgactttttcctttttgtctggaaaaatgtggctgattgtggcgccgatgccatcttttgacgcgtctgccgctacgacgatcggaagtgtggggtcgtagtgggtcagcagaagttctgaaaccataattgccttcgctttctcgaacgcggactgttggtcatctccccaactccaggattcatcctttctgaggagttggtccaatggcgccctgatttctcgcattggtttaacaaaacgtccgtaataattgagcgctcccaaaaatgaacggagggtcgttttgtcgtgcggcgctggcattttctgaattgcctctgagcgcgctgggtcggggcgtatgccatttgaagatacgatgtggccgagaaaaagtaattctttttggaggaatttgcatttttcgagttgaattcgtaggccaaagtccttgatgcgttggaaaagcgtgtgaagcgcattgacgtggtcttccagggtctttgaggcgattaggcaatcatccaaataagagaagacccctggaattcctgcgcagatttggtccatcaagtgctggaaaatggatggtgccgatttaacgccaaatgggagacgttggcactgaaataagccgcggtgggtgtttattgtgcaaagatgtttcgatttttcatccaattccatttggaggtaggcgtctctcaggtcgaggtttgagaaaaatgcggctccatttaaagctgcatatatgacgtcgggtctcggaagaggatggcgattcagttcgatcgaatcgttcaatccggtcgaaaagtcgatgcacacccgggtctttccatttttctttttgacggccaaaatcggggcggcccaatggctgaattctaccggtttgattgcgccaatctgcaagaggcggtccagttcggtgtcgacagcttcgattgcaccatgggggactggtcgtgctttacagaagatgggtcgggcgtccggttttagaatcaggtgcgctttgattgcgcagtggccaagtccgctcttaaaaacttcctcaaaatcgttttgcaacacagcggtgagcgaggattcgtccgtgatgccaatcgccgggtttggtgcctttacgacattggcgttgattgacgcgtttggctttcctttgatgctctttggatacaaaatttctcttgggatgagctcgaattcctcaatccacggaaggccaaacaaatcatgctttaagtcactgctgacgtaagcgatcagtgttttggatggccgatcgaagcaactgacggtgcaatggaattttccttcggttgaaaatgcggtgtcattgcagttgcgggtttcgatgtccgttggagagagtttgggttgacccaatttgatccacgttttgaagctgatgactgttgcttgggctccactgtctccattcatcttgccattgattgtgaccgggatcttccaccatcggccttgggttgtgccaatcaccatacaatgtgacttgaccacgaccgtgtgaaatgatcggttctgagatttgtgtgccgtgttcgacgagcgctgacggcagacaatcgcaatgtggccttgccggttgcatttgttgcaaaatgcgttggcaaatttgcagtccgatcaccagtgatcgttgcttccgcatgatgcgcatggatgcgatggatggcctcggtttgctttgtcgtccgatttttgcttaggcgaaggcgcatgatgtggccatttaggtgccggtt

SEQ ID NO: 7531 - DNA, 3363 bp, Heterodera glycines
  unsure (1)..(3363): unsure at all n locations
acggagggtcgttttgtcgtgcggcgctggcattttctgaattgcctctgagcgcgctgggtcggggcgtatgccatttgaagatacgatgtggccgagaaaaagtaattctttttggaggaatttgcatttttcgagttgaattcgtaggccaaagtccttgatgcgttggaaaagcgtgtgaatcgcattgacgtggtcttccagggtctttgaggcgattatgcaatcatccaaataagagaagacccctggaattcctgcgcagatttggtccatcaggtgctgaaaaatggacggtgccgatttaacgccaaatgggagacgttggcactgaaataggccgcggtgggtgttgattgtgcagagcggtttcgatttttcgtccaattccatttggaggtacgcatctctcaggtcgagattcgagaaaaatgctgctccattcaaagctgcataaatgacgtcgggcctcggaagaggatggcgattcaattcgatcgaatcgtttaatccggtcgaaaagtcgatgcacacccgggtctttccatttttctttttgacggccaaaatcggggcggcccaatggctgaattctaccggtttgatggcgccgatctgcaagaggcggtccagttcggtgtcgactgcttcgatagcaccatgggggactggtcgagctttacagaaaatgggtcgggcgtccggtttcagaatcagatgcgccttgattgcgcagtggccaagtccgctcttaaaaacttcctcaaaatcgttttgcaacacagcggtgagcgaggattcgtccgtgatgccaatcgccgggtttggtgcctttacgacattggcgttgattgacgcgttggtctttcctttggtgctctgtggatacaaaatttctttttggatgagctcaaattcctcaatccacggaaggccgaacaaatcatgctttaagtcactgctgacataagcgatcagtgtcttggatggccgatcgaagcaactgacggtgcaatgaaattttccttcggttgaaaatgcggtgtcattgcagttgcgggtctcgatgtccgttggagagagttcgggttggcccaatttgatccacgttttgaagctgatgactgttgcttgggctccactgtctccattcatcttcaaatttatgccattgatcattaccgggatcttccaccatcggccttgggttgtgccaatcaccatgcaatgtgacttggccacgaccgtgtggaaagatcgattttgaaatttgggtgctgtgttggacgagcgctgacggcagacaatcgcaatgtggccttgccggttgcatttgttgcaaaatgcgttggcaaatttgcagtccgatcgccaatgatcggtgctaccgcatgatgcacatgggtgcggtggacggcctctgtttgctttgtcgtccgatttttgcttaggcgaaggcgcatgatgtggcgatttgggtgccgattcatgttgtggccatttgggtcccggttttgccttatgtttgcctttgctggtctctcgccattgctgaggtcgcaattggatggcgctggttgagaccggttgagtaagcagagaaagggcactttctttaacgatttgaatcgccttcaactcctcttccactttttggagagtgatgtccgtgcctgtcttttctgcgtcctccagcattttgagacacttttgcctcaggtcgtggtgctcgtcgttgagtgcaatgaccaggattatgcactttagctgttctttggtcggactcaaattggcgttttcgcaggacgcattgatatgagcgaccagcgatgatatgtcctggctcggttgctgacgaattttgaaacattcgtagcgccggacaaatagtgaacgcgtttcgggatataatcctttcagcttggtgatcgagtccacccaagtgactttgtcgggctgggtcggactgatgctgtcgcggtatttgccgtactcctcgtcgccgagtttgccgagtagtagtctgacttttgtcgactcggggaggtccttaccatcttcctcaatcaaaactccaaaccgtttgaaccactgttcgaaagtgtttccggtttcggcgtcgtaattgaattttgaaatttggccgtcgatggaacttgacaaatttgcatggttcagactcgctgacgcggcgttttgcggtgcttggcccattagctgttggatggcatccgattgcactcgcatggcctcaaggagttgcttaatttggtccgcgctcatgccgaattgtttgccggtgccgaatttgagagtccaaagttgaaaaaccgcttattgcggaaccgcaacctttcttaggtctgttggtttttcggcaaattaactgcaatatatgcagacctcacccccctagggactattggttttgttgatggcgaaaaactgcagtatttgcagacctcacccgtctagggactattggtttttttgttggtgtgcagtccgggtgtcttcttgttggttgaagacgactgctgactgcgccaaatttgttgtgtctttgtccgagtgaataagaccaacaaatatttatttacgaagagacaataataataaataataaaaaatggcgaatggtcggtggagagaataatgaataaaaataataaattgaagataggagaagagtgaacatgggggaagagtccacgcctttaaatagacaatgtgagggggaaggaacggacgagagaatggacaaatgtaaagatcaataatcgataattgaacatgagcaaagtacatttgctttttctccaacaatacttttctcgagttaattgtgctgcagaaaaaattaaaagtgagtagaattagtgcgtgagttaatctccccgttattgcattaagaataattttaattcagccaacgcatttttgtcgtccagaaaatatagattttaattcaattaaagggcttttctgaaaagagtatttctccatcgcgtttggagttaatcgatttgaattgggaaataatttcagaattggaatcgaacaatattgtttaattccgttattccaaatctgatctctatttgtgcattcaaaatattgaactaaattgtatagaaaaattctgagaagaaaagactctatcaaatttcctttgacaaaaaaaagtgaacagatccactttcggttgaaaaatacttttctcgagttaattgtgctgcagaaaaaattaaaactgagtagaattagtgcgtgagttaatctccccgttattgcattaagaataattttaatatacagcacaacaccatttttgtcgtcaagaaannatatagattttaa

SEQ ID NO: 7532 - DNA, 6237 bp, Heterodera glycines
ttcattaatttttttgttaattaccccatcagatatcattaatgatcacagcttagctgagacatatgctaatattttgtcaagagacgaaacaacacggcataatgctgaacatttgttggccattcgaatttgttccgcacgaatttggcaaatttttcagcaaattcatttggtactcaaacagaagcataatgccagattgaaggatgtcaaaatgaaattttggcacaaattcaatcaaattggcgtcgcttttggaaaacacggcacgcaacttacaaatatatgccaaatgatttgtatgaacattgggcagcagtgcaaggtcaatggtaagatttgacatttttggcgcgccaattagtccaacaattagtgaccgataaagataatgttgctaaatattttcaacacataaagcaattgttgccagagcggaatctgttttatcagttggctgaggagcatgccaaaaacataaccaggtgaagggagaacctttgatcactgatcagatatcacttatctcaaatggaagtttttggccactactgtagtttgctgtatccctcttaaaacgaaaagggagacctttttgttttgaaaattttttttttatgacaacttgttattaacccgaacccgaacaaaaggataaaatgatttgcatgggaaggaattatataaaagatcaatttgatatacctatttgcaattatttttcaagaaatttggacgctaggcttaagaatttttttttatttctaggattttctcgggagcctatctcaataacccgcaaccgatttcaccatttcataaaaattataacaaactttccgcttttgtaggctaaaactggggtcacagtggtcccgtccacacatgtgtatggagtagctctattatgtcttgaatttcatagtaaattgcgaaaattcttattgaaaatacaggaaacaaacttagttttttattaaatttattaattctttttaaatgatatgtatttgaaataaataaaatgcaaataataataataaaaaaaagaaactttaagattggcagagacaaaaaatgcatttagtgaaagtcttaaaaattcactgctggaaggaaaagggaccaaatttcggctccaaaaatttttctcgcttagtctgggcgatattgcattatatgagcaaatggttagcaaatttcctcaattaaaaaatttgtctagatcaggtaggtgcatttaaaattttttttataaaataaatttaaatatttaattgattttattatataatagaattaacgaacgacgaaataacggaattacaaattcgaacttatatcaaatttcttgacaataaaaatgatgagcaaatttgtagacgcgcaaaatatttgctcgatattttagcattttatcaatggtattttaaaataatttttaataaaaaaaaaaaactttttaaggttaaaaaataaggacgacattttaatggacaaacaggccgaagtgttaaaacacttggagttgtacgaacttttgatggtcattaaaatttatattttttagttgcaaatttctttgttttttttcaatttgaaattaataaataattaaatatttttattttaggattcggtgccaaatttatctcaaaatgagatcaataatgatatgattatacagctgttgtacgaacagagaaaagaattatttccaaatttaaatattgtaaaattttcaaattttgacagcccccaaggcggtgaaacggatgctaaatcggcacaacaatttttgcacggcaaaatcctccaaaaattggttttaaacagcgaatttttgacgcagttaaaaggtctctgaaaaattctttaaaaattagcaaaataaaaaataaatattaatttaaattttagattagatacaatatttgtaaatttcggataaggaatttaaatttagataattataaataccgtatttcctaaaatagagtccccgggggttttattttcaacccccctcaaaagggaggctttatttcaggggcggttctaatttaggggggggggctgtattttaggaaataaggttgttttatttaaaaaattatttttatttttaaatttttgaaaataaaaaattggaattttttagaaatctgtgccgacattgaccggttgcatgagttatgcaacgaaccagtggttgaacaaattatcacgcaaaattgttgcaataaattggaaatgccaaaaacggatgccaaaaattcacatttggatgaaattgcttcatcatcatctccttctatgttcatgaaattgagtaagcaaaattaattaataaatttaaacaaaataattataaaattttttttaattcaaaaaatctctcaacaggcgattaataaaccttaataacactttaatgaatttgggttaattataatataaaataaaatgcactaatgaattaataatggatcgggggtcagttttcggtgccgaccgtttgggcgtcgccaaatttgaaatgctaaaactttttcctttatcagttaacatttagcaaaaatgccatcaattgaaaataaaaccatgaatccttttctaaacaatttgattaattttttttaaattgaaaaaaacttggaaaaattagcaaaaataattttaaagttttttcaggagaaaatatagttttatttgaaaaaaattctatgttaaaaaaaagttatggcatgcagcgacgaaaagccagaaaaagcccgaattaccgaattatacaaaagcatttaatttgggttgctatttagaagagttattaaggagcattaccaacggtgctgaaccggccggcgccgaactggctggcggcgtgctaaataatgcttttcgggtcgggtgaattgttcaatttaatgacaatgtacaaaaatgtgatgtttaaaggacgaaaaaataatgatgattcagatggtgtaattttggaaaagtcagaagaagacctcaattttgaggcaatttattttcaccacaaaacggtattaaaagaattggtcaaattgctttgggtctttcaacgatatttcagacatattaggtaattaatgtgaatatcatttaaaaaccaataaataatttcactaaaattcatcagcaattaatagagcccggaaatttcaaatttgcggatcccgctgcggggttggaactcaaaatttttttgggatacgggatcccgtgggattaatcccgaaaatcccgcaatttaaaaaaaaaattcgggattgcggattgggattccacaaaatcctgcacgggatcccgtctcgtaccgggcactagtaattaatccattcataattcgataattaatacaatttggaggtttgaaattttccataatttattctctataactaaatttcacaaattaaactgttctcaccttggctttattttaatgattttttttagaaaattatgaattagatttattgaaaattttgtttcatttaatttaaaattattaaaaaaaatttttttttaaagaattaatgatgaaaaagtgaagagactaatcattaaattgaatgtggacattgcaatggctgaccttttcgtggaagtgaatgatccggcaaaaaaacgtgccaatctttgcctaatggacagtttgttgactcatctggtggcaaatggcacattgtacacagaagtccaagaatggcaaacccacatgctttatgaacattttattaatcatgtaaaattacaaagataatttatttattttttaaattaaggttctttggttaatgtttaatcatgaaacttgttcccgaggggtttttgacgacctctgatcatgaaaatgacatctattttggccaatttctaactaacccgaactcggacaaaagtttaaaattccaattgtccatttatgattttttgttcaaatttaagccatttttaaagtagcgcaacaaattccattgatttaaagatgaatttaaaatctttaaataattccaaaaaaaaacaaatgcaatttctttttttgctaagaatttcatacagtccatgattagaatcaatcaatatagccgcattgattgatcagcttcaatcaataatgattgttggttgaccaaaaccaatcaatcctcattattcagaacgaaattccgcgtccatcggatgccgatttgcgctgggccaaaccggagtgccataaggcggaggtggcccaagcggcagtgagcaaattattgggccaaatgtatttggtggtacaatcgcacagttttgtgctgggccaagttgcaaaggattgtgccgaatttgttcaatttgtcaaccaaaatgggaaaggaattttgaaaaatttatattgcggtaaataaatatgccataggtcgtcgtatcgtaaaagtgccagttttgcagaattttcgagcaaaactcttcacactttttgtttgatatggttgtgtttataaaaattattacgagtttttctcgaaaaatctgtaaaattggctttttacgaaacgatccagccgcgtcaggatcaatcagccgaggacaactcagctttacgaggtgtcatgacaacttgtacacagacaactcgtacaatgacttatgctaggcctatgctttaggctaggcctaggttaagcttgcttgggcctaggcttaagcttagtctttattttgtaaaaatttttattgtacgactgagttgtctatcagccgaattgtcccatcagctgactagtccagaagccaatccagcacattaaataaaaatcaattttaattttgattagatttttttcacagaaaatattgcctttaatgagcgaatcacttattacaagacaattttgggctcacctaattcggaggaaagaaaagtggcagaagcattgcttgtcattaaaatgacttttagtgaaattttacaaattgaaaaagcaaatttcaagtattatttttatattttgtttaaaaagcattaatttaaataaagatataaataaaataagtttgcatatatttaatgatttatctaaaaaacaaattcataaatccttaacaaataaaatattaataaattgaaaaatattttataaaaatgctaaaatataaatattcaaatttttttttaaataaaattgattttaaagagcatcgaaatttgacgaccaaattggcatctttcgagccgaattaattgccttgatgaaaatgcttcaaattgtccttggcgagacaaaagcaatgttttggatgttttgtccaattttaacttattttcattttctgaaaacgaaacaaggacattcatcagaaaagttagactacaatcttttaaatatgtgcttcaaaaatacggtgagtgattagaacaaaatcaaaaaaaaatagaattttaatttttgtaaatttttgaaagaaggaaatttacaaatttatttaaaaaattatatttaagtgactaataaaaataaattaaaaattttaaattaatttcgaaagaattttaacaaaaaaatattataaatttttgaaattaatttttttaaagaatttttataaattttaaaaaataataaattaaaaattaaaatactgtaaattttaaaataatttcgaaagaatttttacaaatttatttaaaaaatattaattataataaattaaaaattaaaatattgtaaatttttgaaattaatttttgaaagaatttttataaatttattttaaaaattataattaagtgactaaaaatttttaataaattaaaaaaaacttttaggttgccgcacatttcaaaatgcaaagaaaaacatttaaagatattcatttacaattttttttgaattttttcacgaattacgccaataatgagttcgggttggtaatgattttgcgcgaaaaaccgggcgcaatttcacgccttcgccatttgttaggcgcagcaatagacaatttttggtggaaaaatgaatacatttttcgtcaacaattgataaattggaactgtaatttttattaaaaaaaatttaatttattaattagacatttatatatccataataatattaaaattaattaataatttcccttattttatttttccacgacaaaacacgtctattggaacattactacagtactctgatatcaaatgaccttcctggtgatcagata

SEQ ID NO: 7533 - DNA, 1140 bp, Heterodera glycines
taattaaaatttagaaataaaaaaattttttgaatttattcctattcataaatttttaaaaatagaaaattttttatttgcaattaaaaagtttgaaatttttgttacaaatgtcgaaaaaaaaactcttcctcaagtattttggtgaaatttttgaacaatttaacaaaaattaatcagacggtccatttttgaaaaattgaggaaaatttgaaaattcaaaaaatttttttgtattatttgcaatggaaaaaatttgaaatttttagataaaatgcctaaaataacatcatgcattttagtcatattttgggatataattttgattgatgcacccaaatttcaggtgtggatgtgccgttttgaacatctgttgagcctccaattgcccgcagttaggcaggaaatagagaaaatttggctgttcttccggtgttactatgacatcatcagcgattttgagccgccgattagcacggaaattgattggcctttagcggctgccacaaacgaattaattttgggtaattaattagtgaatttattactttataaattaatcaataaaaaatatcggaaaatgcgtcaagggaaatggagttgatagaaattttaatttagtatttattacatcatttttgggtaaaaaaagtgatttaaaccgcttaaaaaccctaaattttgaaaaatggcgccaagacaagaaacagtaagaaagctttaatgggattactgtaagaagcccctctattatttataggtttttaaatttaattattgtttttttttgcaaaaaatatgcagtaaatcaatttaatttccaaggcattatcatctattattttaaaaatgatttttaaatattttaatgatgtaatattccaatttaaattaaaaataaattcctcaaagaaattgaacattttatggaaatgcataaaaatgaaacggactcggacaaagtgctgaaacattggcagcaattaattaaatcaaattttgaagatggcattttaacagaattagcggataaaaataacaaaaatgaagatcaaatctgtgatgaacacattgaatacatacagaagctgcatttgctagaagttattaaattgattaattcaaaaaataatcacgaaa

SEQ ID NO: 7534 - DNA, 1688 bp, Heterodera glycines
  unsure (1)..(1688): unsure at all n locations
ccccaaaattcccgttttacaagaaaacgaagacacggaacatgtgcaggaagacgatcaaaccggaaacacacacgttccgagtccaccgcgacaacaaatactgccagccgaaccgcgtcctcagcgaaaccgaaaaccgccaaaaaaattggtgatggatccaaaagctggtggacgatatgcacttcaagaataggagggcaacaaaacttgaagggggaaatgttgggaatgttcatttgctcatattttaaatttcccgcgcttttaatgctgaacatcactattattgatttcagccattttcccttttgacccgtccttaaatatcagtccttcctctcagttgtcgcctcctacacacatcattatattttgctccttgactccgccattttcattctgactttcattttcatatttgtttcttgtttgtcttttattttatttcttcaataaatttgcatttaaaacaacccaggacaaagtgacgaaagtgatcattttgctgggcagatacaattcaaaggatataataaagaagaccaggacaaagtgacgaaagtgatcattttgctgggaagatacaattcaatggacataataatagaaacccaggacaaagtgacgaaagtgatcattttgctgggaagatacaatttaaaggacataataaaagaaacccaggacaaagttggtcttccaacaaaaaatgatgtggaaagaaaaaattttctgatttgagggtagtcgaccaaatttcagtctgatttattaaacatactcataatttgaaatttatggcctaatctcatattttatctaaattttaaggtctaacgaaaaatttgtttatttttttggacaaaaatccgttaaaaaactagccaaattttttttaaatgtttcggcggcgccaatcggcaccgcaggaccctaatttttgattgaatagaatgtaaaaaaaactggtttgaagaaatttcgcaaaatgttctgattttcgaccccaaactctgatttttggagtccacggttctgattttgaaaaattttcgatagaaacccatatttttgagaaaacttcgcagtttttcaattaatgtcggagcaattggctgatcatttccgaccacagcaccgatcagcaacagttgggtgatcagaaacaaaaataaaggagttgcaagcatctttttttatattgaatttggggacaaaaaaaataaataaataattattttggtgcctgaaaaagttatgaaatttttacaagatttttaactgcttaaaaagaagaattttttaggatttagatctcataaaaagtataaattcattaataataattaacacatacaattttataaaattatatacaaaacactttatgacgaaacactgaattactatcgngaatgagtcataaaatatatttttaaaaatatatatgggatcataactgagaaaagtagaaattttattacatttataactaggggcttatatttttagatgctaaaaactggcgaaaaaattcaaaaaataaaaataaaaaaaaaaaaccaggttccgtttttagggttctaaaaacccaaaaatattttctaaaccgagaaataagggctaaaagttttcaaattttggggggggaaaaagaaaaaaaaattctttcaaaaaatcaa

SEQ ID NO: 7535 - DNA, 1968 bp, Heterodera glycines
tcaaaaaatcaacaaaattatgacaaataaatcttattgtattatttatatataatttaaaaaagaaaaaatccttgtcaagaaaataaataaataattatggatatttttgagagaatttttcatatgcatttaaggtacatgccataggaagctcaggaaaaaaactaggtgaaaatttaaaaacataagcactatttataactgcgaaaaataaacattttttttagggtttaaacaacaaataaaaaaacagaaatttattactaataattaacacattcaattttattgaattatatatatatatatatatatacaaatcgcttctgacgacagtgaattatgaccggaaatgcgtaatttataaacaaataacatttccggctaaaaaatcggtaacaattttttgtcaatctattcaacttattattaacgaattattttttaatgaatttagccaattaaatgtattgattaattcgatttatgatatttattcgctattacatacattcatttcaaacaaatacgagcattttatatatcccattcaatgtattagttattataatttttatattttgtattttatacaaatgattttaattttaaaaaatatattaagatgataatattatatttattccttttgttttcatcaattttatattattttggcacaaatggagcgcaaataaatgaacaccaaaatgttgtcgaggttcaattaagtgtaattaaatataatcataattagcataaggtatatatcactaatttgactgagacatgaagtgagagagggagagaaatgagagagagagagaagagggagagaagagcgaaatgagagagagagagaatggataggtcattaagccatttgataattgctggaaattaccctaagtaagcctttcattgatcaaattcggggtacaggtctggatccaggcctcgaggcgcctgtccctgtagctgttaacaaagcaaacacaaattttgaaaattttcccttgcggcgcctatcggcaccgccgtactcctccccccttgttccccaaaatgtggttgaaaaatgcgccgtaaagacccctaaagattgaccaaaatttcaattaagggaggttcaatcagaaatatcaaattgattatcatttgtcctccatttttgcttctttcacagtgaaatcgatggccaatttcacgttgtcctcgcctttgtcgtagaaaccgttgcttgggtccatcaattccttaattgtcataattggatcaattaaggaaaagtttaattgtcactcaccacaaaggaaatgaaattgcatccccagcctctgtttttattgtcaaaaacatcgtcatttaattctcttcagaaatccgccacatcgcacttttgtgagacaattcgaatgattgccgaacatttgcagctccaattttctgtgcaaaacaaaatttacttttccatttttggcaaggatttgagacgcaaagaatttcacagactaagcgcgaaaattattttctgggtataagtaacacaatttgagctttcttcaaattggccgtcgccaacaaatgtttttgcaattctgcgctccttttgatgcctttaaaaatatcaaatccatgccacaaaatgtacaaataacgcaaattaatatcgttgttaattcttatcaattagcatttaatttgcaccttcttgtggagcggcacacaaaagataaatgccattattaaagaatgaaatcatagcgtaattagtaatagtttttcaatttttaatttaataagcccaaacttcccggttcccaaatttctggtcccaaaaaattctgcttaaataaaaggacaaaatgatcagtcaattaggaatggttttcatttaaaaaaaaagttaaaaatgtttacgaaaatccaaacaaaattattgcataaatccaaagtccaaaaaaa

SEQ ID NO: 7536 - DNA, 5447 bp, Heterodera glycines
gtcataatggatccattaaggaaaagtttaattggcactcaccacaaaggaaatgaaattgcatccccagcctctgttttttattgtcaaaaacatcgcatttaattctcttctgaaatccgccacatcgcacttttgtgagacaattcgaatgattgccgaacatttgcagctccaattttctgtgcaaaacaaaatttacttttccatttttagcaaggatttgagacgcaaagaatttcacagactaagcgcgaaaattattttctgggtataagtaacacaatttgagctttcttcaaattggccgtggccaacaaatgtttttgcaattctgcgctccttttgatgcctttaaaaatatcaaatccatgccacaaaatgtacaaataacgcaaattaatatcgttgttaattcttatcaattagcatttaatttgcaccttcttgtggagcggcacacaaaagataaatgcccaaacatttctcaatattgtcagtgctttccgtcaactgacttatatcaatttcttaattaataataattatgccaattaaggaattatgtacaattgacactcaacaccacgtttaaacagctgtaagaattgactaaataataaaattgtcacttttccatattttaattttgtagtaaatataaatttttaagcgcagcttggattattaaagaatgaaatcatagcgtaattagtaatagtttttcaatttttaatttaataagcccaaacttcccggttcccaaatttctggtcccaaaaaattctgcttaaataaaaggaaaaaatgatcagtcaattaggaatggtttcaattttaaaaaaaaagtttaaaaaaatgtttacgtaaatcctaacaaaattaatgcaataaatccaagtccaaaaaaaatgagagtctactaaaacagctccgacaattaattaattcatatatcagcagttttgaaagtataatcaagaaaaattaataaataaaaaaacaggttcatcataggatggaggatattcaatgggcatttttccccaaatcatattgggcatttatgtttcgtcctccgttttgcttctttcactgtgacatcaatggccaatgtcactttgtcctcgctttggtcgtaaaagcctttgcttgggtccatcagttgcttaattaccccataattggtcaattaagggaatgtttaattgtcacttacagcaattgaaataaaattaaagtatcccctgttgttccatttattgtcaaaaacatcgtcatttaattctaatttaaaatccgacactccgctctttagagagacaattcgaaagtttgccgaacatttgcaactccaagtttctgctcaatataattaattaattgttgttaatatatatattaattattagtaattttgcacctccttttggagcatcgcaccaaaggaaaatggccaaccatttctcattgtcagtgcttccaattttcggatttatttgtgcccatattttccatggcaatcctttgatgtgaacagtttcacttttacgttcactccaaaagacttctcgcgcaaattccgacactttttcaatttccatcgaaattgtcccgtttgatttgctttgatccaaattgaatttgtccacttttggttcatcaacagttgtgagatcaataatcaatttcactttgtcttcttccctgtcgtaaaaaccattgttaaggtccatcaattccttaatttaaatcatctaatttaatttttgtttatgcgtggtcaattggttatgttttagaaattaatttattttgttatgatttctttacaccaggcaaataaataaatgaacttcaatattggctggtccacgaatgtcaaattaaaatatttgtttgagttggcacttaccgcaaacgaaacgaaattagggaatcccaaattatttgattttttgtcaaaaacataatcacaaaatgtcccaatggaattctccgtcacatttttttgcgatataattcgaaaagttgccgaacgaacgcagcagcgccaattcgaatcttaatgattattactcatcgttgttaattagcatttaataacagttaatttgcacctttttcagtagcatcacacaatagataaatgctcaaccatttctcactgtcaacgagttcatttagttctgcttcaattttccatggaagtccatttatgtatattttttcactcaatcgactgctctcaacctcctctcgtgcaaattccgacactttttcaatgtccatcaaaactgtgccctttttcgatcagaaatccgtccattagtcgaaaatggcattgggaaaattccgtcggaaatcccatgacaatttggaagggatttgaactgataaacggcgatcacttcatcttttgacaaaacaccgaagggaactgtaaatatgtattaacttattgaaaaataaattttaaaaaacatttttaaaaatcgccacaaaaactatgaattttttacggcatctcatcagaaaatgagtttgaaattttgacttatttttttaccaattttcttcgtaaattccacgtttgacaaaagcggaaagcgaattttgaacagtgccgggccaagcatttgacggcgattctctgctgaacaatcaatgccattttcacggcatttttcatcggcccaacggagtgcctttaaaaaatttaatggaaataattaaatgactaataaaatttacagtttttaaatttaattgttaaaattaccgcattccaaattgaaatttctccacggatttgcaattcgtcacactccaaaatttcgcacaacaatttttggtcaatttgcaaaaaagcatccgttttaagcaaagtgtccgcatttttgccaatgtaagccaaacaacaattggcaaaattctaaaatttaaaggaaaaataatctttaaaatgtagtctttctctgagagtgccaaagcgagaaaagaatcgagtttttctggtagaggttttcgagtttaggagaccgagatttctttaagccctctaatgattgtttggcttttgacaaacttaaaaaaacattcattttttgaggaacatattttacaaaaaaaaagtctaaagtcaagggtttttcgatctcacaatcagacagcagcaattaattggtcttaaaatccttaatttattatacattctaaataaacgaaaaaatttttgtaaaaattttagtgtaggaaaatatttgcaaagaaatgcaaataatagcgaaattcaagacggaaaaattcacgagattgagtttaatcattcaaaaaaaccactctaaacagtttattatgtattttatttaactggaaaatgtaaaccgacaaaatagttaaaaatagcaaatttttaattctttcgcatttttcaatttttcctacccactttcaagtcgagaagacgggcctgggcaaaagcgaagaaaacattgcgcaattcggaaattggaatttgcgaagatgagccgaccagagaggggatattgtactttttggctaatcaaataatttatttatttttgtcacataaaattaaatccaccggcgtaaagcacagccattgcattttctacgttcagttcgctcaaatcatctgtatagatgaagctcaacatcactttgaatgctgctgcttcaacgtcggggacctccacgggacaatcagcagaggctaattgaaaattattagtgtaattagcggaggactattgaaaattaattagggtaatttgcagagactaaattgtaaatgtcattaagtaatgtttttaccgaattccgctttttcctttttggcatcaaaacggaacatcgcctcaaaaacgtcggaagccaacttcaaaatgagcttatgggctggcacaagcttaagaggattaaattttaaaaaacacaacaaaatttaccattcactaaatttccaatttataattaataaattaaatttttaatttgaagactcgcctcttttgcgtctccgtcgcccaccaaaaaataaacatccgcgtcctcacccgtgctcaacaaatgcttcatccgatcaagcactgattgggacatgataagcaattccatcattcgtttaattatctatttaaatgcggtaaaattattggcaatttcaaaattggcaagaaataaaaaccacggcacaaaatcagcaaaactttatgttcagttgggctttgtgattattttgaggaaatttgtagcaaaaaaaacatgcaaatgtttcgttgtgctcctccccccctgtttttatgcattttttcatcgctttgccatcggtaaaaaaaaattgatccgactaaaatgcaaacgtaaacaaatatattttgaaaaatagatgcaatgtacgagaaattacctaaacgtattaatataaacaaagatatttttgtatttttggatagaaaaaaagtgggagaaaattgtgctctaatcgaaagcttaaaatttggggaagtttttgtatagcaaaattctggaataaaagcaaccgacaaaaaactatgcttgaatatatgcgaaaagttatgaatttcgggtttctcattgtaaattttttcttaatatatgtaagtatttgtttttttcttgtattaataaatacgctaaactttaagctttcgattaataccaagaattttggattaccaagtaataaaaaagttatgatttaaaaaagtgaggatggtcactcattggacgcgtaaatattgattggacgcgtaaactggaacagagccgaaaattgaatatattcaaataccattgggtaatgtgaaactataaaaagtttgcgccaaaaatagacacttttatcaatttgtttttcattgattgaccaatcattggcttaattaagcaattaaaggaccaggagaaaaactttaacgttaaaaatgaagacaaagtgatgacattgacattgaaatagtgaaagaagagcataaatggaggagatacatttaaattattggtaaaataaactcgaaaaataaaacactcatcagtaaagtacaggctttatcttttgtgcaccaaccgaagaggtgcaaattaaatgtttcaatttgacaaagcttagcaactccaattttctgctaatgcaaattaatttttgctaatgatttttgcgactggattttgtggatttccatattgttttatgctcatttattcggggctaaaagcaaggaaaaatgaacaaactgtatgattttgtatacctgaattgtactcttttttttttgcctcttcgttatcagaaaaatcttttagggtcagcattttgctgaagaattatttctccgttcttctcccctttaggtcagtattttgccgtaaatttaattgtacctttatgcccataatggaag

SEQ ID NO: 7537 - DNA, 2038 bp, Heterodera glycines
aggtccgaataaaacaaaacaaaaacaagcagttcaataatggttgtccacgttgaagcaataaaattctcatgaaatttgttgtgtctaaacgtcatctccatcatcgatgtcctccgcctcctcaatgtcatcttcccgctcttcctcctccgcctcctcctcctcctcttctggtggtgcccatttccatttcggtggcagctccacttggctttgtccttgtcgatgatcatcagcagctgcaccattgtcgtcgtcgtcatcatcgcaaaagacgttgctgtttgcaatggtggagccgttgcttccgttgttagcattattgttgcactgcttcaacttggacgccttccatgcagcaaaggcgtccaacgaccgacggcacatccaggagggcggctgccgcaactgttcctcccaataggcgccacatttgtccaaattgtccatgccgttctgccaagtgcaccactggatgaaggcctggaacaaaaataatatgttaatttaaaaaataaataaaatgacgaaaagagaaagagaaacaaattcatgggaccaaaactcaaaattggattaaaaaaagtaaactcataattttattggataataacgaacaatttggtcgaattggagaaaaaagctttcattttacctcgggtgccatttcctggacaacagccagcggaatttgctgtggcaatttgaagccgacaaatttgacaaaacactgacgcgtcccatccgcagcctttgcactgaccccaatgacactctccacctgggaagggggagggagggaattgattaaatttttgaatttgaatgtgtcatgcgtttgttacccggtgggggtcaaagggcgccaaaacaactttttgggtgttataatttgttcgacaaactacaaaaggtccaaaaaatcagccaacctcccatcccctggcgagcccgttgtcctcaacgtcctgcagttccttgacccaacagtcgacctcgcccggcttgtccgggttgagtggctaaaaatggagtaagtttgtgtgaaaatgcggaacatggcattataaatactttcattttttgttaaatttcaatttaatttttctaccatcatcggttcatattggggctggtccacttcctccaattggaggttgtccatgtccacccattcagtgcccaaatagtcacgccaaacatcttcgggtatgaaatatttcgaccctaaaaaacacttcctattatcgtcctttttcagtcttttccgaggggacggttcaatgggttttttcttgtgggacgggtgggtaaaagccaatgcctaaacagctttgtctacctttggtggtgccatcctttccgacactccggcacggaaccgcaccgcgtctgcccttcttttccaccgggccccgcttgacatcgatgtgctgccgcttcttgccctcctcctccttggtcatgctgctttccctctcttcttcctcctcctgctgctgctgttgttgcgcttccagttgttgttgttggaattggaatgtatctaaaaacagaataatttttattaacatttgtatatcaattattaattatgtaacaacaaatttatggtccccgaaaagtcattggttaattattttggattagaaataaatgcgacaaaaaaaacagaagcaaatactaaactaatttcattgagacaattaaaattatcagaccaaaacctcattaaccctccctcgccactcgctacaaaaaaaaataattaattattcatttattgaatgaatgtcagcaattctttgtcatttgcgactgaaattgcccattcgttcgatttttgtttgtatgggagaccgttcacagtgagtgaatttaaaaagagctaaaaaaattattgttatctattgggtggtaatctgcataatttcgttcgccttgaaaacaaaccgatggggcacaaaaattcaaaaacggactcttttatttgttgggattactttagagggggggggggggggggggagaatga

SEQ ID NO: 7538 - DNA, 4688 bp, Heterodera glycines
ggaattcttcttgttccagctgtttcgagacttgtttcctttgggttagcaagcccaaagcattcgtgtggcttcgcgattcttgttctcgaacgccctatgttgggaaatgctttttcaatgtcagcaaggatgtcttttttccatgcgtctgaaccgaaggagaatgccgatcaggtctttcaaaagtagcgggcctgtgtgcaggcattcgttgagtgtggggggggggggggagaaggaataaacaaaaggaccttggtttggagagagggaccacttacattgacaacaatgacactttttctcacaagcaatttaattttcttcctatttttttgaatgatccgacagtaggccgatatgccggatttttttttgaatatttaggtaaatagagttaatcctgaagtaaaacatgcatttggagttagatggtgcagaagaacaaacacgttacagtatattttcgtactcgttcaaatgctcaattttgtttctttctgtgctgcgttctttagacgcgcaacagaaaatgagaactgagggggggggggggaagagatgggaagagggcgatagaagaaagtgagtgaagcagtcaatgaaaatgagcaaagtaaattatttaaatggaatcaatcaaaatcttatgcattttagcgtggatttaccaaacaaacaaaaagagaggggaaaaggaggaaaaggggggaccacccacacaaaaaaacaagggaaaagtgaatgcatttgagggcgttaaatttgtgtgtgcaaagggtacggtcgaggcgagggagggaggcccgcccaaaaaacacgacggacgcttcattcatttgcaaagggtgccaacattcaaaatgcgattggttggcttattttcactcctactaaaacacattttccggaaattattgaattttgttgtgatttgttaaatatttcacaaatttttggttaagaaattggcaaattctttcgttcccccttccctcatttataatcgtctcttcttccttctccgctgttgatgatggcacgcaatgtttaaaagcagcagcaacagcagtgtgccaaaatgcggtcaacttttactcagatgacccgaaagcggcgatggcaatcgaaaaatggatgaaacatctgctgtcgttgctgctgcgccgttcgttgcattgaggggattgttaattgtaagtttacaaaaatattcttctcctcatcaacagatgcctccaggcccccggggattttaaaggaaaggaaagaatttttattaattttaaatgggtgacgattggatgactaacgatttaacttaaacaacgttgaataagggacataaggcgttaatataagcagccaccgtgacattagtgacaaacaaccaatcaatcgttaatacgaatgtgatgtggtgtggtggggttccttccattcggagcaagccaatgattccaacgcctccaacttttccaccacctctcgctttatcaataataaaaattaaattgtcctctgtgacattgttaatttcggattatccgtatataaattgtacgccatgaacaattggatgtcatagaattgctttagattggcaaaaatgagtctcaaaagcttggtgggataactcaaagcaccaaaccggccggaacaaaccgaagcaaaaacacttaagtgccaccctcactcattcagtttccaatacacaaaactccccccccccccaacacaaagccccttaatttggtaaaatggatagaagggggattgtccaaacaaacaaacaaaaattattccccttttcagttgacataagaaaatgcaaagacacctaccgtcatcctcatcagcatcctgctgcactaccacctgctgttgaacatcgacaacagcttcagcagcagcaacaacatcatccgaaccaccatcgccaccaccgttgtccatgtccaccatcggttgctgttgttggtcgcccatttccacctcctcttcctcctccaccgcttcgtccgcattgtccatgtgcggcggcgatgtgcgcggctcgtcacaaccgccggtggtgaccagttcgtccaagtcgcgctcatcaaaagcaagcggcgacacactctccgaacttttgacacgctccactgctgcgcgacgatcagcactcaatggcggcggcgtttgctggccatcggctgcagatgcaacgggagaagaagcggcacccggaacagcaacggtagcaacaccatcatcaccagaagtagagggatcttccggcggttgttgttgctcctcttcctcctgctccccaactccgtgcatttgaaccgtttccggtgtcagctgacggtgaccatgcgcaagtcgttgttgttgttgatgttccttcttcgtttccatggcacttaaaatggcaaaatttagttgtgagtggaaaaacgcgcacaaattgtgtgcctcaatgtatacagtaaaccccgggacagtagtaagtttgccatttgccaatgaaaaatatgttttctatgcggtgcgatgaatcacaccgaccgagaaagggaggataacaaaaaactttttgcttcactggacctaacgtgggaaaaacattaccattactatcacccaccacccatccgttccccctgccctcacgacgcatttatgtcatcatgccaactaaaggtggatgttcacaggtgagaaggaaatgacgctgaaacagtaactcagtcgatccctctagcagacatatttgcgtatgggagtggtcaagccgcccaccccccctcgaaccgcacatgcacagccgtattcttctgaacactccgtacggaggtcgacttgtgctggcgcttgaatgtagggctcacttctttttgtgcatctcaaagacaaacgtttgatccgacacaaaaagcgttggtcgcaagtgatgtacatgtactttttgctcgggcatcgaattatggactcacatttgagcgtataagacaaacaattgcaggtcttttgagcctaaattttgccctcgtggaatctgtgcaataattcaatgttcgcaccgatgcttaggctgacaacacatatattctcgccattgatggcgattccaaattcgaaccagcggcagtgattcgtcttttacatctgatgaacttgaaaagcgacgttggctgtgcgtgcggaagaatccatccgattggagaaggtgtgctatccttcccattaatggtgaatttcttaccattccccaggggtcatggtttggtaccaaaagttcgagtacgcaatcgcccattggttccaaaaggctgctgagcatgtgttcggctgtgttttgtgtgcccccggttgcttctctctgtttcgtgcttctgctctcatggatgacaatgtgatgcacaaatacaccaaaactgcctccgaaccacgacattttgttcaatacgaccaaggggaagaccgttggctttccactttgcttcttaagcaggtccaattgcctttcttttttcggaataataaccattttaagggttatcgggttgaatacgccgctgcttctgacgccgagacttatgcgcctgaagggtttgaggaatttttcaaccagagacggaggtggacgccttcttccatcgcaaatacgctcgatcttttagcggattacaaagttttggatgccattgactttttcatcattatttttagcttgcatcaagcaacaatgccagcatctctcggctgtacattctctatcaaatggtcgtcatcgttttctctttgcttggacctgccatcattttcactatgcttgtctatgcacaggttattatatgacaaattctatttaattgctacaaattaatgctcgagcgtatgaccggtggtttttcaggtggcggcctttgccgttgattcgacgagagtgctcttctacaatgcagttccggtgtgcggcttcatcttctgctgcttcaccatggattcgtccgtacagcttacctacgccaaaattgcttccgtcatttacgccttcataatgctggccgtccttatcgccaccacaaaccaaatcgtattggagacagtcttttcgcccacctccatgttcgtgttgggcatggtgctgatcttctcctttgcctcctgcatccacccgaaggaattcgccaacattatttatggttcgatcttcttcctgatgatcccttccacttatgtcttcctctcgctgtactcattgatcaatttgaacgtgattaattggggcactcgtgaagccgtagcaaaagcgacagggcaggcgacgttcagggagaatatagccgagagagtgctgcggcgagtggctaatctcaacgacgacaattccttcttgacgcgctttcttacgagagttcgcagtggtgaagaaccgagcgaaaaaatacggacacttgaaaggaaattcgaacgcactgaacgattgttgatgagcatgaaggcatttatggggtgatgggagttggatagtttaaacatttaggaaatgactgaaaaggcaagaggagaatccgatgccatgcaaatgggcggacagcatttttgcatgatggatgtggtgcttaatgaagagggtgaacaggaattgcctttacgatctggatacgaggtgactaatgtgttcatcatta

SEQ ID NO: 7539 - DNA, 1095 bp, Heterodera glycines
  unsure (1)..(1095): unsure at all n locations
tggtcaattaaatgtttgcttgtactttaccttcatcgctcaggctgttgccattcgtcggctggacacttttgaacggcgtgccattgttactgacccatgcaaacgatccctttggatggactgtgaataccttcagtgttgcgatcgtgggaagttgagacttggggaagagactttttgggacgaattgatcgacaaatatttgaaggtgggcttttgggtcaaatgcaaattgtttcttttttgttcaatggcttttctttagccagtcgagaccaccacccgagaacaggcgcaagtcgcgaatggactcgtcgcattgcgaaaccgaattgcattttccatcattttgctcaattgtttgcttgtgctggcaattttccttctccaacgacacaaagatgttctgtccgtcaaattcactccttatggtgggcattgttagctctttttcacttcctttattttaaagatggatttaaatggacgaaaatgaatgaaacgaccgggaaatttgaagacacgactgaggccctgaaagttgacccgttgggtatcggaataatcttttttctgatgggaattctcattgtgagacctttttcaattgaattcactaattaattggaaaaggttcaaaccattggcatgctcatccatcgtctaaacactctcgtggaagcactgcacgaactgagtgagatgaaagacgtacaatacaacaccttcacatttactgaccacatcaaagtgctcaatgaaggtggcttttcatcatgtgccatttgcatttgtgtctacttttctaattgagctcgtcaaatgattgacaccgttaattacgaccgcgcccacggggctgatgggtacactcgccacggacttggggaccaaaaagtgcaaaagaatgtgctttacaaactccaaaagtgacaaaacaatcttttatatttaagtattttgccttgtttttcatcttttcatcagctaatcgatgtttgttatatattcatgacatttaattgacaattatttgcagtaataagaaaatttcttggttcatttgtgaaggaaagcggatncctaaccaat

SEQ ID NO: 7540 - DNA, 4973 bp, Heterodera glycines
aattccttcgtcgccacttgggcttcatcctgtatttcaaagattttttgacgcatcgtcaaaagtccattcaaggcattgcgcacttctttcgaatttttgttcacttcttcaatctcgcgcatcttctcatcccaacgattgttcgtgaacaattcgcctttgtttggcgatccctctctcaatcgtttacgaccattttgtctttcctttggcatgtccaacagtgccggcggctctaactcatttttggcctttatctttgcttcatttcgggactttgtcaattcctcaagttcccggcgtgaattcgctcgcacccccgcgctttcaaaaaaagacgtccccgtctcaaataccttcgctgcttcataaggagagtcttcttcttcatctcctaaggacaacacatcttccaccgtacttttctctttctccatttttgtttgcacaatgccatcctcatcagtttttcggtcttttgcttccggttcggctttttttgcctcaggttcttttttttcacataattctccacttttttcttctttttccgccgttcctttttggtctaccgtatcctttaccgtctgttgcttcagttgctcaatgcatttttcttctcttgccttcacatggcactcctccggttgttcttgggccaatgtttgcctcactttgttcagctgttcctgcagacgtctttccaatcgtctcagcgattcctcttcgtcatcagtcaaggattcgaagtgtaatggagccggtgatgtcattcggtccaattccttgaaaaacgaatggctcgcatattttttattttgtgttttattcgatttatttagccgccctttctcattcaactgttcgttttccattctccctaaaatttctagagaattattcatatttctctccctttctccggcattttccactaattcttcatttccttcatcttcatcaatttcgtttgaaaaatccaataaacttttaaacggttttacataatttatcacattaatgtctgttcttgaaaaatcatttacttcctctaaatcatcctgatcacttatcattccttctgaatctcgagagttacaaagtttggcccatacccaatttccaaattttccttttctgaaaaaaggatttcaggaattctgggaatttcaaattcgtgcccattttcatcgaagtagatttcccaatatgtctcaatttcattttcagtttttattcgccatctttcacccaacaacatttgcgcatcaattcccaacattatttgatcaaattcgttgacaatgaaaatttcgaaactttcgccaaaaatccatgccataacaaatcttgagccatttccattaacataaatttcccaattttcccttactaggttttcaggtatgcttgagattaatgagattgttacggggtctctccatccggtgtatacttcagtaaatgaaccctcaataaggacttcgagtattgtgaaaattggcattatttcgatttcggggtttctgtccattataacttccgggccttcatcatcctcagaattttggttttctcttacaaacgcaacaatattccaatcattctcatcgtcagaactctcaaagccatattttgaaacttttaatcccattttgttttttgactgcgcattttcattgtcttgcgtttcctcacagtcactttcgcaactttcaccttcaatttcttcctgttctaaattcggatcatctacgtacttttcccaatttaatggttcatctgactgccttagaggaagaattgccggtccattaaaatgtttcactttttcttggtgtacttttcttaatttggctcttccatcaattgactgtaaaatgacatttttcttttctttttcaacgcctacacaacgcattggtcccagccaacgctgatcaaatttatggcttaaaacttcttttttaaacaacactaaatcaccgatttcaaattctctttcattcgctttccttatgcgatcattctcttctttgttcctttcctgcgcttttaaaatttcatttcgcacaatttcccacgctttagctgctttttcagtctgaattcttgtatagaccgaaatatcggacacaagctcatcgggggatgggagtttaagtaaccgatcagttggcaattttggctgtcgtaaattaatgataaaaaatggcgaaaattttgtagctgaatgtattgaaacattgtatgaaaaaatagcgtgcggcagaatttcatcccaattattccctttttcattgaccatttgagaaataatattagccatgattcgcatagccccttcagccattccattagactgctgatgatatggtgttgtagtgacatgctcaaaaccgtatatttttgccaaatcattaaaaattcccgaagtgaactgtcttccctgatcagtcacaacaatctcaggagttgaatgttgatggaccaccatttcaacaaaattttctgatacagtattcgctttctgatccgggattgctttggccataacccattttgaaaaactatcaatcgccaagaaaatatacaagtttcctctttcagttttctttaaaggacccattaaatcgcaatgaattctttgaaatgggccatttgatggttcgattgggacactcggagccgatttggcctgccctggctgaattttcctcacttggcacttttcacacgcctcaattagcagtttaacatcgtctttcattccgatccaataaaatcgttctttaatttcgtgccaagttttttcgaatccaaaatggccctctgaatggaaaataagaaaaagtttttgtcttaaagaatgagggattattaatttaggtttctccatgttttctttgccttttacgaaataaatggctccatttatcaagctataatcagaaacaactcttttccatttcagaacatcacttggacactttccggtttttaaaatgtagaaaattttggccaattcctttacctttgtttgtgcctcaatcactgtttttaaggttattctcggattttcattcaaaatttcatcatttttggcaatcaaattttcattaatattatccgtgattacttttgtaaccccagacccaactatatatggcgagaattccttaaccgcatacactaatgccaatgcttccctttcaatttaagggtaatttgtttcgtgccgatttaatgctcttgaaatgtaagcaacgggcccattctcctggaggagaactgctccaatggccttttttgaagcatcacactcaattgtgaatgtcctcccgaatcttggggactgtagcactggtactgttgtgagcatttgttttagagtttgaaaagcatgttcctgctctgggcctaaatccttgctgtaaatccatgcacgtgtaaaatttctttgcccccatcagatctaacaactcttgaatgtttggcaagtgaaatactctcttttttgtcattttattcagtgttctgtagtcaatcgcaaaacgccacgactttttatcagccttagggaccatcactatagggctagcaaactcagattccgattcccttattatattctggtccagcatcattttgatttgcctttcgatttctttctgagtctccggtgggtaccgatatggccgacaatgaaatggtaacgaaccaggaattaggtcaattttatgcacaattggtccgttatatttgccaatttttccatcatcccctacaaaagcttctgaacactcatccacaattttctttaaatcatttttcgcattttcacttaattttgtaccctcaagattgattctttttgatggtggcctatttagtccgttttccggtaattttggtaaattttcgctccatcgtgtctcgggaggaatgtaatcttttgctgggatttcatctcctggtgatgcattaatttgaaccgattccaaatctgccaaatgtgactttccatataatttaaccgctgaatttcccgcatttaaaatttgtattgttacattcttactatttcctggtgaaaccaaagttcgtccaacaattattccgggatatttaagcttaattcctttcaccaaaaaattttgttccattggaaaacattcgtttacttttgccgaaagtatattttccgaccttggctctaaaacttccgtattttcaagtatcacagacggtggttttggcttttcagacccaattactgacacaatgtttgtccactcatcaccaagtctaactcttttctctcccagggaaattacaccttttaattccataagaagtggtaatccaataagcaaagggccgggacaatgttcgtccactgagacaagcaatacaacttcccattctccgacatttccagtcacattatcctcaattcgaagttttgccatagttttccccaaaatttctatgctcgaatcgtttgccgcagtcaaatttccttttccgtcattttgctccaaaattttaagtcctgcttttcttgctgttctttctctacagtaggatacactagcacatgaatcaaccaaggctgctgttaacaaatcattaagacggacactaatggatgggagtctcctcgggtcattcgtaatcgctgcaacccgtctcggaggaagataatccagaacataagcttcttcatcgatttaatccaattctggtgcggttggtaccgccaaaacccgagtacttcgtttttttgttcccatgattgctcttaacactcttgccaatactgacccagcacgaaccccggcaaatattatcagtctgtatttaattccaatgtaacccatcaatgccaaaagaattaataatggtatcgcaatcagtacatatgatatgcctttcaaataacttattgcttccttggttttctccgg

SEQ ID NO: 7541 - DNA, 688 bp, Heterodera glycines
atatatatacacttattttatttagcataagactcttattattataaaaaaatattaattttaatttcatttcttttgatattatattagccctttcgctaattcattcaaaaatattattaacgaaattgaagagattttaagaaagttttcccataaaaaatcccacggccttttctgctattggtttgtttgcctcttttcccactaattaacttgtggatattaaacctgggtgatagctcggctttttggggaataactccttttgtaattgtaattgctcttattggctattaaccaatattctctattaggctaggtccatttcaaaaaaatttccctaactttcaaaaacacgggcaaaaatttttttttaaatgtttcataaacattttgcaaatatttttgaattttcaaattttggaagcaaatagaggaaacttttggcgttcgaatgctatcaaatccgttcaattcaattcgtaccacactatgaaaggtgatttcccaaacaaaagccaggggctgtcgtcgcccagcagcagtttgttcatttccgcaaatggacacttcgtccgtctcatgacttttttcttcccccggctttcgtgcgatgtccacttaatccctctccccccccccccccccttttccccgtcaatttgtgtgaaaaagtattttccaa

SEQ ID NO: 7542 - DNA, 3480 bp, Heterodera glycines
  unsure (1)..(3480): unsure at all n locations
tctctctctctctctttctctctctctctttccctcctctctctctctctctttctctctctttctctccctcctctctctctctctctctttctctctctctccctcctctctctctccctcctctctctctctctctctatctctctctctctctccctcctctctctctctctctctttctctctctctctctctttctctctctctctctttctctctctctccctcctctctctctctctctcttttctctctctctctctcttttctctctctctctctctacctctctctctctctttctctctctctccctcctctctctctctctctctctctttctctctctctctctctctttctctctctctctctcttttctctctctctctctctctacctctttctctctctttctctctctctccctcctctctctctctctctccctcctctctctctctctctctctctctttctctctctctctctcttttctctctctctctctcttttctctctctctctctccctcctctctctctctctcttttctctctctctctctctttgtcaataatttgtgtgtcaattgggctgtgtgctttgcgtgcggcggaaagaataaagggagaagaaaggggccgggagtttttcttagaaacaaccaaattcaacttgttcggcataatttgataaccctaattgccctctattagcatgcaaaatttcaaaaaattcattcagttttgaaaaagttattaaatagctgttttcctaaaatttttggccattagttttttgaacattaatgaagttttgcaggcgaactgaggacaacacctagggctattgaataatgatgccagaatgtttaatttggttgttgtaaagcgtaaaagtgccacgcactaaaattgtccggttcgaaaataaattgaatgaaataaatcaattttgaaaaaaatttatttgcggagtgaataggaaaagaataagaaaaacttcctctttgccttctaatgttctgctgactgccgttgtgtgaaatttgtgccaacggcacacggcacgggacgacggcatttgcgagccaaaattttatctttccacaacggcactcactcacaccatttacataatgcatgcatgtgtgcttagtagaaagggaatttgattaacgggtaaattggcatccctgtgcttgtgctcgagagtatcggtctcggttcttgagaaagtctcgagtttttttttgggttccccaatctctcgtcttgggttcatgagtcttggtgtttgttgtcgactctcgtgaaattttcgtttcacaaatatcacaaaatttatgtaaaatgtaattaaaaaattcaagaatttgttctttagagaaaaatagtatgtgtgctctaatgatataatgagatagtgacactttcttggagggcaattagcctaattatataattatttacctaattatgtaagatgatacaaatcgatttggcctataatgcttttgctgatgagtgatggatgggtgtgactttatgagaaaatgatgatgatgataatcggttttttgcgcttctgttgttgctactgtttttcccaccaccgagaacctcaaaaagcagccaaatgcacggcagcattagcatcaccatcatatcacatcataagcttcatcattagtcattcattagctttacataattcgattagtgttgcttgttaagtatttaaaaaaaacatttttaaaaaattctaaaaataaatatgggattccaggaaattttttattttttacagagttgtgaaggcaaataattacaggaattataaagcattttctggttttatggacgaagccaaacttcatctatctcacaaatcaggtccttgagttaataacctaaaaaaacatttttagacaaaaaaatcataatatttttttactgaaaataattaaaatcattcatttaaaatttggtaaagtctctcagaaattaaaaaaataaataaaacaaaaagcgcccttaggccaaaaatttcaattttcgagccctgtaactcccaagaaattgtgcccgtatattaaaaattcacaaaacgaatcgaccctgctctatccaatggcaaataacacatatgcatttccgagtagcgaggttcctttgttagtcccgggtgagtctcgactatttacagtgattctcgactatttacagtgattctcgactatttacagtgattctcgactatttacagtgattctcgactatttacagtgattctcgactatttaaactgagtaaaaaagtcgatggatttatggggaggagggaatggaatcggtcaatgtttaggaggggcgtaccccacggatttaaattttacaaaatgattgcttgcatattttgtagcgcaattatcatgaaattcatacactcccccccccccctcattattaaaatgaccaccgttccgttcagcatcattagcagtccgtcacaacaccaaaatttgttttgtgtgataaggaaaacgataagaaaatgtgaatgtaacagcggcagcagcgggggaattaattgtcaacgtaaaaataaaaataaacaataattattaattaactaataaagagagagagagcgagagagagggaaagaaaggagtagggaaagggagagagaaagaaagagaggaaaacagagagtgcgagaaagggtaattaggaaaagcaattttacagagttgcccaaacgcttgtcccgatttaaaaaaagatatacgtttgaatcagaaaaatgtttttgtcttaacgactgggaaaattaacaaaataaaaacatttactcaaaaatttcctcattttcgagtgaaattttatttaattaaaaagatttctatttaattaatttcaattaattaattaattcctcggttttattcgtgaaatacttaaataaaattttaaatatttgattaaaacatttattaaagtcgattggaatgaaaaagcaaaatgcaaagaatcctactacttttaaataggcaattaattaattactgcccattttatttgtggaaaagaggaaagctatttcaatggcaactgcttttgcttttctcattagcaaaagcagagaataaattattccgagctcagagaccggcggcgggcgggggcccattagtgtgagagtgaaaatggcgatttatccgcctatttccagcagccacgcacgacccgttactgcttaattgctttaattacgggtcgacagggacatttcaacgccgccattttggcaccgaacccatttaatacaccacaccctttttctaagtggcttaacctagacaattaatattagtttgaaaatcaaaatgtttagaattggcaattaaaatctagaagaatctatgaaattatgnacagggcggtgccacaggggccattgccgggcattt

SEQ ID NO: 7543 - DNA, 960 bp, Heterodera glycines
agcgaaaagagaaaacaaaatgcacagaaatccctttttcttactaacaacagaagcagcacaaattagtgttgacagctgaagttgttttggtgttcattagccagcaaatttgtgttacttgttcgagaaaagagtgccaaagtttttttttttgcattggccagacaaaatccccggcggggaaaggaacaaaaaaatgtgacggggacagggagaaagtgtcagtcgtccgccaacgtcggtgaattgtgctctaattgctgtcggacagcagcgccagtggaatttttgttgttcccccgccccccaccctccggcggtggcgttggattgattatgttttacatttttctggtggtgggctggtgcaatagagagaaattgtgagagaaattgtgtagtgaaagtacatagattatgtaggagaagataattgggcatttgcaaaaaatttaaaaaaatgtcggttgtatgtaagtttacggtcgtaaaaaatgttttttacttgaaaagaagtcaaaaagaattcaattcgacgctgatgcaaaaaatttaaaatgtttctaaatgctggttatacaaaagataattatgttttttaacttcctttaatagttttgacagtttttaaattttttagaccatttttattagaatattatttaattttctcttaaccaagggcttaaccctgctacgagttgtggttaaaattacaagggaaaaattaaaccgcggttaaccaagggaaaacgcgaataccaaaaaatgaaaatacgtggtttagaggcgttaaccgcggttaagcggccccttaaccgcggttaaataaaccgtggttaagcgttaaccatggttaaaaaagggaagacgagaatcgcggtttaatttcttaaccatggtttacttattttaaccgcggttaagaaattaaccgcagacggggataaggcccct

SEQ ID NO: 7544 - DNA, 1475 bp, Heterodera glycines
tcaaaaaagttttaaaaatggtcgggtgaatcgtaggatcaacgccgtcatcatcatgataatcttaaagtaagtataagcttaggccgaatctttaggctttggcttcacatttagctggggttgaagtggatgcattttcacatatcatttccattttttatctattttatttaatcaagaatctcaattaaatagtggcaaaaattccgaaatagtggcgaaaatggcaaaatagtcgcaaaacgccaaaagtgtgggtttctgaaaaaatgagagaaaaaacagctcatttttcattaaaaaatgaagatagttttaattgagatcctaataatgaatttatagagaagaattttaagtaaaaaaaataattttatttttatattaattttttaattatttcaatggcgaaaagtacaaaacagtgatccctattgacgattagtggcgctagaattaattgtgtttctaagataaaaatacgtgtttttttttgtgctttctgatcgaaaattaaattgtagatacaaatttattcatttttttgaacaaatgaatcctccgaatttacttttgttcgttttgttcattttttctttccaaattcattttgcccattcggatgacaatgtaatttgcggaattgcaagtaatcaagtgttaacatttaaataccaatcgaggaaagaaccaaaggaaatggaaatcaaaatttcattatatgcaaagaaatctggtgtaattttttctaaaacttaacttagaaaccaactaatttcaggaagggtcgggtcaattaagtaattggcagatgcatttaagtgattgatccttttcaattaaattacatttaattgaggaaaacaactcacaaatagtggaaaattctgcgaaatttatctttcaatttcttaagtaatcttttagaattaattatgcttttttaagactgtgatttttgatggttttatcaccgaaagtgataatttgagcaagaaacaatgtgttgtcatcaaaatgtatcgcaaatcagatgaaaagttttataaaaatagcgtaaatttgtggaaaaaattgaaaaaagttgatcagaaaaatgaatactttgtcaacataattgactagtaaattagaattagtttaaatcttaaaaaatattttaagaaaaaaaattataaatatatatatttaattttttgttgaaaaatgtaatggccaactttttttagtggcgaatttgacgaatcaagcaagcactaatgtgactttttttaaaaacatcatgcggtaaaaattaaaaaaaattataaattactcataggcttaaattatcacttatatatttttagcggattatttgatgaatccccccccctaaaaaggcgaatataaagcaaatccgccgtttgttgtgccgggaaaatgcacaaatcacaaatttgtaaaaaaaaatctgttggtaatttaggtta

SEQ ID NO: 7545 - DNA, 2507 bp, Heterodera glycines
  unsure (1)..(2507): unsure at all n locations
cgaagccttaatttactcaattaaatgcgatcacaaatacacgaaaataaagaaggcggcttacgttggtaagatgacgaatgttgaatttctgaaaatgaatatttttaagaaattttttttactattaaatttttgttttaattaagtgcataattttattttaaaaataagagacggcacaattgacattttgtcaaaaaaaatcgatcgagtaatttccctttttcggttttttcgatatcgatcatttcaaaatttgtcgaatcatttggcaattgtttgataaataaagtgattgcccattgtccatgagataaaaacaaacaaaaatatttatacaataattcaatttatttatttaaaaccacacctcatttttactgaaaaatgaggagagaatgaaggcagtaattgtgcttccgatcagtgcggtgtaagtgttgacaatggcacggtttcgcgcatccacgccaaaggcatttgtggcattgaatgatggccaaaacacccacaaaaagccggttgctaaatcaaacaaccgataatgtgtgctaattcaactagtataagaggtcgagtctgacattcttggtactgaaaccggcttataataaaatgtgctaattgccccttaattaacttgttgattagctaactcaactcaccaataaatgtcaaaatgtcagagtggtaaacactgccaaaatgttcactttcacgccaattcttgttgtacagaatgcgtccagcaacaaggccgaaaacagcaccgaacacatgaatcaccattgagctttaataattaaaaatataaaagtaaattatttaaaaatacaatttcaaaaaagtgagatttttgaaattatttaaaattttccaacaaattaattttaaataccctccaatgtcctggactcccaacatcttcacaaggatgtactcgttgaaaatcttaattcgattttaatgatattttcaaattatcatttttattatttaaaattcaccgaaaatggcgcttcaatcagtgccatcaacaaatattgcattggcgacaatttgccgcacagggcaccgtatgaaatcagcacaaccgcagccgtataatcagcatttatcatactgtaaattgagtgtttttcaattaaaagcaattcaattatttggatgggaaataatattaattacttctgcaaattgacgtaaaatttgccattggtggcaaattcgtcggtgaggaagccgcggacaaggagctgtaaaaaggttttaattctagagaatttattaatttaaacttttttaaaattataaaatacacttattaaaatttttgatttgaaacaagttgtataataatctattttaattttaaatattttagtgaatgtgtttaataataaatattataataaattttaattaaaatgttttaattaaattttttagtttatatgtaaaaatcaaatttttaattaaaatattgtttttcttttaaaacaaaataataatttttttaatgtttatttattctaccgataattccaatgtgaacgaagtcagcatcattgagatggtgaacgatgcgaagccgtagcggcgcaaaaaagcgaccaaaaacccaaatccgatgatcaaagtgccgtgcacatcttggaaatctgaaaaactacgctttcaactctattttttaatttaaatattatttatttattatttttgcctgtgtattttcgctgtgcctccgctgcggccacattgccaaggggaattgcggacggcatggcattgggctcatgttgggagaacagcccgaacaagaccaggaagaacagttgagcaatgcccaacagcacacagaattggttgtgtggcaatttaacggttgcctgaaaaagttataaaaataaaatttccgtcgaaatagtttttttttcaataatattttttatttttcagggtaccataaggagaaggaccagcaaaaagatggccggagagacgagaatcaaagcctctgtcaaatattgtgaaaatgtagcattcattttctctttttttttgctaaaattagtttaaggaagaaaattgaatttttttttttttgaaaatccgatttttctaaaaaatgtttcatatacagtaataatggcactatttatgctaaataaacatcaattttcgtgctaactaataaccaaaaactgcaggcctttattacaatatataagatatttttgagaaaatcatttcaaaaaagaaattgatgcaaaaaatttttttgcacatgactgtaaaagacggacaaatttgggtggtctcggattttttgggattttaaattttccacaagcgtacatatcattaatatgcattatcaaatatgcattccacggggtgtgaaaggattattacagcccgcataaggacattaaaancaagtttgggttggaagtaggctcagaatatgtaaatttagtgacaattctggttttgcaacagct

SEQ ID NO: 7546 - DNA, 1558 bp, Heterodera glycines
  unsure (1)..(1558): unsure at all n locations
agtaggctcagatngtgtaaatntagtgacaattctgggttttgcaacagctgccgattgtccgattacgcaaaatttgcattttcaattcgtataatatcagagataattaaaatagtttttaactatttaaaaaaagcggattaacaattttaaattatacaataaagttgttggaaatatgcttttttagaaaaagctcgacaaaattgagcaaaatcatagtcatagataaagaagaaatttaaaaatattttttagaccataaaaaacaaattaaatttccttaactctgcctcgacttagggataagaatgctcaagaaaaattaaacccaggttaaacgagcatcaaaaatggaattaaacacgggttaaaaaatccgctaacaatgattaaaccgggtttttaacccaaagacgagcaacacaagcaaaaatgttaacccgggtttggtctccgtaacccgccgggtttaaaacaggcccctgattaacgcctaaaattaggctaaaaaagtgctttcctttgaccggataaatgacatttttattagagttaggcacaacataaaagtccaaaaatgaaaagactcgtaaactgaactgatttgtgagcccttaatggagggttcaattagaattcagagagcacacaacagcagagtggtgcactgttacatgtttccatttggccccatttttatttttggaaaagcaaagaaaaatagcgaaacattttgcggagagggggggggggggggggtgttatgcttcgcacaataataacaaacaacacaataaacacagatagaaagaccatcgggaggtgtgggctttgctacgcggaggtgattgactacctcgaccaactccctgaaaaaaaggtagcaagggaacaatgtgccagacggcgaggggacacttcgcttgggactcagaggggaaaatgacagagtgttttcgttttgtacaaaaggggtggtctattgtgtgcactcatatgctcgtgtaactgacgagaatgcgaacggtatcgcctcctgtaaaggaaggaaactactaactttatctctctaaaaatgatataagactgcagctttgcactcccgggggctgcacgaaatattggccggcacaaacaacgctgtagtctatttgacaaaaaatcgaagaattttgcatgagcagcttacagaagatttcgcgagatatagaatagaattgactaatgcatcataacagatcagagaaagcccggtaccgattttagaacggtatgcagagaaaaagagcgaaaaaaatattcaaaatattcgtaaaaacattgtttactattctaaacagcagccgaacatttggtcacctttagaagaagaccgaaaattatcagcaatcgttttattcgtaattaaaagagaaaatttttttagaacaaaatttttttcaaaataaaaaattttttttcaaggggtgcctaaagaataggcaacaataaacaattttttggtatggatttgtttttcaattaaaaatttggaaattaccttcaatacggg

SEQ ID NO: 7547 - DNA, 1614 bp, Heterodera glycines
  unsure (1)..(1614): unsure at all n locations
cccccccgataagacaaagtacggggaccaatgttctgctctgctgggtgttgttgtgctgtgtgaggaggagggaagaggttgatgtgtgctcatcggtggtgatggtggtggtggaaaatggtaaataaccctcgcgggcagttgggggggggggtttatgggacgcggcgggagggagaatgagtggccgaaaaagaacggccaactgagtcatttaggcgaccaactgagaaatcaaagtgctaaaagaacggccaactgagtcaccagaacggttttgtggtaaataaccctcgcgcgcagttgggtttatagtgcgtgggtgggccaaaaaagaacagacaatgagtcattttagaaaaaaagtatcgcgcgcagttggctttatgggacgcggcgggagaatgggccagaaaagaacgaataattgagtcatataacttttgtagtaaatatgtaacagacatcgttgaattgtcttttttggggggaagggttggccgagaacgagtggggccaaccgagagcgattttgatggtaaacaccagcgttggttgaatttatttatgcggaaaacatggtgggccacgaatggaacggccaactgagtcatatgtcagtttagcagccaaagtgagaaaaaggaaaatgggaggaggattcatttattctcaccaatgttgttgtaaacgggaaccggccacttcggcgcgggccatttcggcgccgattcaaataatttttttcattatcaaccaaattaaatatttttattatcattcgatagctcttaagattctctattagcctgcaaaatttcaaaaaatttcatctgtttacaaaaaaggtatggccaaaaaacctcaaaattgactttttcttggctttttcggcgccgcgtgccataacttttttattgttgaatcattaatttctattttggcatgtaaatatagagcacacatagagctttcaagtgatgccagaatggctaaagttgactgacaaataaaaaagttatagcatttcaaaatttgcggcgccgaaatggtccgcgccgaagtgaccccgacccgttgtaaacatattttttagcttctatttaattgataagaagaaattgtgaaaattttattgccgtttaaatgaatggatgggatggaaaacagcgattaaaacattaaaatgagtgtgcagtttagacataaaattaattaattttatttttttcatttatttttttagatatataattggacaaactgttttcaaatacaatacatgcatattgtcgttatagccagaattttgaatacatatacatatacctacaataatattaattttagaattattcaaatatttaatttatattacctttgatgtttatattatataaaaatttccacaaaatatatacaattaggcagacctaaaaatcaaccattcattcattgccaaaatgacctatgcattgtttcaaatacaagtgccacgctccttcacaaccaacacantttccttttgtttttgcattcaaattcagtccctttgngactcagttgttcactggngtctcggttgacccttccccctcccaccgctcaccc

SEQ ID NO: 7548 - DNA, 2059 bp, Heterodera glycines
  unsure (1)..(2059): unsure at all n locations
atgcaattaattattggcncgcgcagtgttctttcgacgcaaaaganaagcttcaaaaaaaactacaaagtgatcgaatgaggaaatgccaagtcaaaaatattgggcgggtcgagaaaacactgcgccggcnggatggcatcgattccatggcacggattccgacattaaccgcccagcagatccacaatgttcgctgtggctccctgctgttgttgcgggtccgtctccatgctaatggtactcctctgctgttctatcggttgctgttccgtccgttggcattttcccgtcgtttcgattgcttcgcatccgttggcattttgctgtgccgtagtcgtcgtcgccgtctgaatgagtcccatggcactcagttggggtgcccaaatcagatcttcggcctccgatgtcaaatagcgatggccaagccgtttctccagacagatcaaatcccaatatgtctgtgcgtccttcaaccatcggtggccaatgcattcgtcgatggtcagccgttcttcgatctgatcgaaggacaattgaaaatttaataattttgaaaaggattggctttttgataaacccggggcttcactgattaaccgacttggactctgagcagtcgttggatcaaatccacagcatcggcactgatctgaaaccaaaaaatgagaaaattgttttttatgttttgtacattttgccaaggcgccgctgggaacatgaactcggcattttgaatttgttcagcaatttcttcgttcctttgacggaatgttttttttcaacttggcacatcgttgggccaaatggcacaactcactcattgaaaggaaatgtgccggaaagtgtcacataaatgatcacacccactgaccacatgtccaacgatttgttataccctgaatttaggtaatttcaaatcatcttttcgctctgatcagtgatcagacaatggcattgtgttttgtctcaccctttttcttgagcacttccggggccaaataggcgggagtgccgacaattgtctttcggaattgcgtctcgccaatgaaacgggcgtagccaaaatcgcacagtttcgtctggggaaagttggaatggaagtcggaaaggagcacattttctgttcaagttaaaggcattatgttttcgactttttaataaaaatttgcaattttcaaaaaaatattaattcgcattaaaacccaatttttgggatagaaaccctaattaaacctaatatcaaattaatcaatcgaaagaaacaattcgtctctattccgctcactctgtcgtccaattgtcctcagaattttatccgaattttacccggtttcaaatcgcagtgggcgattccgcgatagtgcaaatagtgaagggcgctcagaatttgcataatcaaaaatttggtgctccgttcgttcagccgtcccatggcctaagaatgaatttggaataggtaaaatatgccacaaaataaagatatttgtagaaatgtataaactaaattattatttttaaatgaatcggagcaaaaatcaaattaaaaatatattttaatgcccaatttcggatgcttttttttttgttttgctttacctggccaaggatcatctccaacatgttgccgtccatcttctccatgaccacaaatgtcttgtcgtcggtctcgaacatggagtccaacttgatgatgccctggtggtccaccgcctgcagaatggccatttcattatttgaaaagttacaaaactcaaaatcgcaaaacttggacaattttaggacaaaatctgtaaaagttctgggtttctcatcccaaaatctgattttctgagcccaatgttgtggttttggattatcggttacaatacgttcactcaccccgcaaaaaattttccaaacctattttcagtaatttctcaaaaaatttctagggttagaaaattaaaaaaaaattttccgggggaggatggtgaggtggggaagagttgctcattttttaccaaccttcaccgtcactgctctgcccgactgtcgctgcactccgccgtacaccgtc

SEQ ID NO: 7549 - DNA, 3473 bp, Heterodera glycines
  unsure (1)..(3473): unsure at all n locations
gtatttgtgccgagagagccaaccaaagctcccaaattttctncaacacaaaaagtcaggcccgaggaggtgcgaatttcaaatgcatgaggagcaaatctatgcgatgggaaaagggatttaccaataatggcaaaattcggatagaaaaagcgaaaatggcattaccaaaaaattggcattaaaaatcgaaaatatttttattatttaaaattatggaataaaaaaggaatatatttaaatggaagaaatgctatgctgaccagcacagtttgtcgttgtgattgatgtaatgtttgacctacttcggatcaatcggaagtccttcatagggaatcaaagcgacgatttcagccaaatgaatgtgacggaacacgcgggaagtgttaacacctgaaaaagggggacacgcgtcgatcagtgagtgatcagcagtcaccgactgatcagtcaatttttttgttcggtgccgcccaattagaaaaaggataaatcaatatttggtaacaattgattcgtcgacaattctcccaggcgggtcggtcaaaactgcgatcagagttttgtgaaacacccaccgtcgttgtattcgttgtacaaactgatcactccgttggccaacacccaatagtgccggagacgccgtcgctccttttcttgcagcagaaaatggatcagccatccttcgcacaacggttggccagcagcggcgtgccgcaccgaacgtgaagacgcggaccctgaaagggggagggaggtacggtaggcattgcattggtaccgtaatttccacaaaacccagtaaatgccatccttccttttgctgcttattgttgcccctttctcacctggcaacctggccaatgggatcatcgcgtccaacgacgggttagccacttccattgcctgctgttggctgtgtcttttgtgttccgttgccccgccattgtcctgctggaagacgccaaatgacgcactctgatcagtgccgcccattggcaaattcggctgatcagtggaaaatgtcaatggattttcggcattcatttgacagtttggcggcaacaaatggacacactttttgtgcacattcacctgttaattgataatatggaaaattgtgacattctttgattgaaattgagaagggtttttttcaaattaaatcaagccgaaagcctcggattttcattgcaaatccaaaacttttcttatctgatttcattataatccacaaaattttaagcacatactcggcaatccttgcagcgtaagccttgcttgaacacgcccatcaacagtttgtcgcacactttgcacaccgttggcgttctgtaattgtgtggccacagagagtgcggcagttggaagtacggctgctgcttctgctgctgatgggaatggagctgttgtgactcagtcgtaccttaaaagggattccgatgatttgtttaaataaattgcatttcttaatgttcagtgagtcgtttttcgcttacttcccacaatgctcggcacgggaaactgtccggcaccggccaaaaaggtggtcggcacagtctctgacttggcacaattgttgcgcggggctaaggcgcactttttgtggaagttgcacctgtgaaaattcagcagctggtcaaaagtggtgaaaatctcaagcgcgattgaatattattgtaacctttattacgcgattaaatttttgctgaaaatgctaaaactgatcaggagataaatacgatcagttgaaagagatcggcactgttaaccccgacgcacttgcacagtcgacattgcactccctgcttgaccagcccgatcagcatctcgccgcaatagtcgcaaaaggtcggtgtcacgaaagtgttcacctgcagcaagtgcggtttggtcggcttttcgctccgatcaatccgaatgatttccaccacacttccattgtcctaaacaattaaatttctcaaattggtcataattgtgccgttctcggctatttaccgaccaattgtgccaacgatgttaggcaggtcagcatgttgaagcttttgtagtcgtgcagaaacagctgcacctcgctggctgtgacctgcgcggaagtgcccgtcggatggcctccgttagacgaaatagacgactcaagttgcaactgtttttcgaccatttgtcgcgctttctgtctgaaaagtgattttgtttaattaccccaattagtctcgttcgttcgacctgaacagctcaaaggcgcccatatcagctgtcctctcgacgattagcaactctttcattggtccatactgaagtgcgattgtgatcacttgctgttgctgctgctgttgttgttccttaatgaaaagaggatttggactgatcatttctgcgttagatatttttcagtcgatcatcgactgatataatatgacgttggacagagatattccccagtctaccattcatattgattgatcacagccattcctttatattgattgatcgggtctcattgcccattcaaataggcaatcactgtccctttcccctttatcgattgatcaattccccgcacccaaaatttgtcgggaaaatgctgctgctgaaaagcattactgctcgaattgttgttgatggtgctgttgctgcaattgttgtcattgctgttggctccgccattgttttcgttggggttctgttggagcggtgcaattatcaaattctgattggtgtggttgttggccaacgcagtgggccaaaactcggcactgtttagcagaaaactgccgcccccaccgtttttagccgccatttgcgcctgctggggattcggttgtgccgggaacatcgaattgggaagcatttggcaaaatgccaacaaagcgaccggacaaatcgccttcgcttacaaattaacttttggaaaaggggcaattaaaaatcaaattttaaaacattttaaacgaaaaaagcacccaaaatcaaaggataactgaaatgaataactgtgatcaacaacaaataatcggcgttaactttatgctcaaatcgattgagtctcacgcaaaagaaaagaatcattcattcttcggcgggtgcgcattgatttggtcaaattggtttgagtcgcacaaaacatttgtcgaagaaagtgctgcagggcacagccaaaacacacaatgccaacccaaaggcaattaatcaattaattaccgaaaaagacagggcaaatgcaaatcaatgggcgggggggagggggatcattgcgcagccgaagtgttgggatcggaggagagtgcgcaaaacctgttcatcctccagcagcaacacgacagcaccatcggtgagagagagtgggcgaaattgaaaattcggaggagcatataaaaagggagggggggggggggcggatgaatcagcccaattcgaaaggggcgggggagggatatgaacagcaaagcaaagcaaatgcatcacaaaat

SEQ ID NO: 7550 - DNA, 1221 bp, Heterodera glycines
  unsure (1)..(1221): unsure at all n locations
atttaaaatgattttcatttaattttntggttcatcggtttattttgaaatttgtcatcctcaacccaattacacgttgagaccacgaaaatataccccctaatcggcaccgcatcgaaaatttcaaattttcgccgatttttcatattctttaaaaaggcatatttttcagaacgtttcccattttaggtttaaaaaatttttcattggggggaaggaatactcgagcccaattcatagccggaaaatgtcttataggttttgatttcgtgtcttttgtccatttttgctctgttttgtctctcttcgctgtccttactcgttcaggctgatgatctcgcgcaactgttgcggcggccgcagcatcaaatccacgttcagttttgtgtgcaaaaagctttggcgtggagtttctgcactttcttcaacagcgccgctcgctttgtcccaattattttccgaacccaccaatagaaaacgaatggtgttgtcaaagtccatgcgtaccaatgccaacgcagtctctgagcacatacaaaattttggagtcaatttcaaaaaaaaatttactgtgagcaaatgtaacgcagcgattttagcagcgccaagtaggtgttcgagctgatgtttgacggctggaaaacagtaacaagtttcaatttaaatatttattaattttttaactaaagcagcgatttgatctgaacattttcaatatcaggacatcaggcccaaaaaaatcaaattttggcatactttttgctctgttttgtctctcttctctgtccttactcgtccaggctgatgatatcgcgcaactgttgcggcggcgcagcatcaaatccacgttcagttttgtgtgcaaaaagctttggcgtgcttgaagttatttttacaatttactggatcaaaaatatatttatatataattttttcaccacactttatcgattataacaattttggggagaaattagcaaatcataaattttaatgcatttgggatcaaaaaaccagatttttaaatgaccaaattttgcctcaaatcttatattttcttgagaaaacattaacattctgccataaaattttaaaattattaatttatttaagaaaccagaacaatttttggtcgctacctccaactcaggacaaatgtgacaaattaggacaaatctcatccctaactaatttttcatattttttaaatcttgacatttt

SEQ ID NO: 7551 - DNA, 2854 bp, Heterodera glycines
tttccatttacatattttcccactttaaattttcaggttttttccatcattgttacttaattgccttaaaatttggtgccgcagccaaatcggtagcgccggcgccctttgacaaaaggcggtaccgctttcgacccatctattgctgctgttggattgcgtttgatgtgcatgcaagctgtgtaaattatgcgcccatttttgagaaagacatcatgtgcgcaaaagctgtggagcccaatgtggagcaattaattaattaattacagattatgtttatattgtatatattttaataataaatattccattttttataaaatgaatattatggattgtgcagtacatttccctccgtcatccccaatatcgttcactccccccgaaagaaagtttttaattttataaacctaaactttttcaagaaatttttaagaatttttgcagctaatttttgaaaaataatataaactaaaaatacattgataaaattttttcataaaattttttaaggcactcccggccgattaattcaaatcctctcaagtaatcagtaatgaccaaatttttggttgctacctccaactcaggacaaatgtgacaaattaggacaaatctaatccctaactaatttttcatattttttaaatcttgacattttagaacacaaaattgaatagaaggacccattcccccctccaataatgcctgcgctcaccgaaggtttgtgaagaaaacattttttataaaaataaaaaaccaaaaaacaattattctaaatagctgttttacattttttaaacgactttcacataaaaacttttttagtctataactgtgcgctttctttacggaacaagggcgcggcatgcaaagacatcaagtggcttatcgctacttataagatcaaagccacagaagaagacgacataatcgatgttgttgattgtcctggaaatgtcttcatggggtgccagacattctcttgtttggctggttgtttcatttttcaatttaaatatttattaatttgatatattttttcaattcatgccaacttcagaacaaaataatgatatatttgtcttgaatggatgcgccgaaacaaaaagttgttcatccaaattggagaaaatctgtaaaaaatatgatggatttgcgtcatgtgttatttgcaaaggaccattgccagtgtgcaacaaagaaaaaattgagttaaaggagccctttccgcccttcaatgatggccatgcccatcgatggttgtgtagtaaaaaagttttatttgcacagttgacgaaaacgctaccggacaaattgtgagcaaaattgctgccgtttcgtgtgctaattgtttaattgaaaaggcaaacaatgagaaaatgcaggtgagtattttgcagcaaattttgaaggatcaacatcaattaattaaatttttattttattttcaaataaattttcagtaatttaaatggtaattaataacgggaaattcaggaacagctttttcagcggcaagagcaaatgttggccaaaattgacgagttacaaaagtccgtttttgcattaaaagaaggacagagctcaattggtgggttaattaaattaaacagatcataattaaattaatttttggaattattttaaataattaaattcatcattttcaatttatcttaacttttttaaaaaaatcattgacacaataaagaaaagtttaaacgagaatttggtcttaagggaaaaaaacaacatttttgaggattttacatatctagggatgattttaaaaaataaggacgatattagtgccccgtcatcatggcttatgaaattttgaaaaatgtttttttaacaaaatatttaaaaattcaaaattatgccaaacatttgtgtggaatttatgccaaattaaaatgtttttactttagtttctgtttttgaaaagcaattttcttcgctgggaacaaaattggacgataaaattaatgagttgatgaactcaaaaacaggatcgattggcgtacaaatggtgaagtttaaaatttaatttacaatagaattctttttttaattatttctttttcattgctttgttttatagtggacttggaaatttcagttttttgacgccgaaattcgcattccgataatttatcggcggatttagaatctaaattattgtaataattaacttaaaaaaatttctcaaaccctaaaaatcccacgaaataaaaaaaggaatcttccaaaataataaaccatagaaaaaaaacgcattccagcgatttgtgaagccggattttcagagtcgtgcactttttggcgccgaatactcacattcctgcactttttagcacccgattttcgcattccgggcacttttttagcgccgtatattctacattccggcactttttagcgacagattttcgcgtttcggtgtccgttccagcccgatgcccctcttttctttaaattgttaattgtttttgtgttcccttcctcctccccgcgcacaatttaaccgctaattcatcaaatcgcaacttttctcccccaatttcattacgatttttgccccgttcctcccgcccaaccgccgtaaaattgtttgtcactaattgcctcctccgtttatttgtgcggtaaaaacccaaaaattggtgtgatcaaagtactccattccctccctcccaatttgtgatcgaaatgccccattttttcaccatttctccaactgttgcccgtctctcatcatcccatttttcgcccaatttctgtccacttttgcaattttttatgtaattttgttaatatttaaatggccccaaatgaacccaaattcgca

SEQ ID NO: 7552 - DNA, 1342 bp, Heterodera glycines
aatggtgaagtttaaaatttaatttacaatagaattcttttttttaattatttctttttcattgctttgttttatagtggacttggaaatttcagttttttgacgccgaaattcgcattccgataatttatcggcggatttagaatctaaattattgtaataattaacttaaaaaaatttctcaaaccctaaaaatcccacgaaataaaaaaaggaatcttccaaaataataaaccatagaaaaaaaacgcattccagcgatttgtgaagccggattttcagagtcgtgcactttttggcgccgaatactcacattcctgcactttttagcacccgattttcgcattccgggcacttttttagcgccgtatattctacattccggcactttttagcgacagattttcgcgtttcgggcacttattggcaccggaaattttcttgcaatttttttttttttgcttgcttgtgggaaagcttacacaacaaaaaatattacaatacccgttttacagttgaaaaatgcgtacagtaattgttgggatgtcgccgcttgtcaccccaatttgctcatctccaactcggcatcaattaatgccccactgaacaaagcccagcagctactgaagagcagcaatatctttacaacagctggcggtgcgattttggcaactttgcccggatatgtgcgcaaaagtgtggtggtcaagcataacgggaagaacagcggtaaatgatggtgacgaatttcgagagtcaatcccgggttttctcaactcgagaatttttcggcatttttatctgctgttataagcttgacagcccaagatcgacttttgttggtcagaagcattccttacatatccatgttgtttaattaagtattgtatcgtttaaattgctaaaaaaatgaaaatggaaaaaagtttttcgtcaaccaatgctaatgataatcaaatagttatttagttaacgattttaaagtgttcaagctctcgtctttttggatatcaaatcacacgtgaaaaaggggggaatgggtaaatagttaaatttagaacagattttgtaagaaattcgttatattagcaattttcactcgtgatttatattggttcgtcagtctataaagttgttattttcataaaacaaaccctacgtgtatttcattatccgattgattgattgtgaacctttcggcggacgattttatgttcccaaaaggttttttaaaaagtgctcgcaaaatatgttggccaaaagagcgtaattgaagaattccgtctgtcattcctttggtgttgagtctagaagaaagcgaagttgacgtcggaggcgcttt

SEQ ID NO: 7553 - DNA, 4700 bp, Heterodera glycines
gggggttcgggttccaaaatcctgatttctgctcagattttgcattgagagttttgggtaccagtacttggggagaaagagattgctgggggatttgtcaacagtttcctgagactgctgagattgggggatgggaaatggggcatgagaaacattatattttgggctagggatgcggagaatcagatatggtgttggaagcttccataacttcatcccaatttaagggattaacattttcaaatttgactttggcaaggggagcattttcttggattttgggggggtgagattacttccaaaaagattatatccgggtccgaggaagaagtcatgggttgattttcagttcgtggtggggaaggagccggactattgttggacaaattctgattttcagaaggagaagagaccgagataagggccaacagagtctccatagaggatagaggagatgaagggacaacagaatgtgagagaggatcaaaagagtcagcaggttcagtagaatatgctgccggagtgatggtcgaatcagcattagttgtcagagcttggagcgattcttcaagaggagttgtcggaaggagtctggggcatttcatctttggaatccagggtttcgattgtcgtttcggcatacttaatgtggcagtgaagagatattcgaggagaggacaaaacgagattagaaagcaacacagcaatgtggaaacgtggtaaagcattgttagtaaaacaaacaaaacaaagcatttaaggagaacttggagtgcacaggaggggtcgataattttggaagggaaagaggaagatggggggggggaataaaggtgtgagacttatgatgtttatttgagaagggacgctggggaatgaggaatcctaaaaccttttaatttttcacgaagttccattagcagttggcccatggtgtttcgcccagtaaagttccattgacgaatgtcgtcaatggtggcaccagcgccccagaatcggtcagtgtgactcgcttcaaccaaaaatttctccccagttgaaatgaggcactctgccagggcggggttctggtcgaacttgtggaagagaatctcttccatctttgactgcttcgtgctgtgccacacttttactgctgcggggtcagcttcattttgggcacaagccccgagtcgttttgctacgactggggaggtggttttcaggatttcggtgtctatgtcgtatctttggaagaatgttgcttttgtggattggtaacattgttctgacgaaaggaagtgacaggaggagggagggtagaagaagggggcggggtagaagttggagaggtatttgtgttcggggatgttggacaggaaggggatcattctgttggggaagggagggaaacgcgaattaatcataaaaattttgggtgcaaggcggtgtgaaggaatgaaaacaaaaaggggaaagatgttgtaaaaaagtggtgtgagaagttaaaaattaattgtgagtatgaaaatgggtaaggagaaaagtgcatttgttattgtttaaaactgttagaccttgggcgagagcggagattgtatttacttttatgcaagagatcccgctgagggaaaaccgcttgttctttgtcaatagaagtaggtaaaatttggggtacattggatttttgggtatcagaagggagggtttttggtgaaatatcaggggtatgattgaagcctatcgtgtttggtatctcggtggcttcagctgcttctaaagcagctttttcagcagaagagaggacgggggaggtgctgggaggaccggaaatctcaaaaagtttcttcagttgattaatatggactttaaatgggttggattgtggggaggaacaacttacgatggtgacatggagttcttctatgttaataactctgaaaacgcccttccatggattgtgaaatttttgggaagtgcccggttttccagtataattccgtaacagaacacggtccccaatggaaatgtcgggattcctaaatttcttatcatattgtacttttgatttattctgagcctctttaattgagtcagctgcagaattccaggcttttcttagggaaaggacaaggagggttttgaactcagctaagtcattgtgagggagtggtagatggacggagggatcaagaatttgatcaatactaaagattgggtctctgccaaacacgagaaagaaggggctttcgccagttgattcatgaatggaagtattgtaacagaaggtagctgcgtctagaaattcatcgaaattgggctctttgggattgatatatttagacagaatattatgaaaagttctaaatgtcctttctgttgcaccattgccctgggaccagtaaggggtggagaatgatttattaatatagagaagggaacaaaatgatttaaagaagtctgaggtgaatgtggtggcattgtcacttattaattcagtgcaaccaccgaattttaagtaaacatgtcgaaggagagcctttgcagtagtgagagatttggtgtcagggacagggactgagatgacatatttggagaaccaacaaacgaaatttaggatgtaacgatttcccatttctgtgatggggaggggccagctaaatctaaaccaattttggcaaagagagtgttggaagggaccgatttcatttcagctcggaacatggggatgggattatgccggagctggcagacaagacattgtttgatccagcgaaaaatatctgagtgcaatttgggccaataatatttttttgaacatttttgtagagtctttttgagactcatatgacctcctcccatgattggaatgtgaaaggagtcaaaaatcagggatctgagcgagacagggatgaaaacgcgggggtaactgttgggaggatgaaagtatagtatgtcagaagagataactaaatgttctgattctgaaagaaatttttgtaattcagcttcagagagatctggatgagagccatcttctaaaaatttaatgtgagaaagaacttgggggtcatttctttgttcttgaaaaaggtctactttatgaggaataccatccttggtacgaatagtaagggaagagagaattgggtcaaagttatggacaatgcgatcaaaagggacaagagagagacatacaggaaattcaatgatgtcttgtaactcttgagagtcacttggaatttgaggaggatcagattcggaaagtctggaaagagcatcagcaagtgcgtttttcttaccggaaatatgaacaattttaatgttaaaattttggagttctattagccaacgggccaggtgggcatgctgttgtgcctttgcttggaggtatgccaaaggacggtggtcagtgtggagctcaatttcagacatataaatatatggtttgaaggttctgagggcatagacaatggctccgagttcgatttggacagggggccaacgacgttcgggggctgatagagtgcgagaggcatatgctacagcggaaaatagatcatttttcttttgcatgagagcagcgccttgaccaacgactgatgcgtcagtgaaaatgtgaaaaggttgagaataatccggaaaagtgagaatgggattttgagagagaagttccttaattctggtcaaagcatcttcttgtgccttgtcccaaataaatttcttttcttttttggtgagagaagttaaaggctcaacaattgttgaaaaattgggaatgtgacgacgataaaagctggccatgccaacaattcgttttacttgttttagattttggggagtgggaatatttttgatcacttcgatgcgtgagagagatggggagtaaccttttgatgagacagtgtgaccaagaaagttcatggaagaggcagcaaaagtacattttttgggagagagttttagattgaatcgtcgaaatctttcaaaaatagtttgaagggcggagagatggtcagaaaatgaggggggtttggtgaaaacaagaatgtcatccacgtaggcaacaacaaacccatcaagtccggagaggacatgggccatggttctggcaaaagcagaagtggcatttctaagaccaaaagggagatgtgtcatttggaaaacaccttcttctatgattagtccacattttcgtgaggcttcttttgtgagggggatttggaaataaccggaagataggtcaagagaagagtaaaaatggcagtggccaattttctccataattgtttcgagacggggaaggggataatggtcagggatagttatttcattgagcttccggaaatcaatgcatggacggagtccaccatctttcttctggacaagaacgatgttagacacccacggagtgtcagattggaccatgacaccagacttaaggagttgttctatgtgctttttgagctcatcccgatatttgaaaggggttctatgtggcttacaggtaataggttcctgcgttgaggtgacaatttcatgggctccagcagtgctggacccctagatcatattgagatttgctgaaaatgtcagagacctcttctcataaattttagagatatgaacgatcaggcacactgtcggaagatatagaaaactcaatttagaaggaggggttcagggagttataccattcatgcccatttggggggaaagac

SEQ ID NO: 7554 - DNA, 1614 bp, Heterodera glycines
aaaaagaaaaaagaaagttgcccttttttggcaggtgaattcatttgcactgattgatttgttttgtggtaattagagaaaggaaataaaagaaaatgttaatggaattcattttgcgtgaaaaatcatttctttggcgcttaaaatccaatctgaaattttaaatcgcataatggtaataattaggtaattgaatcactaatgaggttgattgattgatgcaaattaattaaatgaattggtccccttatttggaattgttcgttttgtctgtcccctttgcttctcaattcactcactcatctgctgaccacaatgctcacttgctccggtgtcaaattgccccctgctgagatggcattcacttgtgacagtaattcgggcgacggagcgtacggtgactcgtcctcttggcccactttgccctccagccaatgggtgaagcattcgcccttgccctacggtatgcctttccttcggtcgctcctccacccaattaccgtaccttaatatcgattttcccacgtggtaccgttctgaactcggggtaatgcttgtgcagcgcctccatgtaatattcgctgcactgaatcttctccggaagcccagtggactccatccgcgaggccatattcacctttaagtccattgtttttatgctttatcaccgaaaaagaatacggtcttacagtgtctccgaacagacagtaccgcggggtggacagtccgacaacgccggcggcgacctttcaaaagtgcgtttctttttgattttgccttcccttggcattctcactggtccggtgtgcagtccaattcggattttgattttttgtggctttcgatgcgggatttcaaagcttttgaggtacttaacattgaaaatacgcaaatgaaacgccaaaataaaattacgtgtaaaaattccaaagcgatgtcactgagatgcatcaaatggcgcactccgatctcctgcggaatgccgctcaccaccatgtaagcatcgccttaagcctccttcacagttacaaaaatgccctttcgtaatgccatccctccaattgccacccccgtccccattctccccctcctccgcccttttttcccaccgatcgtctccactttgtaagcttcatgtttgttgatcaaatcgtcgaatccggtgtaaacagtgttaagcattgtaacaacttcaagaggagtggaagatgaacagagtgtggtgaagccgacaatgtcactgaaatggaaagggtttgtgccgagtgaaaaaggggcaaaggtcaacggcaaacctgaacatgaccgaggccgttttgaacgtcttcggcggcactgaccggcccaatttcagttcattggccacatagcttaacaaaagtgattgatcccatccttcgtttgggagggcacctcggcagaagttggttcagcaatttgtccgcgcgtttattcgcgtcctccaaaaggccggtcctctcttgcacgagcttctccaaattgttggcgtactgttccatcatgcgcatcatttggtccacaagagagcccttcctgcgatcggtcggtccgatcagtcaatgccctccccccccccccccccctcttacactt

SEQ ID NO: 7555 - DNA, 5902 bp, Heterodera glycines
  unsure (1)..(5902): unsure at all n locations
tgacccgtcgctgtgactttcgtttccgtttgatgggccttcacctgtggcactctcctcagccgacttacccgccaaatcggtcccatccggaaatggcaggccgcggaaaaggatttcatacatgacaattccgaacgcgtaaatgtcgcccgcctgccgccgcgaggcgctttgcttcatccacatctgttccagaggtgaacgcaaatgcgtaatgcgttttgcgtgttttttcactatttgcgtgcgcatatttttaaatttgcaaaaataaatcatttctgaacgaacagtgcgttcgttatgcgcggattttgttatgcgcacacccctgacctgctccatgccacggcgacggttctgctctctgttcttcagcagttccggagcacagtacaaaacatctttgggcaatgatacgatatgggacagggaaagcgactcattccaccgtaacccctgtgtctttccaccgtactctcctcaaagatcgtccgcccccgtatccccccccccccttcagcagcccctctcgtccaacaataccgtaccccttgtcccgtcctcccaatttgaccgtcctccttctcaccccctctaatactcacttgtcagttgagttgctccgcttctgtcctccccgtctttcagtgtctccttggagatgtatcccgacttctcccatcgctcttcaattgtttttccataattacccccgcgggggttcgcccctttgactcaccgatacaattagcaatggcaaagtctgtcagtttgaccatcctatttacaaaaagttttccgtcgttttgtttgcgcctcgtctactcaccaattgcggtcgatcagacatgaccacggggtgagtgagccgtggtacccaatcggactcatgtgcaaatactccaagccctgcaatatttcattttaccaatggccaatttgtggtctttgttctgaccaaagttatgtctcgcacaaatgcggcgtggaatttcgcgtcaagcgtcacattttcgttgtaaatgatgtccttaactttgcaactccgtgctgattggcctcggtttgctgaacctgaattgtgccgcgggagcagaatttccacagcaccagcagttcgtccttctcattgaatgcgattcccatgaacgggttcaaattgtcatggaccaattgcttcatcagcgacaacagttggaggtcggcgcgggcgaaagagatgggcctccgctgggggtacagatggaaagaggcatgggtgttggtgccgatcaccgcgtggtgtttggcaaagcgcgccatgttggacattttggttttggaggagccaatggaaagctaaaaatggggggaggggggaaaaatggccaaagggatggacaatcggacgaaccattgacttcatctcctcaatgctgactatacgcatatcatcgcggaaaatgcgccaagcagttttggaaagagcacgattctccctaaaaagtgggaaaccagtgaaagtcgggggggggggagaattggccaacagaattcggaagaagatgaagccggcaccggcgccgagcagtgcaatcagcgcgagaatgccgacgataatcatcagagtataatcgcatcgctcgttgcggaagccacagacgggctaattgggggggggaagggcttttcggtcggtatgaaaagggttttgaacttcgtcgggcggcagtcggccgtctgtggaaggccaaaagccggtcaaaaggtcggccagtttgagctcaaaacagccgcttttgttgataattccatcgcaatttgtggacgggaaaggcgacatttccacctgacaaatgaatgccaatgaatgcttttgcctttctttgcttttgcctttgccattctttgccttcgcttaccattttcattacgtcgtcgcgatttggagcgacataaaaagctgaacaacacacgatttggcttcacatttcttcacttacctgcgtaaacagccgcacgttctgccaaatcgtccattatcacctaaagcattcatttgttggcactttcccctccaattgtcagctacagtaagcttttccttctcattcgtttgtccgatggtaacatcgtcctactgtacctctttgtcagtgtctcggttatcccctgctgtcctacggtgtctcccttgtctcttatttgcttatcacctctttcttctccccctgccccaccacctgtcccgaagaaacgccctcggcactgacaaggcctgaatggtttgttcgattggcactacactaattaaggtcattagacagaccagggaattgcattcgacgcattttgttccacaggtagcgcccgtcgatggtcacgttcggattgccgcccgtttcgttcagtgccattcgcgcggcaatcgaataaagtttaagcgcatcgtacagatggacgtatccgtagatgttttgctgaatggatcaacagatggcatttggtgcgtcgttctgttgctcaccaagttcaagtcgtccacagaaagtccgttggattcaacgcgttctttgaacggtgccagaatggaattgtcgaacccattcacatcatcaatctatgccagatcggcaaacgatcaaaggctagcacagaaaactgacaatgattgttccggcgaagtaatcgcgcacattttggatcatttgcccgtccgtgccaatccatggcgacgcgtcttttgcttcggcctggagccacgggaggatgtagacgaactcgtgggtcttcaggttggccaaactgacggcttgcatgaactcctttgtcatgtcacgagtggaagagaacacacaaatgatcactgatcgcatggataaaaatgaccaaaggcaaaacgatcaaaagcaatgaccgatgggatggccaatggaaattggcaatgaaatgagcaaataaccaatggtactggccaatggcaattacgaatggaaatagccaattaaatggccaaataaccaatggtactggccaatggtaattaatggccctgataatggcaaatggcaattaacaatggtaatggacaatggcaattaacaatggcaattaccaagggaaattgccaatggaatggccaatgaatgccctctgttccctgccactgacccctcgctgaatttttcagatcctccaaatatccgctggcttgtatcattttggcatctgcgttctcttcgaacagtattttcttgacgacggtcacgtgtctctggtggaagacttcttcaaatgcctgcgtccgctcaaatgccattggacctgcgattgttttcttattcccttccaaacgatgccttcatttcatacccgtgttggtcacaatggcaacctaagaaaagggcaatcattttggcattttatttaaaaaataattaggagtcgctgataacgaaaaaggggggtgattgactgataaggatgaacttactcgattccaattgtaatggcggactaaataatacaccgcaatggccaaagagtttgtcttaatggccaagggatcagaaagtcaattaggcggacatacggtgcggagagaaacgcgggcaagtgttttgtaaatgtttttgtcggagaagatgttgctggcagccatgtagccgatgattggcacattccttcgagagaaagcgtttagacaaaagagtcgggactcaattagcccccccccccctgaaaaaagttccaaaacaaaaaaacgaacgtaccaaaaagccgccattttgctcaccttaacatttgtttttctttagttaccataactcatccctaattaccgcatccatttccgcgttacagtatggccctatgaatgccttcacattttgctgatggaacatgtccgctccgactgccactccttcgaaactttcaccacagcccatttgggagatgatcctgaaggtggctgtgtccccatggcccctggtttaactctttcctttcccgtgccaaagtccgttccctgcccatgcccaagtccactcttctcaacccccccccccccccccgcgggcaattgcactgactccacgtcaaagtcttcgttgagcactccctccttccacaactctttgcggcatatctccaggatttgttctgccttcggcatcacatttattgctccgatgtgtccaatgcgcacttttatcccacttaattgagaaggggccaaagaatgccgtacaaagagagtgactaattgttcacttgaacttggggttgttcatcagctccaatgaacgggcggtggtcgtttcgacggatgcctaaagaacaaagaatttcgttggattggcgagcaaaaaacaaatcggataattttgggtacgttgttcagttgatttactgctgaagaattggagggccgagaagaagccgttaccaatttggaggaagaagaagcattttgctggagacgaacacatggcaaaaaagaggagaaaaggaggaggggaaaaagcgaggacattgggggaaagggaaggacaaatggacgcgaaactttggaaggaagtgccacggaaaggaaaagccggccaaaaaggacggggcaaagccaatcaaagcaattgccactaacaacactaagcgcggataagggaaatccgtcagaccaattaactaatgggggggggggatcaaaggaaagccgaccgtattggccaacgcgcggggcaggcgggaaaattggtggcaacaaatccctagggaaggaaaaaaaggataagggatgatccaaatccaacgggaaaataaaataaattgaaaaagggcgtcgggtgttatcataaaaggtagcagcaaccaggcgggaagattgtgaaagaaactatgccaaaattcgacaaacacttttatatcattaggcaaatgaccgaacgaatattcggcagaaaaatcgcaatgaaaccgaatcaaatcgaatacattcgaattttatgccttcttatgaagttttactatctttctttttttaatattcttttatataattgtatcaattttcattgtaatgacttttctcttccactaaaactttttaattaatcttatttattttttaaaaaattaattcaaatattttgatcattttgatcacattagattagtcataaatcacagatcagatccaagacaatcactgattgattggtgcttatttgtcagtcaatccgtcggcattcccttttccacttttgctcctctttctttcatcttcttcctcttccttctcacttttcccattcgttctttcttccgtttgtccgtctttaattcgtcttcggcctttcttccatctccatgctttccctcctttccgagtgccattttcgcttcacttcgcccgttttgtcctccgccgttttcggtacaattttcaccgatgacattttcgtcttcttctgctgttgttcgttttgggctttgttgtgcgccatttcttttcgtctcgccccattcctttcaatcgctgcgccgcaattttcagttggcatcgaatcggaagagagaacccccgaatttgtggtagttgacagttttggcactgaattttgagtcggtttcgaaacggaacgaaaacgtaacaattggaacacttctcttctgagctgaaaatgagaaggaggatgacggcacttctgctattttaagacgaattgttgtgccatccaaaaatacctctttgtccataaagccaacaaaaacatccaaaataatgcgaatcaaaacgaacagacggattaagccgagcgaaatttgcatcaaattgtaatggagaatgaagtaacagttgctggaaaacatactgacaaaagggggggaatgattgaggggngggggggggggg

SEQ ID NO: 7556 - DNA, 974 bp, Heterodera glycines
atttgtcatgtcattttcggcattttgtccatatttcccgtcccttttgtcactcatctgaaatgccattttcggcactttgtccgcctcttcttcgcctccaattgtcgcatatccgtccccgtgttcctccgttgtcgcccttttttcctctccaattattccctttgtttttcgcgtccttttttctcgatttttctttcgtcgattttcataataatagatttgttccgatgtcacaaaatcgtaaggaatttgccggaccgattttggcacaattcggcccaacgaagtcatccgaacgcggaagtcgcgcacaaagtcaactgtggtggtccaggggagaaagggagggtacagtactaaaagtgtgtttgcctaccgtacaccgtttcgccaacgtaacgcctcaaatgaccgaattggacgatgttgggctgtaaaagcaatttttaatttcattaatcgtttttttatttcgctttcttcttcaccttaatcactgtcacttctctgatcagtgaaacttcgctgaatcgaaatttcttttcacactttcttttgttctcttctccgtctttccttttgccaattgttttttctccgtttttggcacttttctgccaattgtgccgttctaattgtgcttcgaaagtgcgtctccattcctttttaatgttttaattaaatttattttaatttattttatctttttttcgttttctcatttttccaccttaaaaaaggctttttcttcttcattttggtccttcgcaattctgtccattaagccggtgaattggttaaacaaagttttgacaacggtcggctctaaatgttttaaatgtttaaatcagggatggtatcgtccgaagtcggtttccaaggacggggatgccgatttgcagggacatagtggtgaaaattcatgaaatttcaggacattaaaatttttattatatgcaatgcaaaat

SEQ ID NO: 7557 - DNA, 2109 bp, Heterodera glycines
  unsure (1)..(2109): unsure at all n locations
ttttaatcgctttctctccaaaaagctatggcacttctgtgcccaccgctaatggccatcgcatcggtcanaatggtgaaaaaaatccaaggcaaaggaatttaaaaaaataataaataatcatcattcactccgactattaaatttttgaagttaatcatttgtacttttattttcttaaaatgtgccatcgctttttttctttcctttcgctttttcttttacactctctccggcggtgtcttctcatattattaattaatatgcacagtcatccaaaaagtggcatttgcccattggcaccttatgaatttaccaaataatttcaaaaaagtcgcggacgaatttttagagagtgtaaagccaaaacattggacgaggcgtgaattttgagtaattgtgccgaaagagataaaaggagaccgacaaagaaaggaactcaaaaaaacacggcatccctcgggggaaaaggcggagaaagtgacggaattggtaaagcatcgcatcagaggaagaagccaaaaggggccccagggggccgaagggtccgccgaatttgccaataaatcggaagtatttgaagcggcaaaaggcaccgattgggcgacgcttctcaaattcaattgcaatcaaattattgtttaaaactaagcttcttctttttattattctcgaaaattatttatgtgtttcgctttcattttttgtttaattattttaattttgtttttttcagtttacataaattattttgaaaaaggaattgccccgaggcgaatttttaaattatgcaaatgaaactccaatgaggggagaaagtgagaagctcaaatgaaaagcccatttcaatcggcacaattttcaaagcgggaaacatttgaacagaaatatgccattttatgcttttgagcattttttgactcgaaaatgtaaaaaaaaaaacaattaaataaaccctttttaatggacaacagaagcaaatgccaaaaataaaatgcatttgaaagcattgggtgaatatttagaggctatcattaagcaaatgctaagcgatcaaaaagcataaaaaacgaaaaaactttttcgagtattcggctataaattctctttattttttaaaaattaccaattttttccggcggcgcttttcgccatcgtccgactccaattctttcataattatttattctcccacaaaagtccttttgacaaccattataagctgtggcaatttctaattttaattttgacctctcttttcttacatttttttgggttttttcggtgccatccgtcgcttttttttttggtaaattccaacgctttgtaattacttaatttaaataattaaaaatccgccagtgttcgtcgtattattattattaacattttctctcaaaatgaaatgtttgcgtcggtcgtcgcaattattttcgcattgtctacagaaatttgacactttgtccccttttggcaaatgaattggcaaaatgtgttgacaaatgtccgtccgtttgatgggaaaatgcggtgcccttttcattttctgctttttctgtgtgaactttttcccttaaattttgttttttcatcatttttatgtttattttcccttttaaatacgatttgctcccttttaaatttcattttttaaattttgacattggcattttaccctccccctttttctctgatggcactatcctcccctatttctcaatgttcttctgctgctgctgtttttgtcgaccaacacaaactccaactgctccggcaaccacggcactcttccctttcttcttctccctcttcctacagtaacccttccccgtacagtacgccttcttctgatgacagtataacatcatcgttgaaaatgcaatacaacggaagagatgagaataacgacgagggcgggcgatgggttgcgatggcacgggcagcggcggacgacgggggcggcaacggcggaggcgtttttgtcatgctgcaaaaaaggtggggaaggggggaagacaggtcgagactctcaactgatttaattgtaaaacaaaagaatggccgaaactgatcagtcagtcagtggattggctgattcggggagctttt

SEQ ID NO: 7558 - DNA, 2664 bp, Heterodera glycines
tcgccaattcgtcccccactcctttcccaatgttcgacttcccagctttgcctagcagtgcttcgtttgcactcagttcgccagttgcccaattgtcccattcgaacgccgtcctcgtccaggacaatgaacgactgaacgacagagtcggggtaatacgataagacagggtgtatctgataggtgatggtattgtgccgctgttccaggagttggaactgatgttgcgtgaccatgtggcccacatcaactccatttaccactctctgcactctttgcacggtttccatgcgcttcaattgcccgacggtcaaaaaaaaaaagaaaaataatatttaaacccaaagatcaattcattttaatttcagggggaattggtccatctgtcccaattccacggctttcctttgcgtttcatttgcaccaaaacgaccgaaagtgaagcgattgtggccgatgaggagcagcaccgtattctcgaacaggcgacggacaaccggcatacggtgggccaagcacggcgctttatgctgcagcagcgacaaaggcatcgtcagcagcaggggagcgtgaatgaggtggtacggtactcccccatggtgtcactgtatgggaatgttaccgttacagtatgattgggtgggcattactgtttttccgcttttcgcccttcctccaattttactttcctattgtcagtcgttgtcctccggctcctcctcctccttcgcctcctcctcgtccaccttcgactcttcgtttgctgctgatccgactgacttttccctggcgatgatgcgacgtttgtgcattcgcccggtggcacgggacgacagtgaggaaatgcaggtgaagagaaggagattcgcagtgtccaaattcgaatggccaaattaggcttttatggagtggctgaagagcggcgactccgccggcaacgaaagcattgccaacggcgacttttccgccgccctttcgccgctcgcagaggcgacaaaaagctgcgcatggctcaaagcggaaatggacgcggaagggacgagcggcaccgagtcaaagtgataatgggggggggggaggaattagcagcataagcgtgagagaatttcagacaatccgccgagcatgaggccgcgagcgcaaatggcgcctccgttgcgtcatccgtcgcgcagcgttcccaacgccaaccgccggtgtattcggtgatgagcaaaagccaacggatgaggtggccacggcatttggccctttccaaatgcatcttcccccaggactcagtgtccgtctctcagctcgcgccgccgatcgccgctgctctcccccacctcgtcctcctcttccgcctcgttcctcgccgccccctcctccccctcttccgccacattcactcaccacggcggatttggcggcggcggcggaagcgcgtcgggcgccgatgaaacggcggcggcgcggtcgccgcgtcggagcggcatcggaatcacaaatatgaaaagaatgggcagcagaccatcggacgcacaaaagtcggcaaaaaggcatctgatctgatcagacaaacattggaaaccgacgaagagaaatgccaaagtaaaaaagacgaaagaaattgtatgtaaattatttttatggcaccaaattaaaaatttcgaacatttcatgtccaatttccttcccttctctctgtctctctttgcttttttcatttgcccttcggcgtgctctttcctttttgtatttctttgctcatttggacaggttttatctgcatttagctgcttcaccttttgtggtggatgaatcatcgtccattgcattttaatgctcagagaaagagagaggaaaaaagagagagagagagagacattttgggaagagtgagagagtctttccttggaggaggggggggggcactttcctttaggggtgactaattgttgtaggccgcctaatgaatgcatttctgtgcgcaaaagccactcatccgcggtcctttgaaagcaacaaccggtcgtttgatcgttctttcgatttgcttctcccattgatcgtcgcaaaagtccgtttccctccaaaagctttgtataagccaaaaatataaaagacgagcgatcaaagccaaatcatttgtttaacaaattcaaaattgacttttgaactgccaatctccaaaatggtgcttctttgctgttcccaacataaaatggaccgctcattgcccaattgcctcagggggtgccgttgtggcattttggtcggcagaaaagggaagaaaaatgtgccgaaaagcagcggagaggagggaaaagcggagcaatcgcagcagaggaacgaacggaaacagaacaacgaaaattattattgttcagtggaagagatggcttacgatgcgatgtacgacgaaaaaatgccggcggatgaacggtgaaacagacaataattagttgctaattaggcaattaaattaattgttcttttgtagggacaaaacgggcacagtgcttcaacgagttgcgatggcacttcagggaaaggccggccccgaacaataccaacagttcaaatgaaaagcggtggaagagaagaggaaaagccgttttgggtggaaaatacaccaaaaaaacgaacaaattggaatttttttcaattttttgttccaga

SEQ ID NO: 7559 - DNA, 5595 bp, Heterodera glycines
atgtctaagttagtaaatttttcggcgctttttgtccggacgacgttttgacccgacgacgtttcggccgacgacgtttcggcgacgacgttttgtcctgctccgtaatgcatcaattaggcaaaaaatatttttatgcatttctatcgaaacaataattaaactcaaaatccgattccctgatgaggttgtcccgattgtcagtattcctttttcagctaatcttttgtccaatgccttaaaagattgaaaatgcatgcaaacttcaaattttcatttccccctttaagtccgcaaattctcaacggactgttgagctgagcaccaacacaagggaagtccaagcagtccctgaagaccagcagcaccaccagcaacagtcgttggacatggatgccaagcagcaggagatggaccagcagcaggaactcactgttgtttagcctctaatcaaatagaaaaaagcacagtacacacaaaacaacggtacctcaaatgtcgtactgtactgtcgtcctctcaagtcgtttcttttccctttttttggttgaatgtttgtacaatttttgatgttaacaacggacctctatcatcacattcatttttatcattttttatttcacgattttagacattttaccatatacaattcttttttgtcacatttttacgagattggactgagaattttgcgaattgattgcttagcttatttacgaaaacacctccaatgccatggttgggacattttttgtagcagtttcacccgtctacagtacccattctgttgtaccatgtaccataccccgtcacccttcgcctctaccgtaccccatgactatgcgcgtacatttgttgatcattgacgggatttattgattctttttaataaatttatttaatttcccccttcgaccggtgttcgttcaaatggcattccatccatacacaatgttaaatgttaattagtgctgatgtcggctagtttttttaatttggggaggggggcaaagttttttcgaaataaattttaaaaaattttgaagcacagccccctcaccctcatagttaattaccattttaaatattatttaaaaaatagaaaaacgagtacattttggtcattgaaatgctctcattattcatattgtatttacgaaagttcatattttattctatgttttcttctgcagacctcgtaatattattctgtttcattttgtttttttttaattaattttcgaattttgggggagaagttttcccatttttatttcttttaattagccacactcatcacatataatgtttgtgttattcattaattaattatactctattattatcattatttcctcaacaacaaaatattctgtggaataaattcgttgtgaaaaattttcaattaatgaaaattaatcacaaaacatttaattaaacgaaacttttattatttaattaaaataaaaggtattattggcaatttcatcattaaataaaagggacatttactttgtttttgagcaaattggccgtttattttacaattgagcggataattatttattttcatgcaattaaaggggtttatttaaactcgaacttaagcgaaccccaaaaacgggtttttgttcgtcgacgaaagaaagaattgagcactaaattatttgttggcccatcaaaaggtcctttttctccccaatgaatacatttttattattgcaccattgaattatttatttttaattattattttgggatcagttcttaaaattttgtctgtttattcaacaaaaaatgactgcaattccggtgaaacgcgacctttgtaagaaaaataattaacaaaccaattaattgttttgactgaccagcaccaaaattaattgattgtcgaaactttgatgggatgccaattcaatagttctttatgacctctctattttgtcaatgtttggcatttcggaaatgtttgaattggcatagtgaaaataaacatttcgcttcagtcgccggcccttcgttgttctcctcgcccagcaacaaggccgacttcgaggtggagttggacgtgcaccaattcgcgcccaacgaaattgacgtgaaagtgtccggtgatgacgtggtcgtccattgtgcgcacgagtcaaagggtactgtaaccatatgcctgggcattacagtcaacacaaatggcattgcaattgctaataattcttccactttttcgtttttatattttccaacaaacagttggccaacacacggacaagcgcgagttgcaccgtcagtaccgcctgccgctgggcgtcgacccgggcacggtgaaggcccatttgaccgcgaccggaagtcgtctgacggtcaccgcggccggcaacaaagcgacgggccaaccgccgcctcccccggcggtgttggccactcacggcaccacttttggacaaagcatcatcccggtcaaacacgtgcccgcttcgtcatgtgagttttggcacggccaataattggcttttctaaattcattttgattaatcatttggcttatttcactttgctttgtcagttccgatcactcaaaaaaagcaaaagttccaagtggaattggacgtgcaacaattcggaccgcaagagattgatgtaaggctctgcatgtttaattttataaaaaaacgcaggtgaaagtgagtgggttcgatgtgatcattcattgtctgcatgagaaaggtgaattgggacagaaagcgatggcaacacaatgccaaacattcaaaatgctttatttttgtggaccagaaaatggtctatattttttcgttttgtcattttatgctacaaaatccatttaagggggggggggagggaattgaaaggtgctgggtcgttacttaaaaaccatcataatgggcgttacttaaaaaaccatcattatgaaaatttttgtcgaaaaattatttataactttgctcgaaagcaaccaaatttttaattcttgatatcatttgatagccctaagtgttctctatcagtctgcaaaatttcaaaaaatttcgttaagtttcaaaaaagttatagctcgaggaactcaaaaaactttgattttcgaacatttttggccataactttttttaaacttaataacattttttgaaattttacaggctcataaagaacatttagatctatcgaatgatagcaaggattaaaaatttggtctttttagagcaaagttataagcaaaaatgttcattatggtggttttttaagtaacgcccattatgatggtttttaagtaatgacatagcaccattctctgtccatttccccgtgatcagtgctcagccgaagtgcgcagagttagttgtatgcaattaccaccaacaaatacataaatggaggagtagcaacacaaccagtagtcactcattcattcttcttctgtcagttgtcgtacgtccatttgaatttgaatcgccctaagtgggcagcattaaattaaattgaattgtactgcccccgaggtgcttctctttttactgacttttttgcttcgctaattaaattaggtatttgcttcattaatttttgttgaaaatcacatcaaaataacattgatcaatttttctgttcttaattcacttttcaaataaattcgtttactgtttgtttattcccttctcaattaatcctcccccccccccatcagcaacaaatttcgcttcatttttacttgtacttatgtcattacaattaggtaatcatatcaatttaattgactattccattaagaaaacaaaagtttttttgaggggtggagaaattttcgttttataaagaatttcatatttaaatttaagcatatataatttttggctttctgccaataaatattttggtaaaaaagtttaattttttttttcttccgtagttaaaaaccgcacattttttgagtcgcctatttttgtgctttcctaatttggggcattgaattttctgggccataggctagcagcttctgtgctgctgctgctgtgctcttccccacattttgtggtggaatttggcgctggagggggcggagggagtggtgaaatagtgttggttttaaagagtaggggaagaagggggaggatggaaatagtgttggttttaaagagtaggggaagaagggggaggatggaaatagtgttggttttaaagagtaggggaagaagggggaggatggaaatagtgttggttttaatggagtgtaaagagggggagggaggggaagagagaggttaaatggttttccctttccctcctttttgctctcttttgtgtgtttgcctttctctctatcattctcttcgtatatgtctcttcttcctctctgcttctctactctctctctcactcctttctctctctcgtatgtgtcttcccttcttcttcttctctctctctctctctctctgtgtttatgtctttcacttcctcttcctctctctctatccctttccttctttctttctctctttctccatcttttcctccatttcttttcatttcacttcaatcatttaatttctctcttttattccccccgggttctcttctctcttattttagtgccatttctttcttcttttcttttttgtttttcaataaaaacaatgcctttcttcttctccttctttctctctttctgtccccacatttcttcggcaatttcaacgcacaaacacttcctaatttgttgtttatttgtttttcccattttttccattttttttttttgcttcatcaatcccttcccatttccatacataacacatgttttaacccctggcttccacataacacttaatccattcaatttcaattcaacaacttttcccattattttttatttttcaaaaaatttatggacccaataaatctcacatttattcattttccgaggcccggtcctcgccgataatctttgcctggctggcgctgtcgtcaccaacagcaaatgtggctgacctcacccaacatcattttgtcggaccgattttgttcttcctccccttttcccccatatttactcgcattttcacatttcctcgcccccgcccgccacttcgctcaaaaaccaaatcgttaaatcgtcttctaacagaaattgggaaaaaatggggggcggggtggggaaggggtggacgcggcgcgcggctcggggctcatcatcgtttgcgcaagggctgaatttgtgagcccagcagcagcacagcatggcgaagagcgacttgacggggatggacggacggttgactctgctggggcggtggtggcgacgcattttgcgagagattattgcctttttgtaaatgctggtggctgttttccttccttgatttgcttttcctcatgctgtttgttgctgctggaggtgtccacggctcgactgttttgttaagacggagcccccctccccccccccccccaaaaaaaaaatccaggaacttctttacaaattttgccaccattgttgttgtgtggtttgttatgtgtgtgcgtcggagcggcgccattgctggtggctgcttcatctcctcctccttttattcg

SEQ ID NO: 7560 - DNA, 1599 bp, Heterodera glycines
tttaaatttttcaaaaaaaaaagtatttttacaacatgcgttttaattttgattgaattttcctcttttatctttttttcaaacaaattaaattaacaatttttgtatttatttattatttgtctataattttcaggcagaatatggctttgtgatggccgacaaaattggcacttcactgttggaacaaaacagggaattgcaggaaaagtcagtcggtggcagttttttttaaattttttactttcaatcctcaaaattttaattttcaatcattttttctgatttttcccatggtttcaggaacgaatttctggaggcatcgttggccaccagccgtgacaatgtggcacagctgaagcgccagttggagcagcgctgtgacctgttcaagaagttgcaactccaactcgagggcatggaggaggaggagccgaacgggacagacaaataccatcagacggggtgagcagaaaactgaaaattcttaggacgaatttaacacagattttttgtaaaaatttcagccattcaaaattttttgagtttgtcaaaaaaaattttttccaaaaattgctgaaaattttttcttgaaattttcattggaattttgatagtcagacgctccgcttcgggcgggggtcgaattcaaaaattcgttaacgccattgaactcttacctcaaattttctatgtcaaaatgcaaaaataaacaacaaaaaaaaagggggtgggcgccacagcaccactttattcctccttcaagtggtttgtacgggtttctgcctgccctttctgggcatgggggggggatgacatggattggatgagaacaaaggacagacagaccgaacactgatggaggatggagatgcccttgaaaatcgcagcaacaaaaaaaaacccatgaaaattacccattgttttcgcgcatgagcaaaaaaaaaaatatcgtatattgtgtagtaactctacggtagcaaatcattgtgcaaaaacaaaaattaatgacagccaattttgcttcagaatgtgcagctcaacggcggcgcaattggagagcaaaattaaacgattggagggggaaaataaggaattgcgaacaaaggtggggggaaatgagggagggagagggggtgggggacaattcaattaattgagagagagattttgaaaattcccagatcggaatcaaagactcgaaaatgcatccggaccggaatttcgggactaaaattcagttttttccgggttcccttctccggttgcaaaaaagatataacctggttcgagtttctacccggattccggatcgggagcccgggaaatccgtaccggaccatcccaatccaccaatggtatcgaacaattaatgtgggggagaggagaggacggcggtctcatttttcatcattttatttgcagacaaaggactcggatgaattgagagtgattgcggagaagcgcgaggagcagcggatcaacgagtactgctcacgcttgaggggagcaaacctgaaggtgtgggggaggggcgatgacggacaaaataacgcacaaatcgtaccccgggacaaagtgatataaccggagatttgg

SEQ ID NO: 7561 - DNA, 3916 bp, Heterodera glycines
ctttataatatatatttattatacataattaaattttttaatttattttaaacttagagttcacgtttctatactttattcactttgacaattttaaaaatcactaaattaaaatttgcagcaatttttaaattgattatgagttttacattttttcatccaaggcaataaatttacattgtcatctccttaggtgaaagcgaatttagcagaatttatgattataggtacgaaattttcttttttacgtttctttttttacttgtttgaaaattattttacatttgcactttttataatcgcagaatcagcaaaatacattcattactttgtagataattaagtaaacacttggaatttcgaggatttatagacgttcataccttttacatatttttactgtctaatatcgttcatgcattttttttgaataagttgtttaagaataccatttttttgcctttgtaaaaagatatgtatttttatatattttaattgcagataatttaaaaagaaattttatttgaaattgaaatttattctttatatataataattattattaatggatttttgtttaattcttttttatttcatgtttaagaatgatttccaaattgttatcattttatttagaaattgttatttttttctaatttattgtgtttgttttttggttattttttgatgacttactttaatttttttataatttatttcaattatttgtattgtattgtgtatagggttatttcgatttatttgttgaattcaaaataggagcttatatttaaagcaaaatttaaataatttattataggatatttttaaataaaatattttaaaataatttcatattgagttttttgttatgtacttctaaataatatgaattatattttcttaatttttaaaaagaagcaaaaaaataaatagcatttcaatgaaattagcttatcaattattatttttatataaccatttgagtaatgttttacattaattattcattgtttttttgttttattccttcatttaaataattaatttatatgatatgttatttttcggttttataataactaatattcatattgtactaattataaatttatttaattagaattgttaaaaaattaatgcgtcatatattttattccagtcttaaaaaagaattccttttatttgtaatttctaataaaatttttatttcattattgtatacacatttacagatgattttgaattttaacaattattattatgacaatgctgaattttcgaataaaaatttttaataatagaagagtattacttttaaagaattaaaatttaattttatttattttctttccaatatttgataaaaaaaatttttctttaattcttttttaaatattcttgaccagtctcttttattcatgttgattcttatagacgaattattaaattagtaaaagttaaaataaattttttaaaaaacattcccgactctctgtcttttttaatcaccgtctcgattccttcaaatggctttattaagttttatattaaaaaataatggatagtattttcaaagcaacacttggtaatactgccgatggtctcccccctcctttttggaaaaatttttttctgttctaaaaattcgtgaacacacgttttatgggcttttagggtctctgaccacgattctgacatcaattttgaccaatttcgaagctcagacgcgaatcagaacaaaaggtcgaaaattcaaaattttcgaaattcttacttttgttcttaaattgatcaaaatgagctaaatttagtcaaaaatcattgcaacaccaaattcgaacataaaagtgaatttcgaaaattttgaattttcgactttttgttcgaattcgtgtccgggaacgtaattggtaaaataaatgtcagattcgtgatcgggcaacttttatttttcgttcaaataaattttgagtgacgaacacaaccgcaaattggtggtagtgggattttttggtaaataactccgacaaataacgttcgtaaatggacagcattaggtcgtcgagaatgagtaggagaggtttgcaatgttgtttaatcaattcttcagaagggacgccaagtacactgcaacaccagcccgttgaagtgccggaactgcaaattcatttccccaaaacaatacagtatagagacaggctgtggaataattagtaactcgtcaataaatttcaataaaaactgtgttccggaaataataattccacaaggcagtttaaagcaaatatctttatcaacaaatgattttgtattaagcattttagtttatgttgtaatgatgacgtgaatgatttaaatatgcattttacataccggtggtcgctgcttttatgctagcaaaaaattcatcaagagttttatcaatgtcacctacgtcttcttcttcattattgctttttggttttttatccgccttaggcacgctgacgtcatcaatttgcgtggaagcagagtctagatggctttttgttgggtctttcttttcttcgctagcttctcgttttttggtggtttctttttgaggcgcggcctttggctgtgcaatattttgagcaacaggtgaatccggagagtttttgttttcttttttgacggtagctagagactcggccaaaagaacatttccgagcacgttcattgctgtctttgctttcttccagctctcactgtcctgtaaggcatatgccactagtccgatctccaacaaatcgagcgcaacctttgcttttcgtttcaattctcgttgatcactttgaatattttggcttttgcacgtcattggtggaggctctccatacggaattcattcatacatcatcgttcaatcgctcattaaacctatcgaaaaagcaaaatgttttacaaatttaacaatggaatgtcttaccgatcgcgcacgcatgtgtgcggaaatggtcaacgggagttcgggtgggtcacgaaagttggccactaaatggaaacgggagtttttaatatttttaaattaattattttaattgaataaatttattatttaccacgacggcgggtaaaaccctgccggcgaagcgctgtcatttcaaccggccgcgcatcacatatttgcggcaacggtacccgctttacatcgccgaaaaaacagaccaagcatgaaaatagataattaaatagcgtgaaaaacattgagattaaaaatacaaaataattaaatgtttgaaaattaaattttaaacttacaatgagcagcacaacaagtagctgcagaaccacgatcagccaccactgagtggcacacgaaccaccaccatcagtggcatgggcattcgcgaacactaaattaattaaaaattagaaaaaataaataggtaaatgattgtgagtacccgggtgttcttcccctggggaagcaacaaaatccaacaagtttttgatgctcttgtgagcacagataacgggttttgtgtaattgagtggacgaatgcactcattgtccaaaataggacattggcaattctccacgggaagccaagggagtccagagggagagggcatttttattctataaagcaaataatttgtacaggaaaaaaagtacaaatgatttatttggcaaaaacgatatggccaatccgaatggtcatccccaatcaaacttttgatcaattcattcacttaccctttggacaatgcgctgaaggaaacgccacaatagccgcccatccgcttaagaaaaccacccctctctttcaatcaaatgcgagatggttggtccctttctccgtccatccccttggcgcaccaaacaacgggccccgataaacccccccccccccccctccaaacgtgttcgtgaatttaactgaccacctgt

SEQ ID NO: 7562 - DNA, 1329 bp, Heterodera glycines
aattattattttttaatttttaaaaatattttttaattcatcaaactcaccgtctaaaaagacgatgtcctcctcctgatcgctcacatctccagcttcgcgcatcaactgcacccaccgctctgttggacgacaattctccgtaattgtctcggcgcggcaggtggggcatttgccaccacgcttgatgaggtgcttggcgatgcaccccaagtggtaggcccccgtgcagcggcagtttagctgaaccaccattctcgacccgtcgggggcctcaccaggcttggggtacagagcgccagtgcaaaagcacgtttcatcatccatttttataatattaactttaaattaaaaaaaaaagtatacaaataataaaacaaaaaaaaatgattcagatgggggggggggtcataatgaccttcggcatcacaagcgaaggaggggaggcattgcgagtggaggtcataacagtagtggaagaggagagaaaaacggagggggtggtcagcaatcaattggcgtcgtttttccccgaccacgctccccatccgcccccaccaacacaaacatgtccgcgaatttaactgaccacctgttcaccccccccagtgtgcgcgaaatccgcgcacataacaccggtacagacccccatgtgcgcgaaaatttcgcgcactacgacggtcccgaccaatcccccaaaccctttgaccccccgccgacaccctcccgaactcttagtgcgcgaaaatttcgcgcactacgacggtcccgaccaacccccctagaccccaccgacttccctcccacactcatagtgcgcgaaaatttcgcgcactacgacggtcccgaccaacccccaaaccccctttgatcccgccgacacccaccccaaaccttacgcccagcgcgcgaaaccctttgatccgcgccgcaaaaaacgcccaaaaccctgtcgctagtgcgcgaaaatctcccgcgctacgacggtgtggcaggactaactacttttgatatgtcaattgtaattcaataacaaaaatctttgtttaatcttttttaattaaattaatttttttttctttcattcgatatcaccagttccttcatctatgattatgataaaatcatcagtgtttttcttttcatcaaactattccaatgttaattttttgatttaattaattattaaaatcatttaaatttaattttgaaaaaatatttcatttcatctgattcattttctatccgttgaatatttaaacaatttattttagcgattccaatttttgtttagcattgttcaacattaaaattattttatgtatttta

SEQ ID NO: 7563 - DNA, 4207 bp, Heterodera glycines
ccccccccccgtcccccccgcccccgccgggggcgggacaggttttttgggctcacccccgtcaccgcccccgtgactcagacccccgcaacccccgcccccgcgaccttcacccccgcgggggcgcgggggtgaaaatacacccctaagaatggcatattcgttgaattaaaggcaaaaatttatacaattttgaattttttaatcatcttttacaaatttttatgaaataaagtaaattttgcttatattttttaaaatatttgtggtttagtggttagtgcttcagcactaatagaaatctttgttatgagttcaacaccgggtgacgttttccttaaataaatttttttttcctttaattaattttttttctgattaatacagggtttctttatgttcttgtttctaagtgttctgatttgggagtaaatccttattttcatctaaaaagaggaaaacttctgaaaaattttgctaagttctaacaaaattcatataatttcttaaaattttcccctggaggcgcctataggcaccgccgtcccccaaaattcctctttttttcttaaaaattagccaaagatcgaaaaatttgcttattttttgtacaaaatttgttaacaaattgcattcaaattttcaaaaaatttccccggcggcgcctgtcggcaccgccggacctctcccctcgcacattcagcaaattttttggaaaaatgtaccgcaagaaaaatttaaaaaatctgagttccaattttccttgagtaaatcatgattagggctgctaattttatgtaaatacatattttttcctggcttctccatagcctaatcagtaggaaaaacactttcttttttgtgtttgcaaacaaaagtttggacttttatttacatattttagtagatattttgcaaatttgaatatctgttagaaataaatttaaaattcgctcctatcggcacgccggcccccccccccaaaaaaaaacctttttttcttaaaaaattacccaaaaatcgctaaatttgattatttttagtcaaaatctgtgcaatttatgtcaaaataaatattatcaaggcgatcaacgaataaaagaatgtggagccaaagaaattattcataaaaaatattttttttgtgggatttttggagctaattcaaagcaaacccccgcccccgcccccgcgggggcggaattatcgtgcccccgccaccgcccccgcgactctgacccccgccaacccccgcccccgcgaaaagccacccccgcccacggggctcgaaccctaattaggaggaagagggacatcgttgaaataaggtaaataattttagtccgtcagtgtttggacttttttgatcagcacaaaaaattgggatagattggaatttataaaattttaggtggaatttgctatcattttatgtttgacaaacactttttccatcacatattttgtcgactcttaattaactcttcgctttcctcacgaacaattgcaaaaatttattgaagaaaatttgtttttaaagtaaaaagtgtgttttgccaaaggtcagtcggttcattcaacagaatattgaaaaagaactgaccaattttggtgcttattcagcagaagacttttgtccaccagcgtaaaaatgcgaagtaaatttatggtaagggaatactgtaaggaaagaagggaagagacgtggtaacatcacaagttttaaatttacagactgatttaggacaaagtacagtattatattccgcggggcagaattacagtaattcctttgccatcggcagcattttaagaaagaaatttgcaatttggaagtggaaaaccagttcaatccacaacaatgcactcactcattcacatcactttcattaccaattttccaatttcaattcccctcaaatcgctgctcaagtggtcggtcgttctgttgtcctttttgttcgcctccttctgaaaaggttttgccaattccttttcaaaattcgcttttcaattcgaatttattttgtataaaatgcgaatgaatcggccaaaaagtccgtccgtccattcatttcatatatttctccgacatttaaattttcttcctaattcctttttttgtaagcaaaaatattcgtggccctttgaaaaataattccgtgggaacagaaactcaacaaaaagagcaagttcagaattgagaatgttttcaaagttggcaattgccttatttttcctttcttttgcaacgaattgccaaattatttggcctttgtttcatttgggaagaactcagtccgtcggggtacgcttttgccgtcgaaaatgcttttctttttatgctttgttttaaattcacttttgggtcactggcaaattgctctgtaacagcgccccggccgcgggaattctcgtcaaattgtacgacgacgacggttcatttttggctattgtttgcttttgccttggcatttcgttcgttttcccaaggtctgtttggcttcgacgatctgttggccaaaggatacaccgaccaaaacggacatttcgccatttacggctcaaccaacgaaattagcaaaattgagccgaaagtgaacatttaccacgactgcaacgacattttgccatgccaacgaaaaatatcagtcggtgccaagaaacagaggaccaaaaaacaattggacaacacaatgttcgttcagataagtgtaccggacggagtcgtctacgaaggccatcgcccgtcggggcttttctcggtcggagtgttggaacttgggaatgactacggaggagaaagtcgagactgttttcatcgctgacattgtcaaaatatccaaataattacaaaaaaaataaataaaattaaattgaaaaaaacaattaaaaatggattaaattaaattaacttttgttttcatatttagaactgcttctgatttaaataaaacatgtaattaattactggtagaaattcaaattcttttcttttcctctgctgccttagattttgcgaaattaaaattaattaattaaattaattaaataatatttttacttttaattcgacagaaattatttttgtattcccaaaagattctctttccctttggctgctgccgctgtgttattttccgctttttgtttaccatttcgcgacgtaaacaccacactccccagtgaatatttttattatttgttatttttgcttttgcttttgcccctttttcccccggcttaaaattcgttcgtttcgctttaattttttgattttgatttttcaatttttcgtcataattcggcaatttgtcacttttggttagcttttaatattcaattttccgatggataagcaaacttttggtggagattcttctgccaattcggcagcggaagacaaaatgagcggttgctgttcagaacacattgtggaaattgaggttcaaaaatagagagtggtatttaaaattgagtgatttaaaacgaataaaaattgaatgaattggcctttcagtggaaacatttcgactatctctccgccctcagtggcctttacacggcatcggtcgaacgtcgaaaatgcaatttgcttgtgctcgtgcagggcaatttggacaatttggaagggaaaatggtcgaaatgaattaacaattatctttttgaacgattaacaccactagagcccggcgcgggatttgcgggatcaatcccgctgggtcccgtccagcaaaaaaaaaaaaaaattgagttccaatctcgcagcgggatccgaaaatcggttttctgtgcgggatcccgcggatccgtattgtattttttggaaatttaattgaaatttaaaacattttttatcgcaaatttcacccataatttatgaaaaaattcccgacggtgcctatcggcccacgggatcagcctacaccttaataactctttaaaagattgactcaaaaagcgacatttgctgttaataaatcgatttaaattttcaaaaaattttcccggctgctccctacgccggaccttcctgttccccaataagttttttgaaaagcgcgcgcgcagaagtgaaaagcaccataaaatagtctaaatttcttttagaagttccaaaattccgcactccgcacgggatcccgcaaattttaaatacgggatttgcgggattaatccctcaggatcccgtccagcaaaaatttt

SEQ ID NO: 7564 - DNA, 1521 bp, Heterodera glycines
  unsure (1)..(1521): unsure at all n locations
cagcagtttcccgtcgatggatcagctcgnccatgccatggtgcaagtgctgcgccatttcaaaatctctcattgttttgcaatgggcgaaggcgccggcgcggacatttgttgtcgattcgctgtaacaaagctttttagtcaaattggtggtccatcatctcgagtagtgcaaattttatgaaattgtttcgctacattcattgacttttgcatatcccgagaaaggaaattcgaacaatgccaccaaatacattatttgatcagtgtgtttcagttggattttccgtcgatggtccgggggttggtgttgatccattgcacttcgacaacccacggaattgtcgaaaacatcaaagagattgtgagcattttcaccaaatacttaatatataaacctgccctttacaaaactaagttcgccgggttgcgtctcgaagacggcgaaatgactcattcggcgtggaattatttgctgactcaccgttttggaaatgcacgtcattcccatgcttattaaactaagtgaaaagcatatccattgtagcacaatttggaccaaacccaaaagcattacgtggacttgctgaagtcggtgatgaaccaacgcaatttgagccgttatttgtacagtttcggacaccgaagcgatttcactgaccgactcaaagaaaatttggcgaagtcatttggattttacgtgattttaaccgaaaacattgccattttcagcgtggatgttcttttggtgagcggagcgaaggcaccgcacaacgaagtgaatcttttaaattttcgaagtttcggaaatgcatttaaaatgcctctaaggcaggggtgccagcagaaaaaacttcaatcagaatgattgtcaaaacatcaaagttttaggggcattttgaggccaaaatcagaataaggggattttttaagaaactttgcctaaaaatgatcaaattacggttacggttcagtaccctcgaaatcaaatcattttatccaaattttgtgggataattctttctttttctctcagaatatgatgcacatgttcaaaaacatggccaacgaccgtaccggtctgctgatggcggaggactgcgtggacgtactgtcggaggcggtcagtgaaaaataattaatcggataaataattaccaaattaatgaacgatgggtataaatgaccctaatattgaatgaatgagtttgggaagcctttattgaaaaactgtggggcgggcaggctttgaatcgcgtaaaaatgtttatcagtttaattaccggcactgtgtcaattgtcgctcaattaatccattatcttcctctcggagaagcttctctatctcatgtccatttaagcccgacaatgtctcttcggccataattttgctcggccaacgccatggactgctcaatgatttgaccattccgataattaaaaaggccggcggaacggaacaaaacagagggttatagcaaagttggaaacatttgaatgttttaatttcagttttcctcc

SEQ ID NO: 7565 - DNA, 6617 bp, Heterodera glycines
  unsure (1)..(6617): unsure at all n locations
cgtgtcccgacatttgcgcttttgttcaaagcgggttcaaaattaagaattttttcaatctctgattgcataaacagttttaaataagcgattgaaagtgattgtatgcgatcagttgatcttcaaaaaattttttgaaaaaataaaaaaattttcaaacaacaaattattgattataatgaaccacaagaccgaattttcttaattttaatgcttattaggctatcagggcttaaaaaattcaactttgcgtccaattttggacataggcacaaatgtcggggcgctccgtacaaaatacgaattttttgagtggagtaaaatgcaacttttcaggagattgaaattttctggtgaaggattttgctggatgtgagaggcgccattaaaaaaaaaattccaaggacttagtaaaacgccatgaacttgataaactggtttttgtttcgtccagtttttatattttttaaattattttggcaaaaaaaaccccaaatccaagtggaaacagtcagacaagtttaaatccttttttccgccaatattcacctcaatgacaatgtccgcattttcgatggtccgtcgaacttcggccgcaaatgaacgcaccgatttggcattggcacgggccccggcttttgtgtcactgttttccgtcgtcgcgcccggcacttccggaagcgaatccaccaaaaattggttggcattgtaattgtcctgtaaaaaaaaataaatgaaatggctgacccctgaaaaattgtaaagaaaatcgggtgaatttttgaaaaatttaactcatttttttaaggaatttgatgcaaaagttttttaaatttttcacggcagacgcctaaagacatggctgggtcccatttttccaaaataggtcccaaaatgaccaaaattggcgaaaattccttttttttctccctcggcgccgaaaatttagaaaaatacattgaataaaaaaatttttgggactcttcgggtgcccctccaagaatttctatttttttttgttgacagcgcctgcacaaattgccattgtaagttaattcattaaattaaaatagtagtaaaaatataaccccctaattattagttagttaaaagcaaacaaaactgccgaaaatgccattttttcatgatattttctcaacaaaaattaaatttccaaattaaaaacaaaacaatcaattccggtggattttatacttcgtctttggccactcgcttcgccagcgcctcaatggacgacaacggattggtcgtcgccaattttttggactgttttttgacgacgccgccgccggcctttttggccgctttctgtcgtgccttgcgctcctgttccatctcctaaaaattagaaaattttcatgtggaagttaaaataatcaaaaaattttgcgtttatgggtcggtcggataaggaaaattaattagcgaccccgaaaaacccctaagaaaggcgttttaacaattaaaaaaaatattttattaaaaaaatgttcgaattcgtgttccggattcgaaataggtcaaaattgatatcatattcgtgatcagcgaccccgaaaacccccgggtactactccgaattgcataaagaaccctttttaatctctttttttatgggaccaataaaatacaggattacccaatttttttggagaaaattgggaagaaaaagaagaatgaactcaaaaaaagagaaataattgcaaaattttataaaataaaagagaaaatcaagcaaaaaggaagaaaatattcagcaaaagaatggagtaaaattaattcgaaaattgcattaatttttctaaaatctctttacattgtgaatttattttatttttattgaaaatatgtttattattttcgaatgagctccagaagaaagtaataaaattttatttaatcattaatttaacaattggcaattattttgtcattaagataaaattattattattatttctttgaaattaaacaggatttccttattttattaagtaaaataatgatttattcagttttttaatcagaaaaaaatcatttaaatgcctcaaaaaatgaattgccatttaattgaagaaaaataaaataaaatcttgaaaatgaaattctgtattttattatttttatttttgattactctaattgatcaaattggtggaacggaaaataaaaaattacaacaaaaaacatttgaggaaatatttggagaaaaatgggaggaaaaagaagaagaaaaacgaaatgaactcaaaaaaagagaaataattgaaaaaattatagaataaaagaaaaaaaaagcaaaaaggaagaaaatatccaaaaaaagaatggagtaaaattgaaacaaaaacaaacatttgaggccaaactttttgcagaccctccgtcactatccccccaattaactccaaaaaacagcgaattgtgcaccaattggacaatgccgcctcagcaattgaacaattccacatggagcatcttaccgatgcgcctccatgggcttccgcaatgttgggactggtgaaccaaatggttggaatgtgccgcgagctgatctccatggtacgcgagcaggacggaggaagcaacccgaacagtgtttttgacgaagaacgacgactgcacagcgttgtcatcgcgcaattgcaggaaagcaacagccaaacgccaactcaacgtgcaaccgatgacttggcgaatgtcaaagaactgatggaccattgtgacatcgaatgcctgccgacccaagtgtacagaatgggcaaaaaacaagccgacggacgtccaaggttgctcaaagttgaactcccgaccaaattccataccaatttatttttgcgcaacaaaaacaaaatcaaaaattttaacaaattttccaaagttttgttgcgcccctccctatctaaaagtgatctcattgaccgtgcccgactcattacactgtgtaaatctcaacgtgaaaatgacccatcctgtgattatattgtctatgcggggcatgtgcttgcccgcgacgacattcccgcctttaaatctgacctcaattttaaatgtatttgtcataacaaatcttaatgtgttttgggtgaccactcacgaggcaataaccttaatttagctcttttacaaactaaatatagaaaatttgaacaccccatagaaaattcgaaaactttactaaataaaaaacaaaattttttatattcaacatttatcaatatgcgatccctaaataataagcttaacgaatttactgcgattatagccctaaaagattttgaattagtttttgtaactgaaacgtgggcaaaagaaaaaatacctttccaaccatatatcactaacaattacaaaatatatgaagctagcagaagcggaaaaaatggtggtggagtaatgattttgacaaaaacgagcgtaaattctttttctgtcttatctgctctaaattcaattgtaaaatccaaattattcagataaatggagcaaaaaaattaagaatagcattactttacagaccaccgaacacttctgctaatttcacaaaaaagattctgaacctcaattttatcattatgggagattttaacctaaatgcaaaggacataacttggaccagtggaacgccttatgctaagtcggaaaaaggaaatattttttgtgaattttttaataagtatggcttattccttatgacgaacggcccaactcgtggtagtgcttggcttgatctgattctctcttctaaacctgattttgttaataatgttttaattgaggatatttttagttctgatcatcttaccactaacttttcactatcttttcccagtaatagaactaaaacaaacacatttacagtacgcaattataattctactaaacttaatctactaaatttaaacttatcttcaattttaccctacaaattactacaaaaatttaccattgaagataagtttaatcatttttaccttctttttagagaatatgtagaattatacttgcctaaaatcactgtcggtcaaaaatccagaaagcctaactacccattgagtcttaaactgtcaattaaggaaaaagccagactttataaactacaaaaaataaaccgtgataaatataggcatttgtatgatagcatttcattacatataaaaattcaaataaataactttgttacaaaaaatgaaaataattttttgaataaaggaaaaaatgctatctacaaatatattaataaatttacaaaaaattttgaacaaattcactctattaattatgagaaccaaactatttttgatgattacttaaaagcagaaatttttgcaaacactgcccaagtgtgcaaatggcctaatggctagtctccttgactttcccttcttctttcccctggttcaatccctctacagaaattagattattttcaatttttttttttgtatactcgtgggtttcctataaagaaaatatgattcctcatagtttttttttaaattgatacatattttatcattttttaaatgaaaatcctaccaattgagcttaataatcgcaaaaaccaacctttttttgttgaaaatctgttaacaaattgcacccaaatttttaaaatttcccccggcggcgcctatcggcaccgccggaccccttctttcccaaaagttttttgaaaaagcgctccgaaaaaagtgatgtgaaaatcaaatctgaatttctattaatattcgatgatttggtccaaaaatgattaattgtttgaaataattgaagaaaatttgtttaaaaattttcattaatttaatttattaaataaaaaaccaaataattttgtattattttcacttgatataaattaaaatttgaattttttttttaatttttaaaatttttttgaatttttaaaatttcccggttggtcccggtttttcttgcggtcccggtcccgaaaaaaatcgaggtcccggtcccggcttctcaggtcccggcaagtcccggtcccggttttggcaaaaattcccggtcccgtggcactctagaaaaaattattgcaaaaagcatttataacttccttcatcagaataatttaatatccgaacatcagttcggttttgttaaacaccgatctactaatactcaactaattacagtattagaagattggtacgacagcatatacggtaagaaaaatatcgactgtatttatgtggactttcggaaagcttttgattcccttcctataaacattttaataaataaacttcataacattggcattaagggaaaactgctaagttggttatctgaatttttaagggataggtcttacagagttaaaattaacaataaatcttctaatttacatccgattcagtccggtgttccacagggttctgttcttggcccactgttatttttaatatacattaatgacctcccgcaggtaatcccttcggtagttagcatcaagctttttgctgatgatgtcaaaatttatgtctcttacaaaactcgtgatgaaagaagcaaattaaatattgcattggaaaatattggaaaatgggctaatgcatttggtttaaacatctcccaaaataaaacatttattcaaaacaacaatataaattatttaacaatattattaatgaggttgaatctattagtgatttgggcattttgattgataataaattaagattttctaatcattatactaaaattactaaagctgcttatttaaggattcgcaatattgccaaaattttaaaatcccgctctatacgtatttggaccaaagtttataagacatatattcgccctcttttagaatatgcgcctgaaatttggaatccgacatacaaaaaagatataaataaattagaaagatgccaaaaatattttacaaaaattgcattatttaaatgcagacttccttacataccttacaaacaaagacttgatttattcaaacttcaaactttagaagaaaggagaaaaacaattgatttagttcaggcattcaaaatcattaatggtctcactcatcttaaaaaagacatattcccacaattttctggtcacatcccttataatcttagacgtaaagttgtgttaaaatcacaatccagtaaaacttcaaattcttttatcaacagaacagccttaatatggtctaaactcaacaaagatataacagatgctccatctgttgacagtttcaaaaaacgtataaataaatggattgagttaaacaaaaatttagtctgtaaaagagctccttggacttgatattaatttactaaaatctaacgtgtaagtggtcaccccttcgttggatattttatttcttctgaataaaaaaaagggggcttaccaaaagtcatttctagggtaattttgggcgctgatcacgaatatgaaatttaatttttcnaaataccgaatcccgaattcgaacaaaaactagaaattcataaattacaaggaaaacatatttctaggggtattcgaggtagctgaaaacgtttatgacatccattttgacaaatttccaacctgaaccctgactcgaacaaaaaacgagatttaattta

SEQ ID NO: 7566 - DNA, 4332 bp, Heterodera glycines
tttcgtggcttggacattttgtgggggcgccccataaccattcacttcatctgcaccatgttcttgaagctctttgtaaaatttcaatgaaatgctcagctgtaaaataatttgagaaatttacgtcttaatgtataattaatttaccataagctttgatttgtcgcctccatccggatttgatgcatggtataaaatgccatcaaaatcggcgaacacaacatcgacggtatcaaatttactgctggaatttatctattatttttgaaccacagattagcaactttactttgttcgggcattggtaaatttcatttccaaaagttccgcaattaccctattgttttgctcaagaataatcattactttcagtttatattagaataaatatcttaaagcatgttagtaaatttatctcattagttcagtggttaaaaaataattgtagctgcagctgtagggaattaaaaaatgtcttgtcaaagttcccctcccccatttttaaaaatatttttgttcataaaagtcaagtcgctggtctattatatgcacggtacccattttggtaaattccgaacgccggactcgaactcgaacaaaaacccgttcatataaactgtgctcgaacgctccaccatacataccggctcacaatgtatatgctttttcgcgaccgatgagcccaactgcagttgcagcaagtttcgttttatggtactgaaatgtcgttccttttacatattcaccacgactatgcatatatacaaaacattaagatcgtttaactgtatgttgaatgatgaacaacgttgttgaaaaattattgttgggattaccgtagttggttcttactatacttggggcctactgtggtccttttaaaattaaaattatgaaacactagatttctttttattcttttctgctaatcattgctagtccacctgatgcagccaaccgttcgctcatttttttttctttttgcggctgaacaaaaacaagtcagtcgagacgaattgacgaaaacagaaaaacaagggccgccactgaggaaggaggggggggggggggggggaattgaaggcgcaaccagtgctatactacatgtatagtgcaaagaaaaatattgttaaatcagctgcagaaaactattttcattagaggggatgaatggctaaatgactttcatgatgaaaagaagaaaaatacaaaaataaccaaatcattacttatcatgtaaaagcaaacataaattttcggacattggaaaaattccaaaaagccaaaatatatggcaaaatcaaaaaatattaaaaacataagcaacagatgcggttcaatcatttgaaaatataaattaatatattaggcaaacatttattttccttcccctttagaaattgtcgataaatttttgtcgtaaatattcacaaaacaatattttattttactgtaatcttgttccaaggtaagtgaaatgcaataaataacgcttggagataaaagaaactggcgaaaataattgactcaattaactgtcgtgaaacagttcgggaaaaaacttgccaagaaaaggcgaaaatatttccaacggctcatgtgcggttcaacaagtgagcaacaaaacatgaaataaaagcttctaaaaattacttgactttctttttcgaaattgtcattaattttttgatgtaaatattcattaaacaaactttgtttttattgacaatttttttcgataaggccttgagcttaaacaaataatgcatatgcgtagagataaagaaatcagtgaaaaaaattatcacaaaaatctgccgtgaaacattacaagaattctggagcagtgcttcgtgattatgcgtcacactctgctttgattggccatatctcgcctgagagtggcgataggcccttagttgatacgtctgaatatgaagagcgcgccgagctctttcgaacctgcaaaactccatattttatggccagcatagtaaaataagcactgaatgaaacgggcaatataaattgagatgaatggagttttcaaatttaaaaaccttctgcattttttgggaaaatagttgagaattttttattcgagatttatcacaatactaaggggtgggtgaagcgaattcatttgttgagaaagtattattttttgctgaggaaccttctattaaggggcagaattgaaggcgcaaccagtgctatactacatgtatagtgcaaagaaaaatattgttaaatcagctgcaaaaaactattttcattagaggggatgaatggctaaatgactttcatgatgaaaagaagaaaaatacaaaaataaccaaatcattacttatcatgtaaaagcaaacataaattttcggacattggaaaaattccaaaaagccaaaatatatggcaaaatcaaaaaatattaaaaacataagcaacagatgcggttcaatcatttgaaaatataaattaatatattaggcaaacatttattttccttcccctttagaaattgtggataaatttttgtcgtaaatattcacaaaacaatattttattttactgtaatcttgttccaaggtaagtgaaatgcaataaataacgcttggagataaaagaaactggcgaaaataattgactcaattaactgtcgtgaaacagttcgggaaaaaacttgccaagaaaaggcgaaaatatttccaacggctcatgtgcggttcaacaagtgagcaacaaaacatgaaataaaagcttctaaaaattacttgactttctttttcgaaattgtcattaattttttgatgtaaatattcattaaacaaactttgtttttattgacaattttttcgataaggccttgagcttaaacaaataatgcatatgcgtagagataaaagaaatcagtgaaaaaaattatcacaaaaatctgccgtgaaacattacaagaattctggagcagtgcttcgtgattatgcgtcacactctgctttgattggccatatctcgcctgagagtggcgataggcccttagttgatacgtctgaatatgaagagcgcgccgagctctttcgaacctgcaaaactccatatttttatggccagcatagtaaaataagcactgaatgaaacgggcaatataaattgagatgaatggagttttcaaatttaaaaaccttctgcattttttgggaaaatagttgagaattttttattcgagatttatcacaatactaaggggtgggcgaagcgaattcatttgttgagaaagtattattttttgctgaggaaccttctattaaggggcagaattgaaggcgcaaccagtgctatactacatgtatagtgcaaagaaaaatattgttaaatcagctgcagaaaactattttcattagaggggatgaatggctaaatgactttcatgatgaaaagaagaaaaatacaaaaataaccaaatcattacttatcatgtaaaagcaaacataaattttcggacattggaaaaattccaaaaagccaaaatatatggcaaaatcaaaaaatattaaaaacataagcaacagatgcggttcaatcatttgaaaatataaattaatatattaggcaaacatttattttccttcccctttagaaatggtcgataaatttttgtcgtaaattttcacaaaacaatattttattttactgtaatctttttccaaggtaagtgaaatgcaataactaacgcttggagataaaagaaactggcgaaaataattgactcaattaactgtcgtgaaacagttcgggaaaaaacttgccaagaaaaggcgaaaatatttccaacggctcatgtgcggttcaacaagtgagcaacaaaacatgaaataaaagcttctaaaaattacttgactttctttttcgaaattgtcattaatttgttgatgtaaatattcattaaacaaactttgtttttattgacaattttttcgataaggccttgagcttaaacaaataatgcatatgcgtagagataaaagaaatcagtgaaaaaaattatcacaaaaatctgccgtgaaacattacaagaattctggagcagtgcttcgtgattatgcgtcacactctgctttgattggccatatctcgcctgagagtggcgataggcccttagttgatacgtctgaatatgaagagcgcgccgagctctttcgaacctgcaaaactccatattttatggccagcatagtaaaataagcactgaatgaaacgggcaatataaattgagatgaatggagttttcaatttaaaaaccttctgcatttttgggaaaatagtgagattttttta

SEQ ID NO: 7567 - DNA, 4733 bp, Heterodera glycines
cagatttaagctgcggcatggcaattattcaggtgccaatttgaacaatatccggtttgagccgtggtataaggattgcattgggtgagcagcaaaagcaatttttgattgtcgtaaaaaacaaaaattatttaggcctttgtcgccaccagcggaagaaaaagacgacgaagcggatcaaagcaacggaaattaattatatttgagaaatgatcgatctcgccattttgtttgtatgtatttgacctttgcttgctcacaaattcgtatattgttgaacaatgtcttttttgatttgtgtgccttccaaaattgcattgggtaagtgtaataagtcccagtgaatcaatggcatttgccattgctaaattttccttttcaccgaattaaattgcatttaatttaggccattgtatttgagcaaagtgttctcgagtcccgcggggccaagcagtgatgagcagaaagaatgaacgaattatttcagaaatgatcacaatccttttttgaattcttaattgaaattgaatttatttttctttatattaaataaaaaatttggattatattgatgttaacaagagccgactcttgaaaattccggataagtaaggataagagaactttgatccggaccggtttcgggattaaaaaattcacaattaaaacaaaggagagctttcaggtggtgtggcgatgttttttggcacacaaggtttttaggatataaaactggacactgctgttgatcaatgatcaccaataaatctttttcaaaagaaatcttttgccaactttggagccggatcaaatcgttcgttccaaaggaattttgccgttttttccacctttcccgtgacccctcccccttaatctccgcctttccccatttatcccataaaaaaagtattctccaattttgctccattgatctcttggttgttcttctgtcttctgccgctcatccgtgccaggaacgcctccgccccgttggaagagcctataaaagaaccatttgaagagccattcaaagccattctctctctctctcttaaagcctcccaccctcccctgaaattaataaaaaatatatttattcataatcttattaagagacgggcatgggatttgccaagatctcagcattccgcaatttcttttgctttatgtgttctgaataatttcacttattctgtttttcaatttgcttagctaatttaaatccgtcaaatctgtcttaataatttgacccaataaaagtatctgatgccatctgatcaccgagacaactgagtcccagtgaaaatagatttttcagtaccgaagaaataagttaatttttattcttttatgcacaaaattgttattttttaactttgagactttattcattggttttaaatgtaactcatcaagagctgccgattgataccaaatttgcccggctttgacccttttaaatggttaggagagcccaatttgtacatttctccgtagtttgaactctttcaaaaaccggtttaaagttaaatagtgcttaaaaactttggattgcttaatcgttttcagcgcataagaaaacctaaaagtgtttttgtgtgtttttgagtttgggccctatgattaatattttccttctttccaagagctttcaaatgatacaccaaggttattcaattggttggaaaagcatcaaaattattttcaaaaatcatcatttttttaacttaacgtgtctaatacagtggcacatctcgagggtggcgattttgtgtcagtacagttgtgccatccaagacaaaaaaaaattaaatttttttttatgatttaagttaatttgttcgggacaagcattttgctcacctatattttttaaatttctcaagccatactgacaaatcttgtcaggaaatttgttacctctgttccccgacttttcttttacaggtcaaggaaaaatcatagattaaattttgatctgctggtgttcagctgtagggataatagcatcatttcgaggcccaaaaaatttgcgggtatttaagtcggaaattttgaacaaatataaaatataataataataataacattcaaataacagaaacattttttgaattatttctcttttccaatgttttttattatcgtctttatttgagcataattcggacacaaaaaattaaaaaataaataaaagttaataatttaaaatttagtttgtttccctctttgtttattattactagagtttgtaaattatatggaaatccatatttttttcctggactgtgggaggcctgaaacgcaagaaaaacatgtttttagcctgttttgaagcttctaggatgactttccatatccatattttccatatttttaacctctattagaacggccctcatcagctaattggcctttttgacccctaaagaccgaaaaaatttctgaaaaagtcatttttttagcagaatttgtcgaaaaaattgatgaaatttaatttttcttaaaaaattggtatgtcaaaaataagcaaaaaaatggaaaatttcgatttttggtcgattttctcaagaaattgcttttttttcttctaaaacgagttttttaccatatttatccaattgtttcgggacgagaaaaatatcgggtcgggtttcaggtttcgggacggaaaaatgtcgggggattcgggtcacccggaacagccctgacacatatagtacaacataataatccaatgaaaaacaaatacttatgtactcataatttagtcatttactttttatttacatctaggtatatgctccgttccaaaattataaactcaagaaattttttgccacttcatctatttcccgtggacgaattgagcttgcgggattgcggaatgggatccgcaaaatcccgcaccgggctctatgttcgactctcctcccatccgatcactttgctcatcctctcatattactctaagcacaaacatttcctgatcgctttatattgcttaacacctgtagagactgatcagtcatccttaattgactgatttttttgcaccttttctggaggaaatattttccaatgaaaaaaatatttttgtcagtcaaagataatagaacatggaattttaaattccaaaatcgaatccattttctttaaacccttatctaattttttgtttgaaaataccgttttttccttttgtcgccaaattctcgatcagcgcctaaaattaccatagaaacatttttcatttgtcaaatttggtggggtacaagaagcctctgcaataacgtccactgtacaattttgtccacttctgtccaatatttattacaaaaaatcctcaaaaatagccatttttatgtaaaacggctaccaaaaactcccaatttgaacgggcacagattgcaataattcaatcatttcatttatccattttatcccccagctttgggaccacaaatgaccaaaacaaataacatatatccattgcatttaggccttttgtcccattggcctttggtccattacatttcggccttttgtttttcagccttttgtcacattggcctttgctacgccatctttcggccatttaacaaacataacttttcatgctgatcaaaaaagtcctttgctccaccgtgatcagaccactccttcgggctgatctgaaaacctcaaaatggcttgaaagcggggtaaatttgggaaaaaattcctagggggctggaaaaaaattttcgtggaagatgaatatggcggacagaaagagcacaaaatttgctataaggtgcaaaaaaccgcatgtcgctacgacttctgaactctgagaatttacatgtttaatttcgaacagcaaaaaagtattgtataattcttaagaaacagtgcattttacagtagttttgatcacttcgatattaatcgtccggagtctcagcgtacagaagtcgtagagacatgcggttttttgcatattgtagccaatgacatcattaatttagtcacttactttttattttacatctacataagtaagtatatatatatatacataatcaacaatgcgtaatatttaaaattaattaaaatattcgattttttaaaatttgcttcccccgtgcccaaacttttccccctgcgttttatataaggcccatttttgatgggcggcaccttttcatctctggcactttcccaggtcaacatcgattttcctgtcaattctttcgctaaatatgatgccgattgcaaacagttggaaaaattcaattgattttttggctaagaattttgcaaaaattttggaaattcgaaaaacaaacattttattagagtagagcggcaccgggaccaaaacacggacaactgagtacaactgagtaccgaggtcccgaatatgaccgggaccgggaccggttcctggcgttttccagttattccacattcattaaataatgattctgctcatcattattgtcttgtctgatatgatgagttcttgcaatattgttcttcttcaaatccatcaggaccaattttaaataatttttcgtcaataaaattttcttaatttgaaattttaattgtttccagtttttttagaaattttttttgtcctcaatactttttattttcttttaattttggcttaatttcgtataaatttattttcttcactctgtccatttgcaattttaaataaatgtccgattgggttaagaaaa

SEQ ID NO: 7568 - DNA, 2651 bp, Heterodera glycines
tcccggttttgaccgggaccgggaccagtcccggcccccccacgggttttcccagccaaaaattcccggtttttcaacttgaaaaggtcccggtcccggttaagcccaaaattcccggtcccgctctactctaatttatatgtataaaaagcttaaattaggtttatttttactttatttttttctttttctttccctattttatacgccacatttcacagttaattaagacaacaatttttattgttaaaattcttctgatttgcaatttttttttatcgttgagaaattcgatggatcggatgaaacatttgttgagcagcacgggtgagcattcggatgtgcactttttggtgggggacggagacgaaaaagaggcgagttaaattcttttttttttttaattttttttttaattttcaatttaaattttaaatttttaaattaccctttttatatttaatttcaattatgtaattttccacatttttaaagattttaccagcacataaacacattttgatgaacacttccgatgtttttgaggcaatgttccgttttgactcccaaaatggaaaagcggaaaatggtattaatattaatgatgtaaaattgggaaatccaattagtctgctaatttccctaattaatttaattagcctcagctaattgtcctgttgtggaggtccccgacattgaaccaacaacgttcaaacttatgttgaagtacatatacgtggctgattttagcgaattaaacggagaaaatgcaatggcagtgctttatgccggtggatttatttttaaattaaattaaataaataaaaaataataatttttaattagcaaaaaagtacaacatccccgccctggtcgaccgatctttgcaaattcccatctccgaattgcgcaatgttttcatggcttatgcctatgcttgccttttcgaattgaaggttggaaggacagatttaaattcatattttaatatatatccccctaatttaaaaggatcatcagtgtttttttgtataatttttgataatttaattatattttttaaggattttgccaacaaatgtctgtcttatatttgtcaaaatgcagcccatttgttcaagtcagatgactttttggaaattgatcagaaaatcttttgtgtgcttctcgatcttgatcgtttgttgctaagcaatgaatttgaaatttggaaaactgtaatttcgactttttctttttttcatttgcattataattttcgttttttttcaaatttaggcactccgttgggccgatgaaaaatgtcgtcagaatggcattgaatgctcctcggataatcgtcgttctgtacttggtccggcattgttcaaaattcgttttccaaatatccctgaggaggatttttcaaaattcgttggtaatcggacaataaaaatttgaattttcttttggggcatataaatttttacattttttttttaaatttttcagttccatccggtctgttaacagtggaagaagtgtttggcgtttatcagttcaattcccatccgaatctttatcttcgtggagtgcccgagctgtactcgttgaaattcccaagccatggacgaatttctgattggaacacagccaagcgcaacggaagagggacactggcgttggaaattgaaaaagtgtcggaatttgcgggagagtctgtcgggggttaccgatgcagtgataccgtatacatcaacggattggcatggaatattcaagcagaaatcagggaaggcactgctgctgatgatgagaagaaatatttgggatttttcttatggtatgagcgaacaaaacacggtacaacaattttaattaataattaaaaattaaagaaaaattaatatttgttttttacaaataatagaaaaacctttgaactgccttttttcggcaacatttcgaattgtgtcggaaaagagcgaaacggagaattccattgggacactttgtgattataacaatcaaatgaacagcagttggggatttggaaatttcattagctttgaggtgagtgccaaattgtttccttaattaatattaattaataattatggctaattaaggaagtggtcaacccgatcaatggttattataacagagaagaggacaaagtgacactgaccattgatgtcatgactgttgatgaaccaaaaatggacaaattcattttgggtcaaaacaaatcgacagggacactttttatggaaattgaaaaagcgtcggaatttgggcgagaagtctttggaagtgatcgaaaaagtgaaactgtgcacatcaacggattgccatggaaaatattggcaaaaattcaaacgaaaaatggaagcgttgacaatgagaaatggttgggcatttacctttcgtgcggtgctccagaaaaaggtgtaaatgaactaccaattattgcctaattcattagcgataattaattgccattaagatttccattggcgctgcttcgttcgatcagcaatttttcgaattattaatcgaaaaaatggtgctgagaattccactgttgggacactttgtgaccgtgttaggacaacaattcaaccaaccggggatttcctaatccttagaagattgtggtgagtgacaattaa

SEQ ID NO: 7569 - DNA, 1583 bp, Heterodera glycines
caacgaatgaaatgccatcagcaggaaatattcgcttatttttgtcccccaactgataataatccaacggatttatttgtgtaaattaaatttcaaaaaaaatatacaatatttacaataaatgaattaatgaatggctaatggaattaattgattagagaaggaaagggaaaatgaaagggacgaagagagagattaattacataattagggattgattgcacagaagaaagagaacaacacgagctgagaatgagaacagagagagaggagcgatgagaaggacggacggagtgacacaatcgaagacaatccgtcgcggataattagcacaaatcacccaattggcaataattagcactaatcacccaattggcaaagtgaacaagcccactctgatggtgcatcaccacactgaacaccttttggagcccaaattcattgcacttccaaccggacaattgaaatgtttggcaaattggggcaaattgccgagtacgacgttaaccctaaggcagcgaatgaatgaacgagtgctttggcattcttttgaccttaattcccatttatgactcacctcgattctggcggagaatgagaatcgaaaagggcagcaaataccgcggcctaaaaaggaaaatgaattatttgccatgggaatgtcaatgttcggcacttcgtggcgttggttggtgcaccaactctgaacaaaattagtgagaaaagtttcgactgtcctttccccgatcgcttacaaatgcataatttatgaagaacagttgctccgggccgaactgctccaacccgcgcactctctgcgccccattggcacgacccttcgccaaattggcactcattgcagcgaaagcggccctttcacggggggggggggtgtatttaaaggggaggaggcatattttgctgcatttgagagagccataggccaaatccgtaaaaaatgtgtcctcacataaaaaggcgtgcagttaaatggcggtcatagagcactaaacagtttcaattcgaagcggagagcagagaagcgagaaaagctgacatagagaaagagagaagccgagatgagagagagagcagagaaattgaaaaaaaaacatatgacctaagtaaaagaaaaaagaaacgagaaacttatgaccaggtcaagaaatgaagaattagagaaacgagaaaagccatcatagagagtgtgagggacagttgagcaaaaaaagggttagagaaacgagaaaagccacgagagataagggccaagtcgagaaaagggagcagagaaattataaatgccacaaaaaagagagagagcgaaagcggccatccaaaagaggaggagataaatgtaaaaagccacgagagataacgaccaagtcgagaaaagaagggataggtgagaaagggagagagagagagaaaaaagagagaggagaaagagagaggagagcgagagagagatgggaatgagagagagagagagagagagatgggaatgagtgagagcgcgaaaagagagagagaagatagtgggcgggatatcaaaagaaaaagcatgtgatgggacttgctgc

SEQ ID NO: 7570 - DNA, 3760 bp, Heterodera glycines
cattccgccattgtccgcgatgttctcgccctgggtcaagttgccgttgacctaaaattccaagcataattatggagggctgaacttttattttgtttgttttttcttttggtccgttccgcccaaagtcggccgaatttcccctcataccttccccccccccctcccccccccccccattttgtcaatttttacatgaagtccttcaatccccggcacttggattgcgttgtattggtcaataaagcatttcttctgcccaataaatgccgttactgttccattttgccaccaattccgaacatttccaaattggtcatgaagccgacctaatgagaaatgttttggaaaatttctggcacaaattattgaccattattgtcaaagccatgagtaatttcatgggccaaaacgacgccaattgagccgtaattcataggtctaaacaattaaaacaaaatcctaattaacgattttattttatgggttttacatcggtcgggaggaattgaaaaaaacgcccttaaattgtcaaataataaaaaaaaaaaattaaaatggtgctggaattggttgtaacctgaaggattcctccggtaagaactgaaatgagtaaattaactcagcaaataaaagggatggaaagactgaccaattgaatttttaattgggtaataaaacccattgatcaccaaactgctgaattccacttcaacgggctcgagcagttgcaggaaacttttgcggttcatcagtttggacaaagaaaaggccatttcggggaaagtctgtcctttcgtgcacgtcgtactcgagaggaaacgcattttttgggggggggggattggcaattgtaaagaacgaccgacctctttgaaatgattttttagtttcgtttcattaaaaatggcgtccatgtattcgatcaaaacattgagtctctcaagctgaagttgaacaaaccattggcattttgattgaattggcaaataatggcatgccaaagtgccaatgctcagtctcccctcccctccatggcacccttttgaccttttcgaatgcctccgacttcgttttgggctccatccacaaattaaggtcgagcatttggtggaaggacgtcttcacatcttcgaacatttccttcaactgcgttttggttgcattcacttccaaatgccggtgaatataaactgaaagtgaagtgaccataaaagggaaagaaatgccaaaaaaagattgtcaaatcgcctctttcgatcagagcggggaagaagccgagcacaacgtttttgcattctttccattgggcgggacgtgccaaagatccttgcaaaacgcggtccaattccttaaatggtttaaaaaacaattgtacaaatgggaagaagccatgcgcacaaattgagcctccaaaaagcggttgtccaagtggccaattccgctgaggatcactttccaatccatgtaatcactgagtatttgtcccgacagactccgtgccaatttttcgaatttctgaaaacatttcattttgtgcgagttgagttgccaagttggctccaactttaatcagttgaacttccgcaattcgcactttgactgttccaattgcttcggaataccttcggctaatcacttcgtttggcaaaatatttttcagatatcttggccaattaatctgaaaagactcaaagagaataggccatttggacaatttgctcactgttccagccaaagtgtcttgcaattcctaaaatggaccattaaaaacggaaacactcagttaacggtaatgatcagttctaattatgtcagtcagttagctcattagcataattaggcaccactaagtggcctgctttgcccacatggccctgcttctgatgcccacctgcagagtgatataactgtcctctctgtacgcgttgtcgtagtgtttgtcggtgccgttgatgagtagtgccattcgcacttccacctccacaaatgcgttcactctccgttcgatgtccgccgctttgtttgcccttctgaacaccgtttgccgttggtcgtcttcgtacaacaattccaacactttgcgcaaaaattgcttcagtgccgcgaggtattttggtgccaaattctcctcaatgtacaatttctcactgagcagaaacaaattattgggcgatatctgaacactttgctgaaatgggttggtgaaatgggcccaccgtcagaatggtggcggaagtgttgcgcatgtcggggccaacgctgaccgcgtagaaaaggttgacaggccaaactttgagcagccaatcggtgacgtaacgcatgccacgcgactgcttcaaagacctgagcaaacccaacaatcaccacaaaattggcatttcaatcctccgactttaatgttttcagcagaatgttgctgcccgccacacggcgactgacattgtcctgaaggaaaagcgaaagggtcaacaaaagggggagacaattgtgaccatgcaagcatcgaacatggcgaacatcatccgatcgtaggggggaagagcatggaaatgagcacggtcgtccaaaatcgctgaacaatacacaataatcgaagaaaagtcgaattgttggcaatgagctgaccgacccttcactctgtcctcgatcaaattgttgatcagttggaattggttggcactcgtcttgtcctcgtcgatcggattcgacttcatccatccatcgcaaacgaattcatagaaattatcgcacgggtttaaactcagatttagcgatgcaacgagttcggggtattcgaacagattcgaaccgaacgaagaactcggtgacgagaagggttcatttgcaaaaggcagaagcggcggtgtcttcggcgaagagtcggctcgttgctgatcaccacctacggaggatgggtgaaaatacaaacgacggtaattgggagggacagaccaagcagagagtttaaacatagcatccgtaattttgtatttattaagcaatgttttaatcgactcatttaaagcgattaaaattcggaaaatgccccaattccgctgcgccttgtctgacttatgcccaccttctgctgagttcacttccaggaagtcggcagtgatgttgaagctgctcatttcaatgactccgttttgggaagagaagtgaagttccgggatgaaaatggtcacatttttggcctccaatctgtccaaattggccatttcttcccattttgcccgtccgtcccaacttgaactgctctttgcctccatttgtcttccgtcctgtagttggctgaaatggactctcatttacactgatgattgaatttccgcccgaaaatgtttcatttgaggacaatgaaaagggtttcgtttctccgtccggcaaccattcgccaaaagcgccaaaaaatgggcacaaagcgaataaaaatggaaatgatcgaaaggagaagggatgacggacactcattctatgttgaactttccttgatcagttgatttgctaaagctgacaaaggaaacgatttcatccgacaataaaatggggcgctgacaaatgagcggagcctttcgcattaattgttcggctgagattgccttaggccatgaaaaagtgagcatcacattggggtatgagggcaatctgccggatgaatgaaatgggatatggccggtgggcgggcggagacgaatgatggatgggaaggagggcccggcgggggaaagagggcaattcgcgagggggggggggg

SEQ ID NO: 7571 - DNA, 2124 bp, Heterodera glycines
  unsure (1)..(2124): unsure at all n locations
cttctctacaagttctacacattcaaacggttgctgctttcttacagaacttcgccaggncggtcatattctccatgaattgtttatcgacaactcttcccccgtggaattccacgccgttctctttgaggagatgatacgcattttgtgctctttccaacaaccactggtcggtctggacgtattaaaccccgaagaaatggtcagttttcatccctttcttttgtattattacgctgtttttctattatttcagatcactcctggccttgaccgcgaattggtgcaggacatgttccgttcattgagcatgttgcacctgcaacagcagttattggcaacgaagagcaaaagcggaggaagtaggtcagtggaacgaccgacaaaggcactgttccctccgaacgattcgatggcgcagagtgacgaactcagcgaaagagttactaatctgatggaaaccctacggccaatgctcacccaagcattggcaaattgttttttggattaatatcgttgtatcatgttcgtttgaaataacttttttgaagtttttcaaattaccgcttggaattgtcatgcaaagacaaggcttacaatgagaaaataactttaatcaaacagaggacataccgagttttttcaaaaagacaatccaagtcaaacccaatctttaagaaaaataaaagaggaatcgaattttgatatctcatcagcaatcactttccattctgagtttgcgaactgctgctgctactgctggtgttgctgctactgaacgagatggaaatgttgaggctggcagtgactgcggtgcgcacttttgtgcaagtgatgcagcatttggacatggacagggcgttgtaattctgcgatggaaacttatgattgctaatgagttagtgtactgcttgctgaccgggtcaagacacgttttcatgtagctgggatcggtacagtttccgttcatcagattgtccgaacatgctgaaaatggcaatcagtacaccaaaagaaaaaggcatggatacgtgtcgggaagttcggcttcggcaccactacttgtccgtcttcctttttggtgcactgcgattgcatctgttcgtagtccgattgcaattggctatagcttttctccgtttccgctttgatctgttccgtctctgacatgcttttttccatctctatttgtttctgttccatttgctttttttcttccttcatttgactattttgttcattcatttgcttgttcgactcttccaattgttcgttctgtttcttcacttcgttgtattcatttgtcttcgtttcatacatttgcatagttgttattgtttttgtcaccagcttttggtaactttctactaatttanagtattcttgtatcatataatggctttgatcgtgttgcgccattgaagaagttgaagcagtacttggtgttgaatagctactgcttgaaactgtgcttgattctgtaatcggtgatgatgcacgtgtagttgaactctctgctgacgtgaatattgtacttgttgattcgatgcatgtcggtgaacttgatgtcaccgaacttgtgcttgattctgtactgggagttgaacttgaacttggtgtcgaggtactggtcgaaattgtgcttgattcggtactgggagaggaagcacttatagtcgaactagagctaggtgtcgaacccgttgaacttgcgcttgactcagtattagtagttgaagcacttgtggtcgaactaaagctaagtgtcgaagtactggtcgaacttgaacttggtgttgaactactggtcgaactcgttatagttgaacttgaacttggtgttgaaatactggtcgaacttgtgcttgattcagtactagtagaaatagttgagcttggtgttgaagtactgctcgaactcgtgcttgattcagtaccagttgaacttgagcttggtgttgaaatactggttgaacttgaacttggtgttgaagtactggtcgaacttgtgcttgattcagtactagtagaaatagttgagcttgagcttggtgttgaagtactggtcgaacttgtgcttgattcagtactagtagaaatgcttgagcttgttgttgaagtact

SEQ ID NO: 7572 - DNA, 1520 bp, Heterodera glycines
  unsure (1)..(1520): unsure at all n locations
ctagttgagcgtactgttgatatttgatcatttaatttttattctatatttaaatgggcgtacttgtcgataaagtgctctcaatttgaccatcctccacctgacccttgtccatttccagatcctcctccaaatcctccccctgatcccgctcctccgccattccctcctccatttcctgctcctccaccatttgctgctcctcctccgtttcctactcctcccccaccaccaccgccacctccagctcctcctcctccacctccgcctgctgccactcctccattcatgccttggccccacccttggccactgccttgtcctcctccccctccccctccttggccaaaaccttggctattactcgctgcgttgctcaagcttccacaagaaacatgatggaaaaatacattttcaagaacattaattataacaataatatggacatattgtataagcttcatattcctatatttttggtaaaacttttaattaacaaaagaatggcagaaaattattttctttttttagtgcgtccataaactgtttgagcgttaagcagaacaaatatatactatttataaagattaaaaccatttcgagcaagcaattggattggcctatttatgtgtgtctcacagtgaacccaggttaagctgaccaaacaaaaagtttctttttttatcctcattcaatgatttagcaaaattttattatacccaaacaaaaaatatttttaattattttctttgacagaagatcagtcactttctttatttagtcgaaagttttatgtttccaagtatttcttataaatagaatctaagcaagaatagtttttacaaataagtaaaaaattattaatttatgagcttaactgggaaaataattattatgtaattttaaaagaaatattaattaatggatttcttcaataaaaaataattatgcctccttggagttttaatcatgaaaaattcaaaaaaatcaactaaatatgatacctgactcaaaaaaatgccagacatatgtttttataaaaaatatatatatatatatcgaactgcgtttataagataacatacttctgtcaaaaaatataatgacacacatcaatactgttgaaacaaattaaatataggaataaaagtcaaattgtttaaatttttcaacccataaaaagaggaagcgaattttaatatctcatcggcaatcactttccattctgagtttgcaagctgctactgctgctgctactgaacgaaatggaaatgttgaggctggcagtgactgcggtgcgcacttttgtgcaagtgatgcagcatttggacatggacagagtgttgtaattctgtaatggaaacttatgattgctaatgagttagtgtactgcttgctgaccgggtcaagacacgtcttcatgtagctgngatcggtacagtttccgttcatcagattgtccgaacatgctgaaaatggcaatcagtacaccaaagaaaaaggcatggatacgtgtcggg

SEQ ID NO: 7573 - DNA, 446 bp, Heterodera glycines
  unsure (1)..(446): unsure at all n locations
ttcctcctccgnctcctcgtccgtttttttttcctcctcctcctccgtcaccacttccagttccttttcctgcaccaccactttctcctcctccccctccgtttccgcttcctcctccgtttcctattcctcctccgtctcctcctccgtttccttttcctcctccgtttcctattcctcctccgtctcctcctccgtttcctattcctcctccgtttccttttcctcctccgtttcctcctccgtctcctcctcctcctccgtcaccacttccagttcctcttcctgcaccaccaccttctcctcctccccctccgtttccgcttcctcctccatttcctattcctcctccttcgtttcctcctccccctccgtttccgcgtcctcctccgtctccacctccgtttccttttccacctccgtttccttttcctcctccgtttcct

SEQ ID NO: 7574 - DNA, 2580 bp, Heterodera glycines
  unsure (1)..(2580): unsure at all n locations
cctcctccccctccgtttcagcttcctcctccatttcctattcctcctccttcgtttcctcctccgcctcgtattccgcgtcctcctcagtctccacctcgtttccttttccacctcagttcctgttcctcctccgtttcctattcctcctccgtttcctcctccgcttccttctgctcctcctccttcgtccatntcatcgcattcatcacacacaattgtttcttttacaagaaatattaataaaatgctgaatagcgttaaacgcggccacattatctgagatcgctacacaaagattatttagaaagaaatgtgctgctcatcagtcagagagactaccaatttgataaatttaatttgagctgttataattatatcttttggagctttaataggagggcttaagtttcattaaagctaaacaaacagccaaaaatggcaattttttgcgacccgtttgttttattatttcagagattggaacttctgctgaattagcttaaactggtgacgacttgaagaataaggagcactcaaacaaattgtcattttctgcaaaacaaaattaaaaatttggttcacatttttcgtgaactttataaaaaattgtttcaaaaaagaaagcagcgtcaataataattattaattaatatttgtcatttctgatgagatcgctctcttcctcttccaatttttgttcctccctcaaattccttccgctttttcttctccctacctcctctgttgctgtttgtcccgcttctgtcagtgccattcgcagcgcatccatcgttttggccgactgttttttttgtttgattggcattctgcttaaatgcccaaaaattgactgaccattgcaatgaccccactgctccaatgtctctgtgctttgtcaatggcccgaatggcctcagggaatgcaagttgattgtccttgagaaatgtcaacattttcgggctcttccagagaaggagtgctctttctgccagctgaaacattattatccattttaaatgccaagtcgacaatttccatactcgtgcattttgactggtcgtacatcgaaccaatcggccaactaatggcttcataattgctcggaattggtcctcaccaacttggctcaaaatttcatccaactcggtgatgaacagaatctgaaagtgtaactattttcgccggtgtcactttcattttgcccacttctctgatgccactttttgatggccaattccgtagcagtgattttatcgcgggtttagccaatgaggcgtccttttcaacgaaaagcatcacacaatatgccaacttggagaaaaacattggcagcgcgggtgatttgtgtaatggaagcagaactcgaaacagaaactgtcgatgctcctccttcagcggcacattgaatccgttgatgatgtcgccaaggatttggagcagttcgtccaccccattgaagggcatggactcgaaagtgtgggacagcaaaatgttcgccatttgtttccgaatgccggtcctccgctccgttagttttgtgtaaatgccgtgtacaatttgccaggctttttcccgctcccgagagtccgccgagcggagcagctccagtgcatttaagcagaagcaatcggagatgaaagggtcgagctgttcggcggacaaacggtcgatcagctggcggagaaggcggtagaccaactgaaggtgaggccaggccggctccaagaaaaggctggacgagggcgaagaaccgagcaaatcctccgagttggactcgctccactgcggtgaaataggcactcggcgacaacacccttcagggcaaatcaagagtaattagcagttcgggttgaaggttgaagccagtcttcagtcaaacctgaacaggttgcactccatcgttttgaacagttcagtgccaatctcctcatttgccaacagtgcgctgtttctgccaatggcaacgaactcgttaagctcctttagggcatctgccttcacttctttctcctgtttttgcttcatcgggtcgccaaagtcaagcattttttgacattggcgcaacttttgaacaaataatttgcgttgcctaattgggtcgcaaattgcttcgcggagtgtcggaagagggaccttaggagggggagggcacattcgctgctgattatgcaagacgaatcggggcactgaccagtgctccgtcctcctcaatgctcgtcatgtcgctgttctccagctcggtgccgctctcctgctggccctgctccggccacttttgctgccattgctgggtctcaaggaactgctcgaccgagtcggccctcgtccgcacttcccactcccatccgccggcggaggataacattgtcgtcatttgctctctttttttccaacacactttcaattctctttcctcctccaattctccccacgtgtgcaatttgttcgtttgcttcgcttgtgactgtccgtgttgggctgacaatgaatgaatggcgcgaggaaggcgaatgatcacttagggggggggggtgaaattttgcttaaatttaaagagaaaaaacaaaaacaacgaa

SEQ ID NO: 7575 - DNA, 3455 bp, Heterodera glycines
  unsure (1)..(3455): unsure at all n locations
cgggcaaaatgcaaacattcattcacaatgcacaggtcacattacacacccaaccaaactcattttaattttatttctaaaattttttccatgaattttcgagttttgagtaaaaaataatttttctatcggataaaaaacgatgaaacgccgcacggtttttgacataataattcttttgttttctgtttcagattgccaacaaagctcgtgtcgatgcgctggtgcaactcaatttcagagacaccaaagggaacaaatgcaccgaaacgaatgaatgcgagcgcaactcacagcgtacgggngagggggggggggggaactcgtgaaaattgaaaccgaaaataaattattttttagggcaaattgtcaacaaaatcggacgaatttacgctgagaattgaggacaatttggcaatttgaacagtatctcctccaaaatctcggacttcaacaaggaggtcagtagtgattctgctcacactttgcacgaagtttcttttcccaaatttagatgctcaatttgttgggcgtcccaaaggccgtgttggagcatgttttgttctgtcaccaggaggaggccaatggtgggccgaagacgaaaaactcaaaagtttaaactcactgaagtcgggggggggggggaaatgacgccatggaaaaccataaataaaaacaaaattagtggaacggtgtcaaattttagcaattttccaattaaggtccgaagtggggctcttgaattttctgcattttgcttgtttttttggcattccgtcgtcccttcgtttttaggcctttgtccgagccgaaagaattgaaattgcgattcgatgcaatttttgagctgacaaacgacgtcaaagcattgaatcatattaagaaaaacaccaaagaattggtgagttggctttttttaaattggaaatgttgaaaaataaatattttcagcgcatgcaaattcaactgatcgacaagaaattgcctcattttgagaacaacatgagggcacggccgatgttcgttcattttgagggcggagagatgtcaatggcatttaactcttaaattttttctctttttggaaactataccttttgtcaaaaccccaaatttttcctcaattcgttgtgctttttcagctccgtctccgcattgatgagactctcatcacactgaagcacaatctgaagagcattgagcaccaattgaagacagaaagagaggcggtggacggcgaactgcgcaacattcgcaaacagttggaaatggcgaccaaatgcaaccaggagttcggtcagttgaccatccctggagggtccactgcgtttcggcgccgaccgtttcggcgccagctcagttttttgactaaaacttttctttgtcaaccaaatctaatattgttggtatcactcgaaagccctaagtgttctctattagcctgtcgaattccgaaaaatttcgttaaggttcaaaaaaggtaggaccagaagaattaaaaaaacgaaattttcccatcttttttggctcgaacattttttaaacttaacgaaattttttgaaaatttgcatgctaatagagcacgtgaatagctttcgaatgataccaagcttaataaatatggttgagaaagaaaaaagttatagtccaaaaatcccgaaaaactgatgtggaagaatcaaaaatggggaaattaagggcggggcaaaaagcgtgggtctgtgacccatttgtttgaaaagcaactaatcaaataccaacagatgattgaaagccgtgaagccgaatacacaaggcattgcttgaacagtgcggtcgcaaatacgaaatttcgggtgagcaccaaaaacattcaacttcatttatgccatccgacccactaaacgcctccccccccccccccccccgaatttcagtcgatgccaattttgctgagcaattacgcgaaaaagttcgaagcattgaagcgaaaaaagcggaatttacggtggctttttgtgctttggaacattttctttaattatttatttttttacaggaacagaaaaacaaatggccgaggccattgagaagctccgcctcagtgtcgtacagctgaaaaacaacggcacacagaagcgacaggagtgtgccaaactgtcccaggccatcgcgtcggtcggcggagagggaactgcgaacgctgggacaaaccacgcaaatgtggggggtgggggttacggaaaaaataaaggttttttggaattggattttttgggctgtccctcccccgttttctgtcccattctatcggcctaatttagcattgacaagctgactgcggatattgtgaagtgtgagtcgcagttgaagcagctcagcgacttctctctgtaggacgacgtgtggaaaatgctgcagggcattcatgtaattaattgaccaacgacaattgattacaggaaaccccagttttactgactctgcctaactctgattacctttttcaagacggacctgaacacattgcgcatggacatggtggagttggccagcagtgccggggacgagggcaccgtcggcaaagccaacgcactgttggaacgtgcgggcgacaaattggacctgtccatggagcacattggaacattaaagcgtcgggtacagctcagcaaccaggtggaaaatggcattactgactgacattaaattggctttttggcactttcagttggccgagttcaaagactgtcgggcgaacgccagcgaaaaagtaattcaaatggagacaattcgggagagcatcggtgacaaggcggagcaggtcaaacagttggagcagctgatcgccgccaccggtcgcgaattgcctgagacggaacgccaattgcgcgccatggaacgctcgaagaaggcaaaatgcgaaagtgctaaagcaatttggccgtttcttttcaaggagttggaaatgacggtgcagcaaaacttacgcaaaatgacgctcgacgtggacagcatcaacgcgacgctagacaaaatcaccgagatgggcgagtccaacgagcgcgaccgtttgagcatgttcgccacaccgacggactttcgtgaaatggtcacacacccttttggggataaaattaattaactgattgtttagtcttttcccttcagttggatgagcaaagactgcgtttggtgaatttggcaacgcgaaaagtcaattggagaagcaattggagggggacgaagggaaaaagcaccaattgaagacagtggaggaccaacagagacggatgaacattgataaacaagtgggaggaggggagggggaataccaaggcaaattgggcatgttgttcagctggaaaagttacgtccaacagttggaggaggccaaagagaacgcggcagtgaaaggcgtcgaaaatttgatggaaggaattgcgaaagaaagtacaaaaatagcaagaaagga

SEQ ID NO: 7576 - DNA, 3447 bp, Heterodera glycines
  unsure (1)..(3447): unsure at all n locations
tgacgaatccatttccttttttttatccattattttcagatgaacccacaacaaatttggacgaggataaggtgggtaggcgcaatgggcactgattgggagagggaatcactttcattcattcataggcactttttgattttggtccaaaaatttcccatttttatggtttctcccctttttcggctaatctgtcctctgttctgtcgcgtttgtcaaacacattccgtttcatatggaaaacattggcgaaacgtggaaaagttgggtccaaatttgaaaaccgacgccgtcggcgggcggcggagcaatcggagcacaacgcatttactaggcggacgacttggactttgaggaggacgaaaatgcgaatgtaaaaagacgagaatttgcggcttttaaatggaacattttgtttgacagcaaaatgattgagggggaacagaacaatcgccgctccggcaacagagaagaggacgaaatggagctgaaccgctcgctgcaactgattgtcatcacttacgtccgtcggctcgtcgagcatttgcacttggcatgccgtcccgagtacatctacagcatggccaaggacgagaacggcgtgtcgcacatcaaagcgcaccgacaaatttcggccgccggcgacggggacgacgaattggaaatgtgtctacttgagccaaaaaattttgaaaaacactcaatctcatcacattgatataggtacgtgtattcgcaggcgcatatttatttttgccttttttattttcatactgaatcattcatgatttttgtcaattctttttggttttgaatataaatatttttttaattataaatttttattcggatcagtgcttttttattgtaaaattcgcagagaaaacaaaaaattcgttcgtacgaatacaatagacaaattgaagcgaacgttgtcgcctcctctctgccaaaatgtgatagtcattcgaagggtccgcttgactatgccacgcatttggcaactgaacgaataattaattggtcaatcacttttgttcgaattccttcccaatgctgtccaaatatttggactctttctttgtcatttttggtgtccaaaataggacaagccgcgtcttcatccaacgcgagaaaagggacgggtcgacggccatcgccggcgcgtagtcccgaaacccgtcgttgctcatcagcagatgggcgtcggggcccaacagaagcgcagcgttcagagtgaaaaggtcgtcgtggattctgagaaaagggaataagttgggaaatcccatccgaatttcccgcccctccgatttaaaatgccaatttctttaaattttaatttgctttctctcattttgttcattttgctgcgcaagtcgaaaatgtgtcccttttcgcgaaaacagtgaatgaattcggacggaaaggtgcagcgagtgaccaccaaaatgggcgaaaaaccgttgcgttccaaggaattgaagaaggaacggacgtagccaagctgatgctgctccggcttgccgtccaccaaattgagcgcgtccaccaccaacggacgacgacttgacaaaatggaaaacattgggggacaaaaagcgagaaacaaatgaaagtgtactacaaaatggggcacccaaataatcgcccgccatcgttttttgtccttttcacctcgtcgattactgctgttgctcgctgatttgccgtttcatctctttgatcgttttcatcagcgcaagaacctctgaaagaaacgacgaatcagttgcggcacattcgtcgaaacaacccaattatttattttttcattttggtcgtttggcaaaaacaactaatttctcctcattaatttgtgacatttggacaaggcccactcctctgattatgggttatccaaaaggactatcataaatagggatggtaaaaatatggatataaaatcgcgaaatatggccataaaatatggactaaaaatcgcgaaatatggacataaaatggtacagtcaggtgcaaatgtttaacaccactagccattcgaaggagaaaaaaggaaaatccacaaaaaatttgtctaaaggcgagaaaaagaggaaaatccacaaaagaaatttgtctaaaggcgcctatcgcggcctattcgccaccgtcggacaccccccccccattccaaatctttttttttttttgaaaaaacgtcgcaaaaaaagctgtttgaaaaggaaaaaaatgttggcatgaccccctgcgtaaattttgatgtcgtcgacctcccccctccctttcgaaatcttggacgctctggatgtggaaatgtgccctcaaatggtctaccggatggtacgccggaacgatgacaaaaggaaaggtccgcgactggtcaaagttgtgctcccggcgagcacttttcagcactttgccttggcgcaatggggacgacgtcgcaatgttcttcgcgcaaaaaacgaatgggatcggctgcttgttcgaccatcgttgataaaagaggaacaaatggcggaacgtgaggcacgtgcaaagaaaaaggaggagtacgaacagaagcgcgagggaatcacaattcgcggacaaaaaaacttttgaggtcacgaaattttatcgaatttttgtatttcaactcaagaagttgtagtaaataagttagatgatttaaaaaacttacttttagaaaacaaatataaaattattgctatctcggagacttggttgagcaataagttagataattcgcttatagtccaaaattttccttacataattgtacgaaatgatagaaaaaacaaaaaaggtggtgacgtagccttcatcgtctcaaatcagataccttttgaagttatcaaaataccgaaaatcaaaaattctgaaataagttgtatagatattctctctccatttccgaccaaaaaattcgcttaattttggtttataggccagtaacacaagaaaaatacgaagactttatagaacttttagaagtattatcacttttagttgaacaatcaaacaattgtcttttttttggtgattttaactttcctagcctaaaatggcattctgatgtctcccaaaatctgactgaaaaatctttagaaaaactttttttatcattccttcatggctttagccatgtttagtgcttcaaaaaagaatggtcgacgcgcctttgcccttgcccatggtcaaacaagactttgatcaaaattgaatttgatcaaaattgaacttaacaaaatcaaaaaaacaacgacccagcatgtcattacagctcaagtaaaattcctgtgtcgcggcgcaccgatgtttatcacttatgaactaagtgcggctgaaaacgaaaaagcaagttttcttttgataatttcaaactaagaaatggggtttcagtaaaaatgggtaggattcactttgatttaaaaganaagtact

SEQ ID NO: 7577 - DNA, 5078 bp, Heterodera glycines
agttcatgattagcatgaataaattgttattctatatatttaaaaaaaaaaaattaattttatccctacggatggtccgatacacaaatttcaccaattcattctttttgcaaatataaccatcatctttagccgcttataaaacattaatccattaaatctattctaaaattataagaaggtaagaaaatgataagtaattaaaaaacgttaatttaatggaataagtggagaattggactgggttttgggcgtggcgacaggcccataattagggtacaccaaaatgggaatgagttcgtttttcaaaatgttatcaaatttcgctaaatatgtattgacgacccagagccaaaactcacaaaaccatttctatagcttttattagctttttataacgatagaaaattctaaaaatgattgcggtgatgcgtttaaaccgtttttttaaacggtaaaaatgcgataaaatgaacaaaatgtggacctcataattagggctgagaatttaagtcaaatgatttttttgctgcctctaatggtctttaaatgacttaaaaagtgttctaaacattgtctgaagcctctaacacggatttttctgtgactttttttgaattttacattttttgggatttttatgacttttttgagttttttgcgacttttttcgtgatttttttgactttttgaggcaaaatttgaattttagcgaggaaaatgccgaaaaaacaaagaaaattccaaataaaatctcgatcgataaaaagtatagttgagcgggaccgggaccgtgccggtaattcccggtcatcctcccggtcccggttccggattttgaaaagctcaggtcccggtcccggtagggaaaccgggaatcgggaaaaacaagcactggtatgaatggggttctgagtggaaaattagtgatgaaaatttgagtcaaaggaaaaaattttaaaaaataattaaaaatattctttaagagtgtcgcaaccaaatgtgcaaattgcctagtggctagtccccttgacttttgtcttcttctttcccctggttcaatctttttaaatgaaaatacgtacaaattgagcctacctaataaatccaaaaaacatgcctttctgttgataatctgttaacaaattgcactcaaattttaaaaattttccccggcggcgcctaccggcaccgccggtctcccctttcttccacaaaagttttttggaaaaagcgcgccgaaaaaatgatgagaaaagtaatatacatttctaataattgatcatttagtccaaaaatgattatttttttaaataattgaaataaatttagtttgaaaattttcattaatttaattatgttttaacttttggattttattaaataaaaaacaaaataataatattgtattagtttcacttgaaataaatttaaatttgaattttttttaatttttaaaattttttaaaatttttttgaatttctaaaatttcccggttggtcccggttcccggttccgaagaaaaatcgttgtcccggtcccggcttctcaggtcccggcaagtcccggtcccggttttgcccaaaattcccggtcccgctcaactctaatattttctctgaaatttgaaaggaattttaacactgtcacttgcaagcatttcgtggaagctatattattttggcacagtgatgttggacaaaaatagattttcacagattaatccctgtaaccggtttttcaaaaatatctctattaattagctaacaattaaattagttaatcatttattaatattatctctggaataaaaaactaatttatgatatggctttattaaaaccgaatttaaaggcatttcgctgctatatttgttttgtcaaaatgatgttgacaacagtgcagaatgcggcgaaaatggcggatttaaaattgcgacgccctttttaaccattcgagtgacgctcagtgttatgccccgtacttttagcaccgttttctcctccccgctttgtcggtgccgcatccgcagggcgtactgtttgcacccaccggaaacaaattacacgagttcatggaccggccattcatccgaaaggtcgcctagatggggccccgtctccagagggcacccgtccgcctcacgatgggcgaaacacacactgtccgtgtcggtgtagatgagcaccgagtttggcgcgcgaacaaccgtctgcattagccgcaacaagtggaggcgcgcgactgatgttgtccaaagagagagcacaatgtttgagcactcgtgttcctccacccattcgtttccggccgcataggtgaccaatacgcattagtcggtcagctggtcaatggagctgacctccaccgctgggttgttaagcagagcgcgcagttccgcgggcgagtcggtcacaatcgttttggacaacccgttgcgtaatgagaatcgcccccaaagtgagttgttgcacagttttgcgatggtccgcttggccttgttgtgcaccatcttttccctctcaatacggattccgaatttttcctcacattcctctacgaattgctgctgatcttcctcggttgtgccaatttcgtccgggaagcctcaattgacgtcacagtggacacccacccccgctcatcatcttcacgatgtgtgcactcgtagtctttattgacggctccatgcggatgtttcagagcgcacgtacggcacagcgggaacagaagtcgctgatcaaatttcacgggcagtacaggcatgtcaacgtgatggggcggcacaacgaagactttgagaatgcctcagaccggcacttggtcgtcgcgtcgccagtcaaccgcctgctcagcttcaccgatgatgttcactcgtgttgggtggcccgcaggatatgctgtcacagcattcgtgtgggtagagcgaacgaacgtcgtaatatttcatccgccacccctttggcacctcataatgcagtcgttgtggacccacacgtcctccatggtagcagtccttcaaccgaattggaccactgtccttatactgtgcaaaggcgcgcttcatttcgtcgttgttgcgcttctccgcgttgatttcacactcccaaaatacgagcacttgttgcaccttagatgtgatgaaggccatccgtcgcgcatcgtcctaccgtatccgctgcgccattttgccgttcgccatcactgtttggggctgaaaacggtgacggggatggtcgtgcgcgttccagtggcagccgttgacttcgatcacggtgtcggtcgccgcgatgtatccgtccacagtgtattggccaattttttctctccgtcgggcgagtgtgccgtctgaatgctcaccccgttctttttggcgtaccagtcaatgaatttgagcgctataaggctctgggtgtttgtcgtgtagtagccgtactcgggcacgatcgcgagctgatctcgcttcagatgattgaggcgaaagtgtctcatcgaggcactggcgatgttcatcggctcccaggttatgtcgatgccaccgacaatcacatcgaatgcattatcgttgtcttcttcctcctcctcctcctcttcgtcgtcctcgtcatccaagcatccatgccactccaacgggtctctgatcgccaaaaactgtgccaaaagcaaccaacgcctcaattagttgtgcgtgtcgttggtgcagtaggctgcgagctgttcacataggtcgaactgctgatggtggtgttctgcgtaccactggtcgaatctgcgctgtcggtcgggcgtcattccgccgtataagtagtcagcttttggcggtagcgactgcagaatgtgcccataactcgcctcaacattcgccaaatgagggaagaactccttatcctgcacattgagtccgaacgccccgggcagagcgccgagcggcaccggcataaggttccagctgtctcttacgatgatctctgggtttttttcgccccgcgcaattttcatttcatataatttgttaccacgacggatcatttgtggacaaaacccgttgaggaagaactgtcgaaacagcataatgttgtcaaagcgacccccgaaatgggcgaagaacgaattgtggcaagtattagcactgattctggaagtgccgtgcataatgcaattgaaaaaggacttccgattgtcaatgacgatctttttaaatgaaaatacgtacaaattgagcctacctaataaatccaaaaaacatgcctttctgttgataatctgttaacaaattgcactcaaattttaaaaattttccccggcggcgcctaccggcaccgccggtctcccctttcttccacaaaagttttttggaaaaagcgcgccgaaaaaatgatgagaaaagtaatatacatttctaataattgatcatttagtccaaaaatgattatttttttaaataattgaaataaatttagtttgaaaattttcattaatttaattatgttttaacttttggattttattaaataaaaaacaaaataataatattgtattagtttcacttgaaataaatttaaatttgaatttttttttaatttttaaaattttttaaaatttttttgaatttctaaaatttcccggttggtcccggttcccggttccgaagaaaaatcgttgtcccggtcccggcttctcaggtcccggcaagtcccggtcccggttttgcccaaaattcccggtcccgctcaactctaatattttctctgaaatttgaaaggaattttaacactgtcacttgcaagcatttcgtggaagctatattattttggcacagtgatgttggacaaaaatagattttcacagattaatccctgtaaccggtttttcaaaaatatctctattaattagctaacaattaaattagttaatcatttattaatattatctctggaataaaaaactaatttatgatatggctttattaaaaccgaatttaaaggcatttcgctgctagatttgttttgtcaaaatgatgttgacaacagtgcagaagggagggaaaatggcggatttaaaattgcgacgccctttt

SEQ ID NO: 7578 - DNA, 1768 bp, Heterodera glycines
tagtcagcttttggcggtagcgactgcagaatgtgcccataactcgcctcaacattcgccaaatgaggaagaactccttatcccgcacatgagtccgaacgccccgggcagagcgcgagcgggcaccggcataaggttccagctgtctcttacgatgatctctgggtttttttcgccccgcgcaattttcatttcatataatttgttaccacgacggatcatttgtggacaaaacccgtggaggaagaactgtcgaaacagcataatgttgtcaaagcgacccccgaaatgggcgaagaacgaattgtggcaagtattagcactgattctggaagtgccgtgcataatgcaattgaaaaaggacttccgattgtcaatgacgatctgatcagagccgctgaacaggatcagacaatcctgaaggtcaaaaagttcgtcaaaactcaatggccaaacaaaaaggcaatttcggacgaacttatgcaattccaccgcaggcgagaggcattgacaatcgaaaataattgtttgttatattccgaacgagtcgtggtccctgcctctctacaaaatgaggtactgcaacttttgcacaaagggcaccccggaattaaacggattaaaagcctcgcgcgccaatacgtttattggcctggaatggacgagcacatcgaaaacatgataaaatcttgccaaccgtgtgctgcagaagcaaaagcaccagtgaagactgaacttcactcttggccgaaaacggatggtccatggaaacgaatccatatggactacgctggaccgttcttcggaaagatgtttctcatcatcgtggactctttttcgaagtggcacgaagttttcgagatgcgttcatccggaacaaccgcaacaattgaaaaattgcgcggcatttactcgacttttggcttgccggagactttcgtcaccgacaacggcatccaatttacgtccaacgaattcaagcagttcgtcactcgaaacggcattacccacctattttcggcgccttataaccttatgtcgaatgggcaggctgaacgctttgtcgacacgttcaaacgaacgtccagaaaattaaaaggggagggaattgccaacgcattggagacgtttttggtcacgtataggacgacgccaagcgagtcgctgaatggcaaaagtccggccgaaatgttccttcagcgcaaagttcggacaacattggacctgctgatgccaaaacaaagacagccgatcatccgtgacgaagcaatggaaaagaacttcaaccgacgcttcggagcaactccgagattttttttagttggagataaggtttatgctcgtcaccggctgtcgcaacaatggaatgctggacacgtcacgtcttgcaaaggagtgatgtacgacgtggagttcgtgctcggatcaacatcacgttttcacgcgaaccagctgatcaagagtgacaccgatcaattggacgtggacccactgaacgtgtttaatgaagattttggtttgccaaaaatggcacatcaaccaaatcagcgcccaaatgaggccgtggttgaaccaaatattgtggacaatgctgagccagcaaatgatccaccacctgtcgaacaacagccaatttcaccgattcgtcctcgacgacagtacccgaaacggaaccgtcgtccgcccgatcgctactcgccgaagtgatctgaggacctgtgctcgctgaacagaaggatggaagacttttaaaaggggaggtgttcgg

SEQ ID NO: 7579 - DNA, 2039 bp, Heterodera glycines
  unsure (1)..(2039): unsure at all n locations
gcgcccacacaatggcctcgtcggtgttcaactgtctgcttatctctttgcttgaaacaaaaaacagaattaccgtcatcatcattttgcaattctccaaatttgatattttttaaattaaatatcggatttaggaaatttaagcaaattttaataattcaacttcaaacttccaaaaaaaaaaaattttatttttcatgggtgcacttgacgacaccgcgaaacccccattttaccatatttgtgaagatttgacccaaaatggcaaaaattggcatgttttggcgaaaaacggctacaaattcctgctttttcctcccggcgctgataattttaaatgacacaggagaaaattttttttaaaatttttggcccgaaaagaataaaaaaaaattgttttatttcgctctcccaaatttttttcctattgtttgtaaactttttgttcatttctgaccaaaaactgtttcgcttttttttaatccggtcccattttcgacaggctttgaattttgggtcaaaatgaatgggtcaatgggcccaaaaaagctgccgatgtcgccaaactcttgcaatcgttaaatagtgccaaccaacccctggagaaatgtgccgaggacggtctgtaggcgtggcatccgtgtgccggcacccatcaacacaacacggtccaatttgtccagcgtaagttgggccatccgcaacgcgtcggtgatgggctccatgtggaattgctcaaagtcttggaacatcgcctccaactcgtcccgggtgactttgacgcggaagtcgcggtcctcaaacacactctccacatgggcgtaatggtccgtgtttgccgacaaaatctatgggttttaaaagagcgtatttatgaaatcaccaaaaatatcataagaataattaccaggaattgcgatacttactcctattgtaagatgccatgttcaagtcgtaaccaaaaaccaaaaattcggagggggaacccgaagattttttttttttgaaattcgggccaaaaaagcttttctttaatgtgagcaaccgagagaaaaaaacagaaattttgtagctgttttccgccaaaaaaaaaagtactcatttttgcattttgtcgttaaaattcaaattttctgaccggcggtgccgataggcgccaccgagaaggcattcccactggctatgtttcccaaaaaaaaaaaaaaatcgctaaaagacaaaaaaaaaatttttttttcttttcgtcaaattttctaatatttttttctgaaaattcaacctgtttgacgcgttcggcctccttcatcagtttggccattgccctcaaattctgttcaacggtattgctcgtggacgggtgctgttgcttgaacgcgcggacaaggtggtcgcggagtcgaagtgtcaactgacgaccgcccaatgtgcggttgtagccgacgccgagcgtttccaccttaagcaacaatgcaggagcggaaaatgatagaattctcagtnttttcaccgtccacccttctcccccccccctctcccagaaattttttaaatcaaaaagaaaaccttaactcttttaatttaagtaaaaaaaatttaaaagaaaatgtgattttttcaaattacgaagtttttcaaaggtttcctgaaatgcattagaaaacttcgaaatttttacctaatttttttacaaaatgattttttaaagatttttcgggggttggggataccataaaagaactgcctccctcgatttttttttgttgaaatctatangcctgcncaaccacacgcgacgcacttgtggataaattgtgggtgcttttcgcttcgctgtggccgttgtgctggttggtgctgttgcttggaagcggtgttgctgccttcgtgtcattggtgacaagccaaattgacaaaaagggcccggcggttttgatgatccacaatcttaaagaacacccctgttaagaaaaaaaaaaaggggggggggggggggggggaaaaaaaaaaaaaaaaaaaaaaaaaaaatttttttttttttt

SEQ ID NO: 7580 - DNA, 2846 bp, Heterodera glycines
tactatttctttatctctgttaatagagaaaaaccgcatttacttctctctaagaaacttttttcccgttaacagattttcttcaaattttgcatatcaatagagaaaaaaattcttcatttttctatgctgatttattaattgtctatgctcaagttcaaaacttgcaagtttagaacacccatatattttttctaactcaccaaactgttcaacatttgcttagaaaaagcttctcctcatcaagagcttttgaatgataccaagatctttcaatttactaggtcgttgcataaaaaagggcgctttttcaaaatgactttttttaagacttgattaacgtttgttatgtcttttttgtgtgtaattcttttatctgaatgttctcgtcatgtttttgccaaaaattttgattttgtccttttatatctaaagttacagtccaaaaaattgggtaaggtcaacaaaatttggctaccattttacaccaacgtccataacttgagttaaaattgtcaaaacgacttaaaacttggtcagattatgaaatttgatgagcttaacaagaaaaagcctgaaagaaatttttctgaaaaagaaaaaacaaaattttttggccatgtttattttggccaagtttccaaatccattggccaaaccgaaagtcaaaaacaaaatccaaaataattccatcggggttttgaggctttttatgcccttaaataatataaaaaattacagaatcgcacaagtttccaaaattgtgttatgggcgattattcgaatttctgaaaacgaaggccaaggagaaaacacttgtctttggacaaaggatttttcttatattttttgaacacatgcaaaattattccagcatagtttatccgtaggaaatccttgttttaaatccttttttaaaattttaaacaacttccctaaagccttttttggccatttttcaaaaagtgggaaaatttgggattttttggccataacttttttaaaaattgtttgagtgcattaaaattgacgccattcaattcatctcgttattctgcatcagatgatattaaatttattagaatttgttacacttttaataaagttacactcaattttctggttatggccaagtccctaattttggcaccaaatttcattggcccatggctgacaggagaacaacttataggacatgctacgtcacccgtcttattccctggaccctatagacttaatttatggctaaattatttctctcaaaaattccttatagggtaggctctttaaagaatatggcaaggtcgtggatccagtgaaaattacctaggttcaaagaatggcacagaattttacaaaaagggcattgttaaactcccatctcggcggcaaaaggttgtagacagtcagggcaattactttgttaagtagctttttgatcggctttgttatgattgttatttttcattttttgttcataaatttttttccttcaaaaagcgcccttttttatgcaacgacctagtatttgatagccccaagagccctctataaatctacgaggttgaaaaaattcacccaatattagaaaatttatggtcaaaatgttcagaaaattattatttgaagttttttggatgcttctagaaaatgcattaaagttgtcaacttattttatgatttggtgaactgcaatagagtcaactattttaccaataagaaaaaagttatggtccactaattatgagaattttattgtagggtatcagaataatcgacaatgatttgccggagggaccgggcagaaggcttcgcaaaatgtggccaatgttcggaaacacatagactacatcgcaaacgcactcaatcacatggaggtaagcaaattcatcagtaaaatgtgctttttattaaattcccgcggttagattatgtgaaagttcataaaaaaaaaagatggaattccacctctcaaagagaaaaatcttattttataagtcatttgggaaaattgttgtctcctgtctctcccaattcattttctatcatttgatttgggtaggggatggttcgactttcccccgattcgttcgtatggacgagagtcgccggagtccaacacgttcattcgcttttgcctttctttttgccttcttcaataggcacgcctttggcagtctccgcaccgtcgccaattgcggtgggaacgtccggtcattcagccggacattctctaccagtcgtatgtgttaatgccgaaacttacgccagaagtgccggtggattgcgttttgagtaaatttgtgcgtgccgcgatgaacaaagtgaagtgtccgatttactcactttgcgttcgtttgttttcttccgcttttttccttccaaaaagtgttttcagtggaccccggagggcaaacgactgattaccggcgcatcatccggtgaatttacgctttggaacggaaccgcgtttaatttcgaaacgattctacaggtaattgggttctaattggattggcactttctgtctgaaatggggaggggtggtttggagtttttgtgaatgaggtcagacagtgcatttaatttaacgattttttttttttgttcttttgtgatacgcataaaaaaactcaattcatattttaggaaatttttaggtctcccattttggggtctgcctccgttagcatgtttattttttttgttttacgtgagccgctctttgcatttgcaggcgcacgacgtggccattcgggcgatgaaatggtcccacaatgaccaatggttggcgtcggctgaccaaggcggctttgtgaagtattggcagccgaacttcaacaatg

SEQ ID NO: 7581 - DNA, 2390 bp, Heterodera glycines
  unsure (1)..(2390): unsure at all n locations
gctcacatcattacgggtaaatttggtaaatgaattcgtcgtcaaattcgggtcattaccatttgtcaatgaaataaattactgcgattttgagaggaggagggcaatctttttgtttgttttattcatttgcgtctntaacaaaagtttaaattatgtgttaacttcggcatttaaatgatggatttttgtcatttatcaatattcaatttgtctagtgaaaacgttaaaattaattggcaaagggtgaaaatacgaaattcgataaaatttgactcggatcacccaacnncaagaaacaaagcaacgcatttagccagattaaaaaatgaatttgaacaaactgacgtaaaccggcttaaatattcaaatatactgaacaaacgtcttcgccaagtggcactccgaccgacgaataaatttgctcttattttgtaaagggcgcgttataatctttgggttgggcaccgataaataattagcgaatttaattttatctttttccattgaattattatcggcgtgataaagggaatggctgcccaatgactgttttcatttgtttcttcaattctttctccgtaaccaaagtcacttcttcgcttgcctttggttttgttcgcttttcgaccgccatttcgttcatttccattgtttttttctttcctctgattgttccctttttcatcccttccgccctttttcagctggtgcccaaccgatgtcaaattggccactgcttccgacgatgcgaccgcgcgcgtttgggacttcgcgcggtgtgcggaagagcgcgtcatgcggggccacggagcagacgtccgatcggtggattggcacccgacaaaaggtgaagacgagggagcgacggaaccgatgccgttgaagggattcccacatttggccaatttctcgaattcgtttattgcaaatgtttaggacttttggccacaggttctcgcgactcgcagcaaccggtcaaactttgggacgtgaaaacgggccaatgcttggccactctgtgcgtttgttgactgtgtcctttattccgccttctctcccccctcagtcatgaccacaaaaattcggtgatggctgtccaatggaatcggaatggcaattggctgctcaccgggtctcgcgaccacgtgatcaaaatgtacgatgttcggatgatgcgcgaaattcggtcattccgtgcacacaaaaaggaagtgacatgtacgaagttgcactttctgtcactgcttccccatctccaattgtttctgcttttagccctcgcttggcaccccgtccacgagggactttttgtcagcggaggcggcgacggatccatcggttattggctggtcaattcggagaaagagttgactctgctcgagcaggcccatgacatggtcagtgggcattgccattgtttttttcgggccattgccttttgctgtttaggccatttgggctttggaatggcacccgctcggacacattttggccaccggttccaacgacaacaacaccaaattttgggcacggaatcgacccggggacacgcaggaggatgtgttcggcatgacaagcgtgggaggggtgctaacatcgaccgcggcatcggtaggacggcccatttaatagacatttataaaatggggacgcaatcgaaggcactcgacgacgaccatcaccacggcagaagagaaacgcacgcgatcagtgaggaatcggcacaagcgcaagtggccatcccaggtgaaagggaacggacaacgaacggggggagggagaatggcactgtgcctggggcaatttggcatcccccgtccgaaagaattatctggacaatgttaatgattttatttttcatatcatttcttgctttattcggatcctcatcattcccttcccctttttgcggatacgttttgtcctgctccgttaatcgtttgcccttctaagggatgggaatcgacgattcattgcgttcgatgatgaacagagatgtatttgtgcagcacttccaaacgacccaactgatgtctttgccggggctgggcagtggccaaatgccaccgccgtcggccaccggggccaacactcaaccaatttttgttggcggtgggaggccaccgatgggcggagacaaattgggcaagtttaattctttgtgtaatgggctaatagatgggggcaaaatttttgccaaaggatccaaccattaaaccgattaccttttttgctttttacatcgcttttgcggtgcgtttttttaaatacttataataaaaacccgtttatttttagcaatggaaacgggaagacggcctcacaatcagttccacgagccgtatcaacaggggacgaggaggggacagcagcaacagccattcctc

SEQ ID NO: 7582 - DNA, 2014 bp, Heterodera glycines
aaaaaaaaaaaaaaaaaaaaaaaggggggggggggggaaaaaaaaaaaaaaaaaaaaaatttttttttttttttttttttttccccccccccccccccccaaaaataattttgtttttaaaaaaaaaaaaaaatatttttttttttgggaaaaaaaaaaaaatttttctttttattatataaaaaaaaaaaaaaaatgtttgttttttttaaaatttttttttttttttttttttttgccccttttccccggggttccctttttttttttttccccctttttttttttttagaagagaaaaaggagagaaaaataaaacccccctttttttttacctttttaaaaaaagcccccaaaatgggtgggttttttttgggtttccttttggggggccaaaaagatcccccggggggatgggctttaaaagggggggggaagggggaaaaccgggaggagcccaagaaaagggtcggtccaaccacaaatgaccatccccaaattggtgtcggaggcagttggagctattcggtaaaaaaggaacacacgcgggaaaagaaaaaaaattaaaattgatttcttttttggtcatttttctttgagaaggtctcgattaaaagaaacacaaaataataatttaaccattcttttcaaggtacctaacaatataagtaaaaattattataaatgatttattaattaatgctttagtgcttgctttttggctgtgattttgcatcaaaattccgagttccttgtcacatgtcccaaaataaaggcccaaatcagtggcggaaagacggcgtgaccaaatgtcattggcaaagtgacgtttagactgaacaaaaaacatttttattattattttcaatttttaattgccattaactgtttcatcgttatggtgtttgggcaaaagcgcccgaaagtgatggatttcaaggctatggtcctgctcataaactgtgtccaaaacggacacattattgccccgactcgccagcctaaacaaaacacacatccaatttaaattcaattaatattaattaattagctagttaattgattctatcttataaatcccctccaattttgtaaaatatttgtacttttgcatcaatggaaacaccgattggaaatggcttcccgtgtcatggaaaaaggtgaacagaatgtttgtacatcggcacttgtcaattgaaacaaaaagcacaacagaaatggcaaaaactgatgttttaagttttgccaatgccattttattggccacttaaataaaataaaattaatttaattaatattttttatcttttggccattcacttcgaatgcgaatgaatgaaagtgagtaacaaacaaaataaagcggcaaatcagcgacagcttatcggaaataattgggaagaaaaagataaaacaaatgaatgaattggtcattgtgaacaaataaaattaataataattatcattttagagaaaaaaagcaattattttgtcaaaaaggaaaatgaatgagcaaattttgtcgcgttatcgtacaataattcgtttaccgtatatttaaataaaatgaatttgaacgaggttttatagctgccaaggtttacaattgtgaataaaaaagcattgttggatttgcttgcccttggctcttaattatgacagtttgcaattaatttgataaaataattagcccgcgtgagtttcgcttttaaaattttccgctggtgctgctgcgttctgttctgcttcagttcgttctgctgctgctcctcaatctgttccatgtactgtctgagtgccaatccgcccacaatttccgttgtccgcgacggcgccgctccgccgccgcgtgccatcgtccgcactgccgccgcgcctcgtccggtgcctttcacgcgccgtccgccccatccgttgccctcgcgaccgaccgcgcaatggtcgcagcccttcagaaactcgcgcacaatttctttgctgacattggcgaagcgtttgcgcgcctccacataca

SEQ ID NO: 7583 - DNA, 1075 bp, Heterodera glycines
ttgctttaaatgccccctcctacgatgccacctccccccctcccctccgttggcactgtctttgccacgaatggcaaaattacgattgacagtagaacgaaaatattccaagcgatggagcagtgaaatggattaaaaacagatgaatggatgaagtcattaacattggcaaaaaattgaaagcaaattttgccatcatttgccaactgtccaataaatcattctcccctcgattcgtttttctgcacatttgtatattttctgtgttggaaataagcacatgcccttttctgttaatgccattttctctgtttttttctgtaaaagtgcatttttttattacgttttattatttcaatttttctaattaaaattctcaaattgtcattatttatatgaaacaccgaaaatggcaaaagaagtgaacggaaatgattggtttcggaatttcggtcattccttcggcataatgcaaaacctaattaaaattatatgttaatcaaaatttagtttaattaattatattttactctatgccatataagttggttattatatgataacagggctgccattcgttcttgaatgggaaggacgtccttaaaattgggtcctctcacttgaaaatttgaaaatatccttgaattcaagatgtccttgaaaatgaacactcgaaaaacattcaaaattttgtttttttttaattttataccaagccttttatatttaatgcaaaatttgttctaaatcgcaccaaaaaagacctgtagtttttattcgtctttggatttcacaaatttctcccgtcaaatccttcgaaatcagtacactcgtccctggaaagcgagttttaccaatgccaccagccctgtttaatctgttatagatgccaaaacattttatttaatagcaattaattaaaaagcaatttctgaactttggcagattattcccaatctgttctcgagtttttttatattaccagtttgttcacttaagtttaactatttgggagacattaattaataaacccaaatattcttatttgcttaaatgaatgctttggtctcatttt

SEQ ID NO: 7584 - DNA, 4580 bp, Heterodera glycines
taattttaaaaaatatggaaaaacattaatgttaaaaataaaaagaaaaatttaccataaaaatataaaattaattatttgcgaatgttatacatacataggattaaattaagtgtgtatataccaaataaatggttatgtaataatattacacaattggcagttggacatacacaaagaaaagggaaaaaatgagatttgtaaaaataaaaatgttaaaatttatttccaaagattgggcaattaattaatttgttttttaaagttattgaattgcgcaaatatcaaattgttcgtaaaaatattgcgccaatttttgaaaatttcaaatttttcaaattaattttgttagtgttttgtgcatgtgttgtttaattgatccaattgtgccttctttcgctctgccttttggtgccaaagttcgtttattcgctaattgctccccggtgagttcgcccttaaggtggacgacgccgtttcgttggtgtgccgactgcgtgcgtccgctttcgcactgcccggcgcgacgacgtcgtcactttcgggttgagcctaagcacacgcattaaaattaatttaaattcaatatttaaatataattgtaaataattctgactgacgaggggcgcctgcggcaacagaacgtaaccgccggtgggcgccgaagaagcggcggaaaagcgggacgaacgggggaggccgtggtgagaggtgacgcggtggtgcaccccgccactgctcactgagcccttcatcagttcgtagcgcatcggagaacggaaagccaaacagaagcgctgaaaaacgaaattcaaaaaataataattgaaaatgggaaacacccggcaaagcgaacgcggaccgccgcgggcgcaggcgcggaaaatggccaaaagggcgcagaagggaatgggaagaagcggaaaaagtgcaacggcgacgccgcaccattcggaccattcccaagagcgcaattggggcgaatatttggcgaaggaatagccgagaacgttgaggacggaaattgccttgggggaaaatttaaaattgggaaaaatggtgagaaatgtgtacaattggggcgaagcaaaggcagtaggagagagagagcagcaaatagccgacacaccaccagaagacggagctgagcatcgtccgcaaatccatggccaacgaatgggcgcagtacacccaaccgacggcgaacagttcaaatgccaaaatggccaacacagtgacgtaattgaggaagccgctggccaattcgtagccgaaggcaccggcctaaaaaacacttaaaaaatcaaaattaaaaactggggaaaaaggacctgagtagcgaaaaagagggaggaagaagcgcagaaaaggcacacgaaaagtgcgagggaaaagcgaggacaacactaattggggacagcaacaaatgagaggcatttgggaataaatccatttaaaaccaacccgagaccatttctcgccgaacgcatcttccaaagtggcgagaatggaaagtgcgagaagatactgtaaggggggggggggggtgaaacggtaatactgtaagacaaaagcgggaaaaagataaaaagacgaacaaaaacattgagaagaacgaaggcgcagagaaacaaaaagaggccggagagaatcttggcatgaggcagaaagccaaggaagacgagcaactggtaaaactgattctcacctgaacgaaaaataattgccaattttaaaatgccaaacaccgtaaccgaaagagaggaaaaggggtactgtaacagaaaaaatcacagaccctggtcaatcagttggtcgggactgagtccgcttttggcactgacatggccgacgagcgcaacaacagtggccacttggaggacactgatcagcgcgtgggtaaacaccaaaatgaatgagtctctgcacattttaagggttattctcgagatttagatgcatttttaagtgagggcactcacttcaccaaattgttggaccgtttgttgtacgatccgacggtgatcaaagcgccgaagccgacaccactggccaaaatggcctgctcaacggccgttttccaaaccttagcacagcgaaagtaatgcatttgcctcgacaattattgcttatttcgccctttgccctcccaccaaataatccttcaatttgtgccaatccaacgaatccacaaaaaattcttggaacatttcaacggcgcccgaggcgaacatcgcgcgaccgcaaagggccaaaagcaaagcgagcggaaccatgaaagagaactgccaaattggccaataaattaaagcgaaaagaagcgaaaagagagaaaggacggaccacaatcactttgccaagccaacggacgccgaaacaaatggcacaaaaaaccaaaatccaaataaggcattgggcgacgagaaaatgccaattaaaattgccaacgtcgacgacactgtcacttttgtgatccaaaaggctaaaatgaatgtaaaaaaattttcttcagtatttttgtatgttcacaaaaaataattcgaatttgtccgatttccctttacttttgaaatttgctcatcgccgactcctcgtgaaaggtggccaatctttggacagtgccaacgatggccgaggtgccgttctgactgatcaccgacatcgattctctgcagggcccaaattgaatctcgggaaagtttttgcaatggagccaaggcaggcctaaaattttagtaaggccgggactggaatgattaaaacggtgggactgaatcagtccggccacactttaccgggtctgtcgtcggttaatgtccaaaagagagcataaatgaaaatgataagtcgggccaaaaagtgagtcatcgtcgccttagacagtccaaattgatgaaaaatgtgaaaaatgggcactgaccaaaacgaaaagggaaaacaaaatttgggagattccgacacctaaattaaataaaataaatttaaaaatattttaaatgaatgcctttgaagacggggcaaatgttgtaaaatgcctggacaggcccccgcccggtcagttgaccaaggcaaatttcgagtgcaacaattggcaaaacgaccaaaacgagtgcggcgccataagcgaccaaaaaggcggctaaattaaaaacgaatttcatttttttgtaatttttctttttttacgtccgccgttgtcgaggataagcctgggaaggttcagaaaattggtggtggcgaagagataggcaaaagcggcaaacataaactcggatttggcggaccaaatgtcccgccattcctcgacgatcagagaagaaacctatgaaaaataagaggaggaattgatcggaagaaatggacaaaacaaaaaacaaaggaaaaactgatcaaacaatgccaaagtgaatggagagaatgccaaaacaaacagaaagtgccatcgaattaattaatcatttaattgaccctttgctaattaattattgcattaattttacgaattcgtccaattaaatcaccttcatgttggacaaacttctgtcctcaaaccacatcttttcagcagatatgtctcattagcagcagcagaagcagtgttgaaggttttgcacattaatttgaggaggaaatgaaaagcggcgaatggccgttcggttgggattacagtaatgaaactgcagcgaagtgagtacggtaatgttactgtaaaagcaaaaatttcacaataattcttcgtttgtgttcaatacatattaatgttttgttgcacacttccctttggcatttgctcattcactccctttttttcgtttgttttatttcggttttaatttaaaatgtgcgaaaaatgggcgaaggaatggcaaagtgtcggggcaattgcaacaacacattttacaacaatattattgcatttttacaaacattttgatggaaattggcaatattttctttcgttttgaaagggacaaacaaaaaaagggacgaccgaccgactcattatttggggaccaattcaatgaatgggtaaatggggggggtgaatcgaattaagattaacatgtcccccgagggcagcgcgggaaggcgggggaaattggcagggaaaggaaagaaattgcgacggaaaatgaaaaaagaaaaggagcagacgcaccaggcggaggaagaaaaaggttttgttattttggatgacggagaagggcattattcattcattcattggcacggcattttagtgacataagaaacaaaaaaaggaagtgagtgacaatgccaactttgaagaagatgagtccaaatttaattaatgagtggtcagtgacgagagtaaatggcaaaaagtgaggatgagagagataaagggggtggggaaatagtgcggagaaatggaggacagacagaggagagaatgggaaagaaaaggtcgaagagggggagaaatagtatggggatatgagagacgaaagggggacagagaaaagaagaaaagccaaccaatcacatcattgacattgttttgctaatttgtaaggtaaagtgaaaagaaggcgcaaattaacgccgaaagaacaaaa

SEQ ID NO: 7585 - DNA, 1163 bp, Heterodera glycines
gatcttaatagaaaatggataaagaaaagggtggtttattgaaaaaaatggtgttaattcgagtgcaggatctataaataaattaatattattttaatcattaaaaatattttagttatataaatgataaatcgaaatttattaatgctctgataaaaaaaatcatttgataatggattcaacagaaacggaaaaattagcactttgtggaaaatattttacttacagatttgaaggtttcagacgcggtgtagaatcttaaaaaattaatattatttaaatcttttataagatttacgcgatacaaattaaggaaatagtaaagttcatgtgatcttgatagaaaatggataatgaaaaggtggtttattgaaaaaaatggtgttaattcgagtgcaggatctataaataaattaatattattttaatcattaaaaatattttagttatataaatgataaatcgaaatttattaatgctctgataaaaaaatcatttgataatggattcaacagaaacggaaaaattagcactttgtggaaaatattttacttacagatttgaaggtttcagacgcggtgtagaatcttaaaaaattaatattttttaaatcttttataagatttacgcgatacaaattaaggaaatagtgaagttcatgtgatcttaatagaaaatggataaagaaaaggtggtttattgaaaaaaatggtgttaattcgagtgcaggatctataaataaattaatattattttaatcattaaaaatattttagttatataaatgataaatcgaaatttattaatgctctgataaaaaaatcatttgataatggattcaacagaaacggaaaaattagcactttgtggaaaatattttacttacagatttgaaggtttcagacgcggtgtagaatcttaaaaaattaatattatcttaatcttttataagattacgcgatacaattaaggaaatagtaaagttcatgtgatcttgatagaaaatggaaatgaaaatgtggtttattgaaaaaaaatggtgtaattcgcgtgcaggatctataaataaattaatattattttaatcattaaaatatttttagttatataaatgataaatcgaaaatttattattgctctgaataaaaaagcattttgataat

SEQ ID NO: 7586 - DNA, 1665 bp, Heterodera glycines
  unsure (1)..(1665): unsure at all n locations
attatttaatctnttataagatntacgcgatacanaattaagaaaatagtaaagttcctgtgatcttaatagaaaatggataatgaaacgtggtttattgaaaaaaatggtgttaattcgagtgcaggaatctataaataaattaatattattttaatccattaaaaatattttagttatataaatgataaatcgaaatttattaatgctctgataaaaaaatcatttgataatggattcaacagaaacggaaaaattagcactttgtggaaaatattttacttacagatttgaaggtttcagacgcggtgtagaatcttaaaaaattaatattatttaaatcttttataagatttacgcgatacaaattaaggaaatagtgaagttcatgtgatcttaatagaaaatggataaagaaaaggtggtttattgaaaaaaatggtgttaattcgagtgcaggatctataaataaattaatattattttaatcattaaaaatattttagttatataaatgataaatcgaaatttattaatgctctgataaaaaaatcatttgataatggattcaacagaaacggaaaaattagcactttgtggaaaatattttacttacagatttgaaggtttcagacgcggtgtagaatcttaaaaaattaatattatttaaatcttttataagatttacgcgatacaaattaaggaaatagtaaagttcatgtgatcttgatagaaaatggataatgaaaaggtggtttattgaaaaaaatggtgttaattcgagtgcaggatctataaataaattaatattattttaatcattaaaaatattttagttatataaatgataaatcgaaatttattaatgctctgataaaaaaaatcatttgataatggattcaacagaaacggaaaaattagcactttgtggaaaatattttacttacagatttgaaggtttcagacgcggtgtagaatcttaaaaaattaatattatttaaatcttttataagatttacgcgatacaaattaaggaaatagtaaagttcatgtgatcttgatagaaaatggataatgaaaaggtggtttattgaaaaaaatggtgttaattcgagtgcaagatctataaataaattaatattattttaatcattaaaaacattttagttatataaatgataaatcgaaatgtattaatgctctgataaaaaaatcatttggtaatggattcaacagaaacggaaaaattagcactttgtggaaaatattttacttacagatttgaaggtttcagacgcggtgtagaatcttaaaaaattaatattatttaaatcttttataagatttacgcgatacaaattaaggaaatagtaaagttcatgtgatcttgatagaaaatggataatgaaaaggtggtttattgaaaaaaaaaaaattattataggtttttagtcaacatcgaggctcaagacgggcgcttcgcgcccgtttttaaatttgttggccttggacgggcgcttcgcgcccgttattcaaattttgttggccttacagagattagaagagatacaacagtgattaaaagaggtaaaaagtgattaaaagaagtacaacagtgattaaatgaggtcaaaagtgattaaaagaggtacaacagtgattaga

SEQ ID NO: 7587 - DNA, 2806 bp, Heterodera glycines
  unsure (1)..(2806): unsure at all n locations
aatttttgaaaatttccgaaaacgaagtacaccgtctctctagagcttaaaatgctctacaaaaatgtcctaagtcaacttttcgctaaaatcaacccctgacgagttataggcccgggactcaaatgtcccgctcaggccaaaatttttttctatttccgggaaaaaatcgaaaattttccaaaaaaattaccaatcgatagagctcgaaaaactatgttttggaagtggtcttcgtttctctgggaaaattcgttaaaaattcctaaaattcaaaaacccgaaaaccgttttttaggcctagctcgaaaaattttgaaaattttcgaaattttaaaaactggaaaaatccagctcattgaactctacaataagtctgctggtaactccccgcccagatcaaaccctaatgagttattcaaccgggactgaactggacaaagttggtactgaaaaagtccacgaacctacagcctttcctattgcagatagaggcttggaattttttttgttttttagaaaacacttcaacttagccccctcacagcagacattttttgatttgggttttagaaaaaaagttacgggcccccaaatgcacgaaaaaatgagaaatccgtccctgggactcagtcgtccgcgctaaatttttctctatagttttcccagatgcgcctcaaaaagttgtaagacccttccactactttcagggcgctcccggccttcggccgggagaaaatggttttagcaacgaaactccttgtcaatataacgtatatagtaactagcgggtgcgtgaaccgtcggctatttagctgggaaaaagcgcttcgcgctttgggagcttcgctacctagattagctctggttgtggagatttggattttttaaaaaaatgttaggggtttttaggccgcttccagtgattagaagaggttcaacagtgattaaaagaggtaaaaagtgattaaaagaagtacaacagtgattaaaagaggtaaaaagtgattaaaagaagtacaacagtgattaaaagacgtcaaaagtgattaaaagaggtacaacagtgattagaagttagctcttgttgtggagatttggaatttttttaaaattatctgggacttttaggccgcttcgcggcctcgaacgggcgcttcgcgcccgttttttaaattttgttgggcttatacgggcgcttcgcgcccgtttctaaatttgttgggctattaaggcattcgaggcctcagacgggcgcttcgcgcccgtttctaaatttgttgggctattaaggctgcttcgcggcctcagacgggcgcttcgcgcccgtttttcaatttttgttgaccttgaacgggcgcttcgcgcccattttttaaatccgttgaactcatacgggcgctttgcgcatgttttttagcttgttaggccgctttgcagcctcagtcgggcgcttcgccggtttttcaatttttgttggccttggacgggcgcttagcgcccgttatttaaattttgaggtacaaaagtgatgagaagaggtacaaaagtgatgagaagaggtataaaagtgattagaagaggtacaactgtgattataagtggtacaacattgttaggagaggtacaatattgtttaaaattaaataaataaggaaacgtttttattaaaggttaaaaatcgagtgcattttaatttaaaaattttttaataataaaatactcttttattaattaaaacaaccttggaaattattaattgaatatttatttaatttgaaattaaatgaatttttttacaaattcaaaaataaataatgaaattctttaatttaaaaaaaataaatttaaataatttaaaagaaatcttcaaattaattaaaaacattgtaaaataagccaaaaatacaaagaaaaataatgttacaccgtccggattcgaacctgctgcccccccccccccctcagaacatgtcccagaatccccaatcacacagggattctgaggtcttgacgatgtcaaaagtaaaatctgatcacgtattcgtgatcagcggcccaaataacgcctaaagacatgtttttggaagatttttggtgaaaattttttttcacttaaaaaccatgtgctcccccctttggtcccgaagcccaaaatcacttttatttttgtatcttttttttaaaatgtgatagaaatgccaaataaaatttatataatagagcaaaaaattgcggatttttgtagtattttacttttacagtatgacttttcagaaccgagttatgaatttttttctgaaaaatcgaaaatttccagaaattctggaataactttttttcttttgaacattataaaaccaaataaatctcataaaattctcccgattttttgctatttttaaagctttaattcacttaaattgaccagtcctccattgagttatgaattttcaaattttaacccaaatttccaaggaccaaaaaaattaaaaatattttcgaatttttaaaaaattctaaaaaatctgaaacttaaaataaacatcatatttgtgctcaggaccctaatttaccccagaaaaatttttttcaccctctttttcacccaaaaaaaatttttgaaaatttctagggggcctagctcgaaaatttttgaaaattttcgaaaatgaagtacaccgttcgatagagcttaaaagctctacaattttgctctaaggccatttttggctaaaccaccccctgacgagttatgggcccnggactcaaatgtcccgctcangccaaaaattttttctatttc

SEQ ID NO: 7588 - DNA, 4480 bp, Heterodera glycines
  unsure (1)..(4480): unsure at all n locations
ggggncaactccgtctgagccaaccccgtctagccaactccgtctagccaattttcgtctggcaaactccgtctggcaaactccgtctcgccaactccgtcttggggccaactccgtctgagccaactccgtctagccaactccgtctagccaatttcgtctggcaaactccgtctggcaaactccgtctcgccaactccgtcttggggccaactccgtctgagccaagtccgtctagccaatttcgtctggcaaactccgtctcgccaactccgtcttggggccaactccgtctgagccaactccgtctagccaactccgtctagccaactccgtctggcaaactccgtctggcaaactccgtctggcaaactccgtctcgccaactccgtcttggggccaactccgtctgagccaactccgtctagccaatttcgtctggcaaactccgtctcgccaactccgtcttggggccaactccgtctgaaccatctccgtcttgccaactccgtctggccaactccgtcttggggccaactccgtctgagctaactccgtctggccaactccgtctggccaactccgtctggccaactccgtctggccaactccgtcttagtgtataaggggccaactccgtctcgacaaaaaaaaagaatttttttcaacgaatttttttaaaaatacacccctaagaaattaaaaatttcttaaaaattcatccactaaatccatttatttagtttcatgttctgatttttaaaattattcatcaaaatattgtttgacctaacagtttaaagtgccattaatattttagcactacgaaaatggaaaatgctgaaattaaatctcaacgaaaaatttaaaaactcgaacatgaaggctgcctgtatgtcttccatttgttgaacgctgatggtgacgtaaaattttggcgatgtgaacatcagcacagcgaattcaaatgccgagggcgccttcacacaacgctcaatgacgtcgttctgaagataattggtatacacacgtgcaaccacagcgcggcaaatgtcatcgcacaaaaaatcaccacccgcattaaacgacgtgctgctgaaacgatggaaacgccagcggcaatcagggcacacacacttcagcaaatcccaacgccagtaatggcgaacattccgacaaaaaacgcgaccaaaaaagtgaaaaatctttttattttttacttttttacatttttgggtttaagctggtgaagcgagtccgccatgaaattgaagtgccgccgccagtgccagtaacgcttcaagaattggaacttccagagcagtacagaatttacaaacgcaccgaagaagcgcaggagcttttccttctcgccgattctggaacgtacaccgagcagaaccgagaacaacagcggtgtgtttaagtgaaattttcagccatattttaattttagaattcacatttttggctggctttcattcggaaattgggctttcgaaatgaagtatatttagctgacggaaccttcgcaagtgcaccggagctcttttcgcaactttacgtcattttggggcggtacttttttggcaattttgatttcaatagttttctcctaatttcagtcgtggaaaatgggtgtttccggttcttcattgtctgcttacgtgcaagtcgcagtccacgtacgaaaagatgtttgacatgatcagaaaccgctggccgacattttcaccaacaaatgcgtccatggacttcccctccgcgcaaaacatccacaatgctcaatcaacatttgcctattccatttggtgcgcaacatgaaagcacgtcttaccgacgagcaaactcacgtaagaatttttttttattaattttgaaattctcaaatttagcgtttcaaaacagacgcagcctttgcacgatcagccaaaatggtcacttcgctggcgttcatgccgctggctgaccttacacccgcgtgggcagcactagaagaccatctaccaaatgagcttgagagcgttctcgattggttggttgaatttatttttttcaattttattagtaattttaaaggtttataatcaactacgttggacgtcttctcaacaatgacacacgcactcgtccattgtttcgtccagaagaatggagtgtgtatgagcgcacaatgaacagcaccgaccgcacaaacaacttcgctgaagcgtaccatcgcacgttgcaacttgccatcggacaaggacatcccccaatatggaaatttataaacattttgcgcgagcaccagaaaataattgacgtggacttcgaacatttccttgccggaaatgctcctgccgatgaaatctaagcgttaccgtgaagtggacagacgaattttgagcatattacagcgctacaatgaggaaaaacagcagccacaaatcaacgatgatcaccaatacggcaaaaatcaaaataacccgaatttgttcattgaaatgcttgggggaatttcgagcaattatcaaatggattgttaattttttgttaatttatttgctattacattttgaataaaactgagatttaaaaaaattaagcccaatctatattttgataaatatttttaaatttttgaaaaaaaaaactttcaactattttggcgttttgccgaaaatttgttaacaaatatgcaataaatggaaaaatacacccctaagaatcgacccaagcactcttctgttgactgattgggccaagtgaaacagacaatgtctgatcattgtgttcggccaaacatcaagaaatgccgatctcgcagctaaatgagcaaatatttaaaataaaatcgattaaatatcaatataaccaggttcaaaatccagcataaaactgcttggtattacaccttcaacacgctgctgtataacagagaaggctcgacgatatgtttgttgcatccggtttgccattattatatatgcgcatggtatgcttgagtgttgtgcaataatgtttagggtatataattgcatgaaattcgatggccgagctacaaaactttagaaaatggtcacacccctgtcatatatcacttttgaaagtgccgtcgcccgcccaattttggtatgtccgtagccattcaatgcctttgtcacttgcaaagataaaaaaaatggctcctcaatatcgtgctcacgtgagtcccaaatcaaaaattggttccctcttttatccgtcgcgaaggcacccttgaaaaatgagttggaaaatgtcagagacagcgaggatatgagtaagcgtccaagtagggttgcgcgcggtcggttaaccgaaccgaaaccgaaaaccgggggtgggaaaacgggcctaaccgaaaaccgggggtaccggttaataaccggtcgtgcgcaacactacgttcaaggaaaaccattgtttaatttttggcacgatttttagctgttcctgacgctgccttttctataatttaataaaattaaataggaaatattccaattttaacaacagatttcaccacgttagactctgggtccggcaaatggttatgatttgttcttccaattaagtttgtgctgtcgataggtgaatgggccctgcctgggcatgatttcttgacacatctccatacctatttaagataaaatatttaatatatacaaatactgaaaaatagcctgggtttggcctgctgctattattctatcagtacgcatttcatagccttcaaaaacagtcatcgttttgcttttcgttgtcctcttatcgggttctaatcggtctgaaaattgatttcgattttttgtttgcttaaactacaaaacttgccttgttgtggttgaacatgacataattgaagcaaaattaaaaaaaaaactttgaaatacattctataatatttataagtgggttggtaaaaaatattcaaataaaatcgtaaaaattctacataaaaacggtgtttttcttttcatttcccgctattttcctctttttgccagccgtccgcctctcttgttattgccagccgtccgcctctcttgttattgccagccgtccgcctctcttgttattgccagccgtccgcctctcttgttattgccagccgtccgcctctcttgttattgccagccgtccgcctctcttgttattgccagccgtccgcctctcttgttattgccagccgtccgcctctcttgttattgccagccgtccgcctctcttgttattgccagccgcccatttctcttgttattgccgtccgcccgcactttataactatttcttttatgaaacgtgaaaatattattgaactctaaatgaaaactttatttatattttctctgttatttttctcttcatatgaaaacccaattcgcaaacaacgagctgttcgcaatgaacgggcaatagctgggttagcacaattggcagcatcacttgtggccgtgaaagcatttattgccgcaaa

SEQ ID NO: 7589 - DNA, 2420 bp, Heterodera glycines
  unsure (1)..(2420): unsure at all n locations
agtccanntttcatagccttcaaaaacagtcatcgttttgcttttcgttgtcctcttatcgggttctaatcggtctgaaaattgatttcgattttttgtttgcttaaactacaaaacttgccttgttgtggttgaacatgacataattgaagcaaaattaaaaaaaaaactttgaaatacattctataatatttataagtgggttggtaaaaaatattcaaataaaatcgtaaaaattctacataaaaacggtgtttttcttttcatttcccgctattttcctctttttgccagccgtccgcctctcttgttattgccagccgtccgcctctcttgttattgccagccgtccgcctctcttgttattgccagccgtccgcctctcttgttattgccagccgcccatttctcttgttattgccgtccgcccgcactttataactatttcttttatgaaacgtgaaaatattattgaactctaaatgaaaactttatttctattttctctgttatttttctcttcatatgaaaacccaattcgcaaacaacgagctgttcgcaatgaacgggcaatagctgggttagcacaattggcagcatcacttgtggccgtgaaagcatttattgccgcaaatgcagctttaacggcttctacagccgtagctttggcagcacttggaaccgatatctaccttgctattgagctcgtgagatgtaagtttatgataattgaaaaggcggttgtgactctaataactcatgttaagcctctgatcactatgaggaattgctcaaagacttcttcccgttaacatttgttttggacgattatgaattcactgtctcggccaaagattataccccggattatatttttagaaaaatatcacaacattttggccataagacagaggaaatatgcataaacagtatgttttaataaacaaaaatgttttttaataaattaaaatgtaaattttactcctctactaaagcaaagacaatggcgagacgaaaagtgaaaaattcaagggccgatcttggtgaattaaattaaaattaacataagcactattatttgagtatttaaatatattaatatttaagaaaaaacattgaataaaaatccgtcattgtcaagatgtctgaaaattgcatctacttaattattaataatgaatttattctattgagctcatcaaagttttgtgccatgttcagcatgcacttcaacgaacatataattaaatcaaaaaaaatagaatcaataaaatttcgtttatatattatattattaaaaatactatttaaaacattgtaaaaaaaagaaagaattgctatttaaaaggagatattttttaatcattcatacctgtatgtgctaagataaaaaagaacttattaattatttttataagtaaatatgacgcagtgatgcaaaatggatattataatatttccacagccatacaataattaatatttataaatcatttatgaaaaaaaaattacatataatctaacaaagattgttacctaaataagataaacattataaaccttatttttaaaaaattaaaaagttttttcaatcgtttgattgaaaaatataaacaccaaaaatggaatctgtaaaacagaaacatgtgaattaaatattataacaattatagaaaaatgtatcgaaatttttcaaaaattgtattcaaagcattttattcaaaaatttgacaaaaattcatttaaataataaaaaaaacaattgattctttaatacaagagacagaatacaacctgtgttcattcaattgcaagaattgggacaagaattttaacgacagaaaaaataattattaaattaaagctgaagtaaatattaaaattagttatttaatttaataaacgaatatttaaagattgaaaagggtattgaaatttagcgcagtagaataataaagaattcggatatttaaaaagaaattattttatttcaaaattaattaaatttaaaaatcataaataaattgagcatttttacctaactttttgaattcaactttaaaaaaatatattaaaaagataaataaattattaatagaaagttaattaaatttaatttatatcgcattatcatcactataaaaagttctaattataagaataaaaataacattttacaagtcaacttttaaaaaattcatattatacttcaatgaaagttagttttagtataaaaaatattaacgtaaaaatgattttgactatccacgtgttatattannagcagaatctgacgcaaaatacgtatttcgatggagctgctacatttgcgcccctacatttgcngcccgcacatttgcgcccctacatttgcgcccctacatttgcgcccctacatttgcgcccctacatttgcgccc

SEQ ID NO: 7590 - DNA, 1015 bp, Heterodera glycines
  unsure (1)..(1015): unsure at all n locations
aaaaagaagcaattcttcccctcactttttcctttttcaaatttgtttgcttatgtacagtgtgattcattcactaattcagttatggaccattaaattaattcagcaccgttatggtagggttatttagcgtgtgttgatatttacctatttattaatgggatacactcccacggtggaaggggccatgggaaagtgcactttttcatccgccgatcgtccatcttattatatacaccaccactctttgtggagaacggcagttgtggtgggaatgatgagaagtagctaaattcttaagaaaatggtgccgttcattgggcgaattgccattttatgataaaggaaaggattacactaaaaataaatgcttaaaattggtatttttactttaaaaatgaattcagggatgaaattttttgcattggcggtcttccgattttttaaatgagataggggtggggggtgagattcattataaaatttactaatcattttgtccaattagtgctaattagcgtgagaacatttaaaagttggtgccattgggttggtatgataatgaagggtttttgatgacctttctgccatcatccaattttcccattcgcacctcccccccccctccccctctattagtgatggctcaccaattggtgacactaatcaaattaagcggaaaatcgtccataattatcatcatcatcaaatccttatgtcagattggtgagaaaaatcttatcatcgtcgaaaaggcgacacaaaaatagcctttttaacatttttggaagccgagaaattcacaaattcccgccgagtttttagagttttatctgctaaaacagcgtaaactaatctaggtctcattaatcccaacttaattataaaattagaaactctgacgatgtctgatttcacgaatggcaattatttgaaaaagaaaaattatttttttaccctttcccctcgctgaaggcaaancatgccaattttggtgccatttctgtccttaatg

SEQ ID NO: 7591 - DNA, 3724 bp, Heterodera glycines
tggcaagtcaagtcacgaatgtgcaatattgtgccgttagctgacggaaaaggtcattcattttatccgctataacttataaatgactaattaattgactttcttttcgcttatgtcaattatcattcattaacttttgttaattattcttttttctgtttttaatccaattattttttaaattaacactaattaattaatgatgccaatttaagttgttccccttctccaaattggtttggtgcccagtgcaaattgagaaggtgcagtcatcggcacaatccgtgtattaacggggccgaatgtgagaagaccaaggagtcgtttaagtgccattgtgccgttggttcgttttaaaaaaaattttaatttaataaatttttaataaattagcttttcattgcctttttgtagaaattatgatggaactttttataatcaatttttatgaaagttttatttgtttttgtgtattaattttataaattttttaaggctttactggcacatattgtgagaatgcggtgccgacaatttgtgacagggacggaggaagggacgacccatgtatgcacggcacttgccgagttggcacgacggtggacgactttgtgtgcgattgtcagtacggatacacaggtggggaggcgaaatgaaattcaaaaatatttttgaaaattgtgcaaaatgccacaatttgcattttcaaaatgtctgtccgttctctctgccccaccattcattcacgaaatggcgaatgttatttatggggggggggggggggggagaaaaaaatgaaaatggaaaaattaaatgagagagcgatgagaggagaaagccgtggccaatgggcgatagatgttttttctggacaaaattaactttaccgggttactgtattttggaagcaatgatttggaagcattcaatattttaacaattgtgccaattttttgaagggaaaatatgcgcggatataaacttctgccaaagctctacggaagtttgtctgaatgggttttgcatgaacgaccagaacggcagtcactgccaatgccagacggggtggactggacaaaggtgccaagaggacattgacgaatgccaactgagggacaaattgtgccaaaatggggggaaatgcgtgaacactgtaaccaatcattaccattttataatttaaatgtcaacccaacagattggcggcttttactgcgagtgtccatcggactttgtcggctatctctgtgaagtgccgcaccgtcccactgatccatgcctggccaaccattttccgtgcctaaacggtgcacaatgccacgagaacattgtggccacaaccgcagttttggcattggacgcgcattttgactggcactgggaatgcgaatgtttgcccggctttgatggtattttgggattagttttattttttaattcaaaattgcaacccaggcaaacattgtgagcgtgccattgacgagtgcgacatgggcatgatgacatgtttgaacggcggcaaatgtgcacacgcgtgggccgaagacgcgcgtgatgggaatggcattgtggtggagaggaattggcacgcatcgcagtgcaaatgcctgcgcggctttgaaggtggggggggggaaggggagggggacagataaaattaggtgggagggcagtgattaacggacaaaagcaaaatgaatttatataaaaataaaataataaataaattgaaaatccattgcaggtgatttttgtgagcaggacatcaacgaatgtgagcggttcggtgccactttgtgcaaaaacggaggcacttgtgtgaatcggcacggctcttacatgtgcatttgcgttggcggattcgctggtgcatttgtactaatttaaattttgttgtttttttttttaatttttaggcaaattttgcgagaccaacattgacgattgtgtggacaatttgtgttacgccggctcaacatgcgtggatggcattgctcggtacgattgccgttgtgcgccagaccgaattggtacaaaatgccagaaatttagaaaaaaaaaaaaatttaaaacaaaattttaaggtgcgctgtgcgaatttcaaaacatttgcaacatccacgaaaatctgtgcgaacatggccattgttttacaaatccgttcaacggaagctacacatgcttatgtgatgagggatggaaggtggaaaaacagaaaattatgatttaaaatttagatttaaatgaatttttaagagccaaaattgcacggaagacgtggacgaatgttcggatgagatgacccgttgtttcaacggcaaatgcgtcaatttggtcggcagttacaaatgcgaatgcgaggtcagtgttagcgtttattttcaataaattatgcatttcttttaaatattttatatatttttaggaaaaataaattaaaaatttatttttgcattttttactcttttttagtttggttacaccggcgacatatgcgcgtcatggatcagttattgtgatgatgaacaaccatgtcaaaacggaggcatttgccacgaccaattgagccactacgaatgccgatgcaaatttggtaaaatttttgaaaaaataatttttaatattgttttaaatatttgtttttaaggattttctggcaaaaattgcgagtttcaaaatgaagaaggcgcgaacaaatgcgaattggactgtcagaatgggccacctgccaaaatgcgtcgtcagaacagtgcgaatgtctgccaaaatttggcggcattttgtgcgaaatgtaagtaaaagagaaataattaaattaatattttaaaatatattttatatattttgaattatcttaaatcaaaaatcttaaatcaaaaagttttattcaattttattttatttgtatgagtttcttgtacttatttattgcagtgaaaaacccgacccatgcgaattcaaaccgtgccccgagaggacaatttgcacaccgacaaatgactataagtaatttttggggataattaagcacaataaagcaaaaatatattttaccttttcagctcattgacctgtgagtgtgctcctggccaacagtgttcccatctttcgtccccctgcgagcgtggccataatccatgtgtgcatggccaatgccgaattaaagttggccattaattacagtcaaataattttttaatttctatcggacaaacaaaaagtgtactgtgaatgccaacacggatggaagggcacattttgtgatcagtcggccgaaaatggggagaaagcattgtaaaaataaatttaaaataaaaaataataattaaaatggaaatattttttagcaatcaaagctgtctattggaaaaaaatcgttgcaaaaatggtggccaatgtgtaagtgtgaaggacaatcagcagaatgggggtaatttgatttttataaattatttttttaaatttttgcaaatttagcaattcatttcgagtgcatttgcccaaagaatttttcgggaacattgtgtgagaatatgctaattgaaagacactgcgaaaacggatgtcgaaatggtggaaaatgtggaaagacgaagggttggcaattaaaatttgaaaatttatttaaacattaaaaacttagatggctcatggggatgcaaatgtttgatgggctttgagggagaacagtgcgaaatttttcgaaatccgtgctcaaaaagta

SEQ ID NO: 7592 - DNA, 3814 bp, Heterodera glycines
acaaagtcaaccatttccaatgcgaatgttcgcgcggcttctctgggcgccattgcgaagtgatctggcaaaaatttttctatcaaataaaaaaaaattaaattctttagaccgcagtacctgtcgacaaattcaatcgaacagatttgatggacaaggaaaactgcaagaaggcgggatgcgaggccaaatacggaaaccatcgatgtgattcggaggtgatttgttgaaaaaagtcgaaaataaataataataaattttaaaacaataattattatttgaaatcccaaaaaaaaacaaattaaaaaaataaatttaattttagtgcaatttatttgcgtgccaattcgacggcggcgattgttccacaaaacaggcacaaccctttggcaaatgcccacaggcaagctattgtgcccatgtgtttgcggatggcaaatgtgacgaagtgtgtgggctttatgtcactatagcaatttatttttaaatttgttcgttttccatgtcactatttgcaaattaatttttaaataattgtaattatttttttcaattttctccatccatccctttgaattaagatttgcaacaacgagcgctgcttgttcgacggctttgactgtttggagcggcaccaggcgacgtgtccatggatggtcgactgtgccaaagtgtacgcggacggccattgtgacgagcagtgcaatcaggcgaactgcggatgggacgtgggtggcacatttggaatatcaaaataattatagaacggacaattgatccaaaggacgagggaagtgctggggccgattttcatatgaccggctcaattttatcagatttaaacgatttttaaatttgaaaattcacagggcggcgactgtgcccacgacgcgcatgagcccgaccccacggcggatgaccaacccaaattgctgctgggcgagctgttcctggcggtcgcactacatccgtctacactgttcaacgatacggcactgtttcgccaatttttggtcgcattgagtgcccatctccgtgcgtcgttggcactgtcaattgaccgatacgacaaaaaggcatggaaaatttaattttaaattaatttaaaaattttattgtattcagcccaaactttttgaatggcgatcagacaaaggcattggcaaacgcattgaattgtcaccggaagtgaacgcaacggcactgttcaatgtccgctacgatgagaaggaggaggaagcgggcaaacgaagcaaaagaaaggcggaggaaaagggtaattaaccaaatatattattatttgagttaattgaacaattactgagtaaaaataataaattcaaaaattctttaatatttatttcataataattatattattttcatttttattttcagatgttgtcgaaggcattgctttgtttttgcaagttgatgtcaccatgtgcaatatgtaagagagaaaaaaaacacttacttaaaatatttttctattaaaattcttggctttttttaaggatcactcccggcagtttggcacagtccacccaattggtcggcgttcacaaactgtgcttttcggacctggaaaatgttgctgcttatctgggagccgcaaatgccaaacaggtgattggattattcgaattctattaatttacagttttaatattctccggtttgaccccgcttgatttgaaagacagtgtctgggaatggcaccaatttgccgatttcccaccttgtttttgcacattgttttcgacttgaaggataaatgtaatccgccatttttgacagggattaaattttcattacaattaaatgcacatagtaaaatgacaattaacaaagtgggagataatctccacgtaaaggctcggaattgacgtgaaaatcaaaaaagaagtgctgtggcatatttttattgggtggggcaaaaggcaatttggggagggacacataaattttggggtggacatttcccatggagacactacataattggttataaagaagaattaaattcatttttatgaatggaccccaattaaataattttacatgcctaattagcactaattaattcagttcccgtttctttgcttaagaatctcgacattcccatcacaattctgcagtccgaagcgcttaaaccgcgcgcctcttcgctgttcttttggtttgctttgctcgcctttgcgatagtttcgattgcgtcggccgctgcgggcacagtgttcgcaagcggtcgcattcgcagccgacagcggcgatatgcaaaaacgtggaagccggaattcccggcacaagagtcgaaaggtgatccataatgttgatttacaaattcaattttatttcatttctatattttaaaatgggatttccccatttttagtcgccaaaaatttgctggcaactttgtgcggtggggtcggccctggccactatcagccgccgttgattgacggcaacacgcagcaacacctgtttaacgcgtacacgcaacacaaccaccaccagcaaaatgcctaccaattccatcagccgcagcaacagcatttgatgttcaacgccggcagcatcagcacggacagttgcgcttcatccaccgccgcgtcggccattccgctgattcgccacgcggacagcctgaacagtttgacgagcaatgtgctcgcaaacaatgccatcaacaaaaatcagcaacagcatgggtgaaaaaataaaatatctaaataatttagaaaaaaataataataattttcatttttgcattgatttattttaatataaatatttcaaatcttaattatttgacaatttttataaaatagaatatatatattttttaattttcagacaatttcatcagctaattgacttgcagcaacagtattttgggcccgcccaataccattcattagtccctcataacaaacagcagacaattcactcaaatgcgtaataataatttttattatttttcaaaatatttaatttatacccttcttcaagtgtccacccccatcatgctcctcctgctgttgctgctggtccgtattgctcacgctcgtcctcctcgggcattggcgggtcatcgacggaacattccccgattggtaaaatcattttgaaaacgatttagttttgattattagcacccatacaataacatgcattttgttatcagattcgcacggtcagatggtcgaagacatggaaagacgaaagttgttggcccaccttcgtgaaaatgccctcttttctccgaatggactgttagggcatgaagaacggctggagcctcaactcgtaagtaaaatggaatttgtttaaaataaatcaaatgctaaacaggtgaatgcacctgatgagcgtggtcgaactctgctccatttgctgttccaaaacccgaacttcaaggcggacgacgagcagtgcctggtgaacaacattcagttgctgtttaccaagggagccaaaatcaacgcgttggacaagggtgactgaatttaatttaattacggtaattaatttttaatatattgccgagttcagaattcacctccccactgttgctggccgtacgggacaaaggctgcttgcggtgcgcaaattggtcacagagtttgaggcggaccaacgactggcggacgcggacgggcgcacgccgctgtacgcggtgtgcgaaagcggaaacgtagaaatggccgagtttttaatcggcgaagcggtcgcggcggcgagttgcggcagaaacagcaccaaaaacaaggggaatggggagacggaggcggacgagccggaccca

SEQ ID NO: 7593 - DNA, 1810 bp, Heterodera glycines
cagtgcccgtcactgatggtactgctgtcccattcttttccggcatcggcttcatcgtcgactcgtcctccacggcgaacgcgttgccaacgccgcaggcgacgagcgtcgtctcatccccaccgccgcgcagagtgttcaggtcgaagtgtcctgtttgtatgtacattcgtgaaggattcagactttatcgaactttaaaattaaatttttacggccagagaatgggaggaggggtaacgccgttttggactaaaatttgttctcaaccaaacattattctttattgttcgaaaatatttgacaaattctattaatctataaaatgaaaaaaatttttgttcatgtacaaaaaatcagtgccaaagttggaaaacccgattttttatgttatacccttattttttttaaattaacgaaattttttgaattggctgaataaaaaaaaaacaattacaaggaagcataccgaactgtcagtgtccaaatctgatcacttttggcaccggagtcaaaaattcggagattcatttcaattccctgtcccctttcgctgcatttaactgacccataattgaggccacgttgtccgcttcgttgttgtttccgccgcttccgatgctcaatgtgcgtgcttttttctgcaacggcgctggtgactcgtcgccgccgctttcgctgcactccgacggacagcgcgagccgcacacgctcgaggtgggcgtctcgcccgcccactcgtaaatggccaacttccacagacggacctgtgggaaacgtcaaaaaaggcacagttcaacatttaaaaaatgcgggatccaaaacaatcccataaatattcataaagaactaactcggtccccctccctgggaaaagatgggcaacagcacccgttcccctctcgcccacctgtttgtcccacgaacgacgcgtgtggttgatgtatttgttgggtgtgcgcgggtgagggccttttttgcgcgcaaatttgggaatttgggacaagtaacgcttgtaggtcggcttctccttcatcttctgcagttccttgtcccgccgttccaacgtcgcttcgtccgtgcaccaaccctggaaaagtgccgaaaatttgattttgtttctctttcggggtttgtctatggtaaaagaagcgccaaactgaccttgttcggctccgcccatcctttttgtggagttggcaaaatatgacggcgtttgttgggcgcggacgatgagacaacggacggagtggtggacagtgccgtgctcttgctccgctccctctcctcctcgtcaatgatgtcgacccacgaacggttggcaaagtcggagtcgtcgaagagggaaaagtcgaactgaaagggaacaaaattgagggaatgaagtgattgtgcctttaaacggtcttaactgtaaacactgtatttcggggtgcaagaaactgagtcattttgcagaaaaacaaggcacaggaacaccaataaccaattaattcaaagttcggaatagccgacggacgaattttagctttcaaaaaattagatatgagttagaatgggcagtcaatcaaagataaataaacatttagtttttttatgaaaaataattatgaaattgaatatgcaacgcaaaagccccaccttaaaacgagctgtcaaattcaaactttaggaaaataataaataaatattatgccataaggggagagggggataagcaaaacacaattaagagaaagcatttgggagaagggaaaatgggcagagcaatcgaacagaacacagactaatgagacataaataaaccaaa

SEQ ID NO: 7594 - DNA, 2951 bp, Heterodera glycines
  unsure (1)..(2951): unsure at all n locations
gcaaaagcagtagancggcgggacatcgggcatcacaaaacagcccaagtgaatgaatgcttcgacattggcatttgcgcgcgcaattttaggcgccaaacacacatttatgacgccaatctttgttaggaattaggcaaaaaaaattatcgaaaaatttcatgttttttcaccacgttattaatgactttttttgtgttctttaccgtcaataattttccaaaaagtcatatcaggagaaaaaaaagatattttaaccgttttgcacttaaaatttcgggtgtgggaattgctggctttccctgcacaaatgaccagtaattaatgctaaaatacataatgaaaattgacaatagaccgataaacaattggatccgaattattaaagaatgctttggaaaatgttaattaatgggagtctctcgctgtgaagaaaaaaaaatgaggggcagaaatgcttgggtgcattttccaaatgagtatcttttttcaaatttcgtggtttaggtcaattaattggtacagcggtgtcgacaaatgtgcaggagatattttattttaatgagatttttaagaaaaaaatttttttttcaatcccaaatagaaacagcataagaaaatagtcttatggggaccgctattgggggttgaatttttttttaaataatagtttttttggcacaaaatgtctggggcgcatatcatttggaaattttgggacaaagaccaaaaaaataaataaaggatttcccatcagaattctttctggttgcccaactgacaaatgccttggccaaatacaaattgttttctaattgacaccaaagcgcaaaggaacattcccaaatgtgactgactacccaagtcattcttttaaaatttattttggtttttttgatcactggtactttaaaggttggccatcaatttcgtgataaattgactattctttaaaatttggctgtgaagttcccccgtgggtgcgttttcggtaggcaaattcccccctcccctccattttgccgaccttttgcgccttcggcacattctctcccttttccgctctttcgctgttgcatcgcttattgctgggggaagcggaagacgaagcgaccgcagcaacagaagcaattggaggggcagcggacgcggcggtcgtttcagcggtcgccgcttttgctttgtgcgtcttccgcgccgccgcctcctcctcttcaatgagttcgacccatgaacgattcgcgaattcggagtcgtcgaagagggaaaaatctaactgaaaggggcaggggaaaacgcttagcttaccaaaagtgggaacttagaacacattttttaccattataaaaattataaaaaggtctgaattaattttctaaaaaactgatttcttaatttagtataattgcgaagcaaaatataaaaatttaaaccgattttggacataagcacaaatgcccggactgattttttatttgggtcggaaaatggcattcatccatttcatttctttcacttccttaatacaaataaacccccaaaatgccaactttttgtggtggttcctctttctgctgctccttttcttcttcttttgttcgtctgctgttctgtaactcggccaatttgacacgtaaagcattttgcattttggttttaaaacacctttaaaaaagatcagttaaataaaaataagtctatttcaagaaaattgtcaaagttctacttgaaagtgctgagaaaaggccaaaggtaactaaatttctgaacgtttcttcgtttagatttccaagtctggtaattcttgagttaaattaatttaaatatttttattaccggtaaaacattcgcgctaataatttaaaaattggcggccatttaagcgaatgatttttatttatgcatcaaaatataaaatctttaagtgaataatctgagggacctgagaactcgtgctgaagaagtcatatcttttggtattctcgatttatggatttttagcctcggaaatcaaatttaaatcggaaggtgattaattcatttcactttcttcttaatgtctaattctaagcttaagaaaactttccctaattgctgggcaccaaaataagagatccaattgcgtaagaaaaagaagaaaaggctgtgtaattagtgttaatttgattgtttccacaaaacacacaaaaaaatgatggggaaaacattcgctcggcccgctttgttcttgtgacgttgcgatcgatcaccgatctcccgtaaattgcgcaacaccaaaacccattaaattgagctgaattcacccgtcttgtatattctgctgattgttttgcgatcagttttgacttgcccattagcaaactcaaaaaagacaaaattaaattcattagaaagggccggtttttatggatttccatgtttttccccacttattcggcttaaaatcgagtaaaaaaatatttttgcctagtttgaagcttttaggatgcttttttccaaatttaactttttaattaaaaatttatattcttcgaattaataattgagaatcaaatattttaaaattattttttgacaatttatgaatttttatttttgttttaaattgatttaaagaatttttttgattagttctttgattccaccattttgttactctcccagcaaagggaatgaattttttgcccattttatattttgtgttaagcctataaaaagggaatgttaaggcttgttgatggatttatttattttaaatttataataataatttttcatccaattgtgttgtaatattgcctttaaattcctttttacattcctttgggtgcccacactcattaacgggttttttgattatgcggttaacccaaaatataattacctaaaagtgtaccggaaattaaactaagcacttggaaaatttggtgggtcttttgccaaatntctct

SEQ ID NO: 7595 - DNA, 2170 bp, Heterodera glycines
tttaatttcctatttatttgtggaagaagtgtccaaaaactttggaattcccgaacccaaagagccgaggtttttgcgatccgtgaagaaccaaaaacagaatttcttctctgaaattccttgatattgccgcccttaattaattaattagtatacctattaatttaaattgtgactctttgcttagaattatgtgaataaatacattttggtgctgttggcctccgattcgctggtccttctcagcatgttcgtgcgaatgtttgtcaattttgacaccgtcagtttcgccctttgcttctccgtccgtttcacttggaacacggcaatttacgtgagcaatttcgccatcatttcgctgaccattgagcggttcttcgccatcgtttaccctctccaacatttgagggtaatttttatttaaatggaaataatttagtcgaatatttctatttcattttacatcataaaaatgtttcggcattttatctgtgcccttttccttttccgctacagtattcggggctcaaccgatggaaagtgatctgtgcctggctgttccttttgcttctgatcagttcccatcacttttttgcactgcgaaaaactgcgcatgattctgtgacagttcaattttcatccaccgcctctttcaagtgcagctatgagacggaacggaaatttgtcgatgtaaaatttaaataaattaatttaatttaattttcaaatttcatattaaggtgattttccattttccaaggtttttgctccaatttattctcactttcgtcgtagtaattgtcgttaacattttcataattatcaaactccgctcgcgttatgtgataatcggtgggcagaagcaaattttgaaaaataaacagacaaaaaataaaaatgcaaatttgtaagtgtaaatggacttgaaaacttatcttaaacacattttattattgtaagttaccggaaaaataagtcaataatacagtatttctaaattaaagtactgtagcatttataaaaggtcgaaattgtttaaaaacttcgttctgaattttttcaaagtttctttaaagtctaaagaaatttgaaatttacccaatccctaaaaaaattatactgtaaataggttgttgtaagcttgtttagataccaatcaagatataagtattatactaccgggtctcgttttttccaagatattctgattcactgacccattttcaagtcacgcactgtgaaaacgctaattgatacatttagtaaacaaattaactaaaaattccaattttcaaattttaattacaacaaaactttaaggcgagacgggccccggcgaaatgcgtgccaccaatgttttgttggccgtcgtccctttcgtttacgtccttttcaatttcatgtacaacctcaaaaactttctcaaattcttccaaacgaacaaaagtcagaatatttttctcgagcattactattgaagcccggtgtttcggaaagaattttgtcgcaaatggcttcgaaaacgggcaacaataaggccaaggtccaccacaatgacgacaaaagatgtgcagacggaaaatgccaaaaagagtctccaaatgaaaccaatcgaaacgaaaacagcggcagagacaataatttaaggacgctgaaaataattaaatgaaaaaattgtgcaattttaaagaaattgtaaatttaccaaaagggaaagtgtctaataaataaattttctggagagaatattgtgccaaaaaatgaattcatttgccatcactgcttattaggctgtagaggaccaaaggcacatcaaaacggcacaataaacgccgtttcctattaaggaaatgccaacaaacagcaaaacaaaatccgaatctttagtaagccatccatcactttgccaacaatagttcatgcaaaacaaagaagcacacattcttggacaacttttatttttataggggtgccgtttaagttttttaaaaatatggacaaaactgtttggaacctctaaagggagtgcccattgctcagttgcttagagcattccacggttggaaatgccgtgagttcaagtcccaatgggctagtgtaatcttttatgttctacaaagcaaaattaaaggttaactcttacataattacgttttgttgcattgcggcg

SEQ ID NO: 7596 - DNA, 2214 bp, Heterodera glycines
tactgtagttaaaaaatgtattgtggtttgtctattgtgttgtggttagtatgggctcaaaattctgcgcctcctcgcggtgagtccggaaacagagttaatttttaaaatattaattaattttttttgcaatggaattaactctggctaaagcagacgtaattttgtctaattttgtggcttagaattaaattttttaatttttttttgttttattgaaatccccaaatgtcgggtccccaaatgtcgggtccccaagttgcaaatccccaaaagtcgggtagccgtttttatgttctacaaacatctgctggatatacgtttttacgcccgactaatttcttaaaatttgtctagaaaaaataccttcaacatttttaacttttttttcgcctggacaccaattcttgaccattgccgatttattcaattgactgtcaactcctcttcgacacccggaaccattcgaaaaactttgactgaccgactccccttttgtccatgtatgccgtaagctcccaaaattccttattttttaaattcacttttaaatctaaaaaaagaaaaataattgatttaaaaaatttatacaaatttgaatttttttttatccattctgccaaatttttattaaataaagtaatttgcttttgtttactcatatgtagtagtggtgtagaggttagtgttttgacactaaaactatttttgtcatgagttctatcctggttgactgtttttttttaaatttttttgtctttaatagggtttttaaacaaaaatacccataaaaattgaccatcattggcataatttattgacaaattaaattcaatttttctttcgttgaaattaaaaaaattaattttccttgactaaattgaaaaattaatattttcaaagtatttttgacaaaatataaagaagaataagtaaaaatttcatgaaattcataaatttcttagtgaaaatctgttagaaaataaagctcaaatttttaaaatttcccccggcggcgcctatcggcaccgccggaccccttctccctaaaattcttcggaaaaagcgcgcgcgaaaaatttttgaaattagaaaattagaatgcaattttttaactgattttcaccagaataaccaattttttcgactttgagccaaatgttttttaagaaaaaaaaaagttttgggggtccggcgccggaggaaaaatttgaaattttaccattttttacagattttcactgaaaattggccatttcaaaaataccttatcgtttttaattaattctatacaaaaatatttatgataaaaagaaataaaaaaagtacataaaattattattatgaataataaaatttttaaactaaagtaataaaaaaaatttgactatatagtataaggcaaaaattgaaaaatcccgaccccgaccccgaccttgctgaccccgacgaccccgaaccccgacttttccaaccccgacggtcggggacgcaactctagataaaacggaacggacaaagtctgaattctagcccaaacttagctacctaatttgaaatattatttatttttggcattttgcctaaaattcacgattaaaaaactgttccttctcgtgcctttggcgaaattgaagcccgtttatctcgtcaaaatgaacagggctttgacggaattggccggcaccagggcttccttcgggacaactatgtcttggtggttttccaaaaaaaaacgggaccgggcggccccgtaaaaccctcaggctcgtcaggtcaataccaaaaactgctcttccctctggctatgtttatgcagtggcttattaaacaaaataatttttaaagaaacgctataaatccgagtgcagaagaaattgtttttcgttcattaataattgtgagtcacagacacccaaaatttcaaaaaaaaaacattttttttcttttttactaaattttactaatttttatttcttttttttttgttagatacataaatcaaaaattagcatttgccatttctgccgagcgaaatgggcgcctataaatacatgcaggaattgtggcgcaagaagcagtcggaggtgatgcgctatttgctgcgcatccgctgctggcaatacgccaaatggaggccatccatcgctgcacgcggcccacgcggccggagaaggcgcgccgcttgggctacaaggcgaagcaaggtttgtg

SEQ ID NO: 7597 - DNA, 3340 bp, Heterodera glycines
cggaatgtgccgtcgaggctccaccgacgattctgtttgagcactgacaccagctgaaattaaactaatttaaaaaaggacataagtataggtagacttgccttgctatgactgaaaatcaggacaacatcagattgtccagtcctcacttcacggctgtcataaatgaggacggactcatcattctttatcaaaagaccaggcggaatttgtatgttcagtgggtcggcacagttgacaccaccaacgaatttgttctttgttctaaatattgcatcattattttctctgaattttgtctacctgttcgccatttggtcgagcgcttcattggtgccgagcaattcgaagacttcatcgtcgatgtcagtccgaatttgagcgcggatttgacatggtttcgtttttggctcctccttgatcaggcgcttcatctgatttcgtttcgtctctgcatcataacgcgatggtgcgcaaccatggtgatgtccttttgcgcccaaaatgcctgtcatcaaatcgttgtcgtccaatttggctgtcgctggacaattgcgctgttcgcacctgaaccagctaccatcttttctgtttttgataaatcgaaagcctgaaaataaagaaataaaaatcaaaaaaaactagtaacaccttgataccaaagacaaagagctccccggattgtttctccacgtttgaattgaacgggctcacaattttcttcgtcatcactcgaagcgacgtccaaattgttcctggttgaagtgccttcaatttgttgttctgcgtctgtcctctcaacattcagtacgctgtcttcatttgtagcaatgcgaggcttttttactcgcttttgcagactctcaagtatttcgcgaacagttggcatttcttattagaatctgaaatttctttgtttttgaagaaaatttgaaatgacataaaaatgaaatgaatgatttatttgatgcaaaaacattatatattgtatattctctctttttattttctctttggcattatgtatttccaataggcgaaatgaatgtttctggcttagtaggcgaaatgaatagtaggcgaaatgaatagtaggcgaaatgtccggttttgggttagtaggcgaaatgaatgtttttggcttagtaggcgaaatgtcgagtaggcgaaatgtcatgtagcctaactggacttgatttgatgctattttctctttgaatgtgcttattttttcttggcggttttttttcttttgatttgatggattttcattcaaaaattgcaataaatttcaaaaatttgatttttttttttattgcggcgtcatttgaagaaaattcgtgttccgcgactctgaaaaccttcatatttttctcactaatttgtttcaattgcttttattttaagacgagattaatttttaatggcaccgcctgccgagaaaaagcaaaaacttttgtccgccgttgaaaatcagcagcaatcgtcgtcgtcggcttcttttgtgaaaccatttggaggacggaagaaaatgcgagtgctcagatttttgcattaaaaataataatttaatggtaaataaatgtagtagtactagaaatcgacattttggaaaaagcctggacctggattccattttggacctggatttcctggacaaaaatccaggtccaggaaaaatccagttgccaaaaaatgacctggacctggatccaggaaaaatccaggtcgatctttaagtagtactgatggtgccccctccattttttttgaaaaaaaaattctcaaaatcaagtcattttagaggttttcagggtagaagcatctgattataatacaaccatttgactcccaaaccatcgaaaataattggacaatatgtgtatatgaattttggtgaaaattatttttcgcttttgttcgatttcgggtccgggatttgaaatgggtggaaaaatgaatgtcatattcgtgatcagcgcccatgaaaaccccagaaaaaaacaaaaaaaattattatttttttatgtggcgtaaagtgaaaaagtacctagttttgcgtgaaaaatggcgacatggaaattttatgaaaattgagtgaatttatttccaaaaatgtaactgcatttgagcttcccgtcctaaaataaaaccctttgggctctcctctttatttttatagaacaaaccagtcatttaaactataagcatggctggacagtattttttttaaagtcaattttggtagtgactgaatgtttcggaaaaaggggggaaccgccaattcgtcgcggccaactcgccgcaaccattgcggcgagaaactcacgccgagatgacggcgttgaattggccgctacgaaatggtcctttttcttcgaaaaatcgtggcgcaaagtttcgatttttttttacaatttgccatttttaaggctttctcatttaccgcgtgcgcattcgccgcgggggtcgaaagcgccaagtgaccaaagggcaaacgtacggaaagccgaaaacgcacggcgtcaaccagctgaagaacacgcgcagtttgcaagccgttgcggaagtttgtttttaatttgatgggcctaaggaaatggtgtgtgttttacatttaaaaagttgggaattttaggcgaaatgcgctgagaaccaatcaaaatttatatagattcttcgaatttaggatttgttaggacgaagcgcaattcattaaccgaaaatagtatgaaaggatgccactttccagcccgcaccattaaatttgtttataaatttcagtttcttttttttccaattttatcccgccgggtcggttattatgagcccattaattttttaaaatattttagactaaagactaaaataaatcttgagtttttttttggtaatatgccgatgttccccccctccccccctttgtcgaaaattcaaaattcttacttctgttcctaattttgaattttcgactttttgtcgagttcgggtccgggattccaatttgaccaaaatgaatcttagattcgtgatcagcgacctcgaaaacccatgaaacttgtttttatgacattaaaattttagatttttttccaaaacggggggggcatcggcagtatgacctttttatttatgtttaaaattattgttgttcttttttattacaaaattttacgagttttccaactcattttcccttttcccataggcccgtgccggccgccgtttgggcgaacttcgtgtgctcaattcgtactgggtgggccaggactcgacctacaaattctttgaggtcatcctcgtcgacccgtcgcacaaagtgcgttttgtttcttgtttg

SEQ ID NO: 7598 - DNA, 997 bp, Heterodera glycines
aacccgaaatgaaaattttgagaagcttcaaaatttccaaggaaccaaaaatttgtttagaaggaattttctttgaaagaaaattaattgatgtggaaggagcgcctcaccttttggtaatacattggtttgtctacaacccccatttttcaaaaaaaaaaaagttttgttttaatctgtgtaaaacgccttttcctggggtttcgaggtcgctgataataagcttgacaaatagcgaatcctgaattcgaacaaacatagaacattcaaattttcgaaaaccccgggaagatgttttacatgacttttttcgaaaaattgggagaccacaatattatttattaccaatttttccattgcagatcggtggaaaagataagcagtttccgtgccacgagatgcccaacaaaattcgcttctgtttcctccaaattgagtaattcaataataaattttctgtggccaatggcggagaaaattcattggtcccgaattttttgttaattttaagaaaacggcaatcatcaagaatgggggtcccatattttcattttttgttttgggataagaacatgaactttgtttgagttagttagctaaattttccaaaaaaaaagttttttttgagtgtagggttaggccatcggaaaaagtttggaatctttggccgatttttgaacagattttgagataaattatcacccccccccccccaaaaaaagaagaggtctcagtgcatcagattacatacttctagaaatgacttagaaaattaaaaaaaaatttcttggtcgatgttctccacctttgccttttctgtgcgtgcgcgcttgcaagggctcatttttcgtctaaatctgttcaaaattgacaaaaaaaattccaaacttggcctaatctaccctcaaaaaaaaaaaattttttttttgaaaatttcgctacttaaataagaggccgaagagcaaacaaaggtcatcgctcgtgggcgggggggggg

SEQ ID NO: 7599 - DNA, 4413 bp, Heterodera glycines
ttgcacattcattcaaattccatttaactaattacttcctcccctgtgacttattaaatcttcatgatttttcttttcattggcacaaatttgcctttgctgctgatgcacgtattgacaaaaaacaaaaaaaaattatggtgtctatcgttatttagttgttttttttgcatatcttttaattgctttttttgttattgcacgttgaaaattggtaaaatatcttaaaatatgtttttgcttggcggcgcaagtgtcgaggcgcagatttcgcaacacggtttcccccagctcagatcactaattcatcataaaattaaaaaaaggcttaaaaatttactaatttttttttcttgaaaagttttaggttttgaaaattgaaaaacccctttaatttgggcattttgtcgatggaattcggtgccattctttctgttcattttctctccttttgcagtgcctgcggttccaatgcgatgttttccatcggtgagctcgactcctcgttgacttcctcctcctctgcctcctctccgttcgttttccctacaatccgtcggcacaattcgacctttgtcggcgccaacggtgagtcgcttgaacgccacagcgattttgtgatggcgccggaagaaagtcgggcgaagcggacgacgaatggcaccgccgaagggaaccaaagcgaaagggaagcggcacggggcgaaacgatcagtaagcagacgcagcaacggttcacggtgatggccagcgaaatctgacggatcaaccgaatgagcaggcgactggctaacgaagaacggacaacggaggagtgatcggttggcatgtgaccgatcgatctatggatggatgaacggattgcgcgagacattctcgcattttcaatttggcaattgcgggattatgacacaaatcattagatgaattttggggttttcgactaatggagtccaaaaaggttaaattcgattgttagccgatcacacaagtgcactcactccttttacacttcgaaaacttcaatttctcgtattttttgtcgcatacttatagacaattaactaattattacggtccctcctcttttttcatcactttccttaaattattaaattttagtaaaattccaccaaatggctgaatgcggtattaaaaatcatttcagaagaaaaaatatataaaaataaaaatttattaattagcgaaaaacggctcttttcgcgtttttttagttattttgacacaaatttaccaatttttaagttaaatgtttagcaaaatgcttaagaaaatttactaataaatgatttcggaattccgttctttgagggtaaaaaaggctaattttgttgatgagggccgttctaatagaggtttttggaaaataaaaacacggacgtctcaaaaattagcctcccaccgggaagctactcaccagacggaattccgcgttgcgtccgacattttttggctcggaatttcaacttcatttttgggcctcggggctccatccgtccatccccggtactcaaatcaccaacaaatctctcaaacattgctttaaggctacatatttatatgtgtatgtttttgttttgtatgaataatctatggtatgttttgtagttcgtttcgatcacttttcaattcgtcgtccgatttgccctttttcctccgtcgtctctccgctgccccttcgctccgttctcaactcagtcactctttggccatacccttcgatcattgcttctacgatgaatctgatcagtcgtccaaatgcgttaatcgtttctgctctttcgttgtcgtcggcaaattccattttggaaataagtgctgaaaaataaaattatgtacctttaaaatcggcaaaataatttcctcccccgtggcatttccttttgaatgccctcaccgattagactctgctggtaaatgtccaaaaagtgcggcttcagtccgaactgcgcgtactccgcgtgcgttttgcccagccgcgtgcattggtcggccatccgccgctcgtccatgttcagctcgtagatgagccgttcgtaaaatttgaactgcgcctggctaaataaatgaatatttttttattcatggtggaaaccggcactttttctgtggacattttgaccgaataaaatttaatatttaatttaataaatatttttttattatttttaatccccgccccaaaactaaccaaattctgttcagttttggccattttgtcaagtcacggtaacagtatcttccgcatgcgatgatttcattcagttttgggctcgcctcaatgcatcggagcatcgttttgtggaaaaggtcgcaccgatcggtcgcaattcgtttccgccaacagcgggcgattcttaagcaaacaatggaaaaatcatttaaatctttcctcacttaaaaaaactgacgtaaaatttgggtaagaaattaaatttaaataaataatatatttttggaataaaaataaactctttttcgttttgagtccgatgaattcgaatttcgcttctctgcttgcgcttttcccaagtcctcgtcccactcaactctttggccccttggccatggcttttgtagtgccctccctattaatccccccttggcacttacatttccttatctctcatgctcaattctcccccaattgtgccttctccgtctttggcatttcctttggcgttttgtcccgcgtcgttttgctttgcccaattttccgctgcttctccccctttctgatgcttctgttcgctttgcttttgctgctgttccttcgtcggtgtcatcaaagtgttcactttcactgtcctcctttgcaattcgtccattgtttttgccatttccctttaataaattaaattaaaaataaataattgcagggaacaagctgctgggcggttacaacgcggaagcgaggaatgattaagactcataaaaagaaagggcggacggaatgtgccgcggtagcttaatggtaaatggtaaagccacccatggattggtcggacgagtggttcgattccaatccgaggccaacatttgcccatttctttattagtgaatatgttaattgtgttttttaggatttaattatttactgtaataatttatcagtgtacagtaatagttacagtacaatttgttggtgagcagcagctgctgttgcgagcacaacgactgactgagacacgcgttgcccatttttgtgtgccttttgtcaaattataaattcaaaataattgtaaaaatctaaaaaaaaatagaagaattggttggaaagtgtcaaacattaaggatgaataaagcttaattggatgtttagaacaataatttaaaatattatcatttgaaaagcataacaaataaattattaattaggaatgaattgcttttttccaatgatttcaaatggccaaaatatggtagaacatttctatgggaatatttatttacgtaatgatagcacctgctatttggtgaatgttctcaccacaaattacattttaaattagttacgcttttccgtttctccgattttcccatgggagtgaattttgggtaaaaaatttgcacttttccaaatataattaattacatggcaaaattcgttcatagtaggctaaatttgaaaagatcatttcctaattgattttaaaatgtactcaatgttagtctttgatttgccgtgagttcggctaagtctccgctggggcggcgcattggcaataaaaagtgggcaatttgaagaagcaggcgctaattgccgctgttaatgattctcatctttcattttttttacatttagcggagtccaaggaacagagcttaaaaaatagggatacgaactgctaaatttggaagtaattttacaatgtttcgttagcagaatgaactaaaaaatctaatttttatttaaaatattaacattatgaattaaaatgggacgaaaatgctaaagatgagatttttatgtaaataagtaacatgaaaatttggaaaagctgatattcttattcagtttttttaatcaacatttttgcaatataacttaaaaagcataaaaatttttatgtaaaatttacaaattttagaaatttgcggatttttgtaaattttaagtgtgtaaaatgttctggtttttgcagactttaagctttaattagaaaatatttgtctacaaaattcaagtcattctgacaattacgaactgaataaggaaatcagttttttcgaacttcgtgaaattttatttacataaaatctcaccttcaccaattaggaccgaatttaaatggacaaaaaaaaggatgaagtatggacaaaacgcttgaatatggataaaaatttcaaaatattgaaatagaaaatcttaaaaataagttaattaagaaa

SEQ ID NO: 7600 - DNA, 651 bp, Heterodera glycines
ggaggtcatagacaaaatcaaaggattttgcaaaatctgagatcggattcgtgtggtccccgcccttccggtggcaatttttctttatcgataaataaaaaactttcaatttataaaactatcactggggactcaacccaccagcattccaattcgtctattagcagatacaaaataagtaattgcataaactaaaacttttccctttttaatttcatcattacattttcattttgaatgactaagcgacctcgctctcaaagtgaatacagtcatggtcataagtgttgtcccatcatgctttgaaaaaaataattgcgtataaaattgtgattttccaatttcaacagataagtagcataccattggataggattttttatgggctttccaatgataccatatttgcatttgtgacgtagacatttatttgatttattttaccatattcacaatttgatcagaatataggtggtcaaaagtgttgtcccatttcatttttaaaatattgcttctctggatcgggattaaaaagatctaaaaaaattcaggtgatgataactttggatggtgataaggaaaggtagcaacaccatgtggagcagataactccttgatggagatctgatcagattattttgtgtgggaaag

SEQ ID NO: 7601 - DNA, 4690 bp, Heterodera glycines
  unsure (1)..(4690): unsure at all n locations
taagcggggggagatggaccggtacaaaatccattgtctattcgattcgctgggggtcgaatgcggcaccatatcgtaccgaatgggccgtccttacaaccagcacaaaaaagtgcccgcncactcaaagtgatcatgccttcccgtgcttttcaaagacaggttcttgtggaatggcggaacaaatcgaacacaattcgcggcaaagtgaccaaagcacagctagatgaacggcgtcgttttcatgcacagtgtgtcgaaaatcgtcagagagacggtcaggattggattgtctatgcaggaagcgttatcttacgggaggaaattcacatttttcggcgccaaatgatagataccgattctcgtaaaaattgactcgagacaaaatcacctaagcatttctcaaaaaattttcaaaatttaaattgctgcctaattaatattaggtcaataatgaacaaaatggaagagatttcactaattttagaagccaaaaaatacaaatcttaacattaactgaaacttggacaacagaaaaccaggacatacctttttgtccttggattaaagaaaattttaattatatctttgcttcaagaaaatctaaaaatctcttacgtagcggtggctatggtattcttcttagaaaagaaattaaattttttgttaaattttctgatactaaatttaatagttaaattttggttctacaattacaaaatactaaatcaattaggcttatattaatatatcgtccgccaaggactacttttaagcaaacaaaaaatctttttagtttttaaaacctttttctgtgtaaattctataattttagacgatttaaatttttctaaaaaagacctagtatggaaggaaggcaaaccattttccttgagtaattttggtgaaatattttgtgacttctttaataggttttcttatgttaatgccactcatggaccctcaaggagaaattcttggctagacagttttaccagcaaatgataaaattgtaacacaatgttctatcgaaggaggcattttttcgtcagatcatttagcccaattttttatattaactgttccggaattaattcctaaatcaaaaacataaatattaggcgatttactccatcaaatgtgtcacttttcaatgtagttattgcctcaaggcttagagctttatcatgtggaataatcagagtaaatgaaaaatatgtatcttataacaatgcatagatatattgttatgagcagtgtattggaaaaattcagcaataattttattatttactgtatttaccgtaattattttgacaattatttcaattttatatttaaagttttcaccaatcggaagaggatacaaattaataagccgaaatttaattacaattattatttcttttttattaattaatgacaaaattttctcggcgagagggtcacataaatgtgacaaaaattcatatgaaatttctgatcagcaaacgccaaaatttaatgaatcacaaaatattattgttcataaaatcacaaataaaatgactaagatttttgcaaggaacattttgcaaataaaaattaaagatcagaatttaaaaaattattcaaggcttattagggcacattttaaatcatatgaactgactaaattatgtcgacatttgaacaagaaatgcttacggcacaagaaatgtgttcaaataaacaaaatgagaaataaattaaagaatatgaaacaaagatcaagaatatttatgtataaaagcaaaaataaaataaaatttaaacacattaaaaacaaaataattttaaaattaattttaaattcactattttcaattaagcttttcaaaatgatcgaaccacgaaccagcctgatcaaattcgcagccgagttgttcaacaccaaggctgaatttgtgcagtgcattgtgctgacccgggccgacaaacgagagaaattgatcatggaactgagaaaggccgacttcaacggggtcaaaatttggagcaaaatggacacaaagccaaaagtaaatttaaacgaaaattggtgggaattcgttttagacatgccatttgaagccgaatttggaggcaccaattcggtggtcgaattaaacaaacaaataaatgatgattttcgaccaaatttgtcaaaattcggaccaggtttagtcttaaaccgaaaattttacccgatttcgggaataatgctcgaaggagtactcgatatttatgataaatatcgagaattctggtggaaaattgaaaaggaaaacacccaaattcaaaattctaaaagttgccaaaagggtgcaacaaaaataatgaatgcaaatgaagaaaaagaaaaaactatcgaattttttatggaaactgatgaggattcggttgattttgaagccgaatcggaattttttcaggaagagaaggagcaaaattcggccaagagggctgatgggcgtctaaaactgacggtaaaggcgaattccaatcaaaaccgtgttttgacaattaagggagttaatgctaaatgagagcattttggacgaaagtgatgaggactcttgtggaaagtccaaccaaaaggccgaaaaagtgaacaacgccaaaaggcgaaaaatcgtgtatgagtgccatgagtgccaaccgtcaacgagtgcgcaaaacgcaatttcaaatcaaatgggttttggtatagaaaatattaaagtacaaaaaggggggaaattcaacgaaacaggttccgaaatcggcggtttggtccaagccaacccccaattggtctcccaattggccactgttgccggacaactgctcggcacagcactgaaagaagaaagaaacagcgcaacaacaaaattcgcaagagggcgcgggcggggacactttttctgtggccgacctgatcattggcgttcccccccccacaagctgaaacttggcgctcatttccacccccaaaatggcaaaacagcactgatcagaccgaccgacaagcgcaggacttggcgagaaccgcggcagaagcaatgcacgaattggcaaatcacatccgacaaccgaaccccgacttggccgccatgctcttcgcgatcgaagccgctctgaccgaaatctgccaaaaccgttggcacaaatgatgaagaagaacttcagccccccgagtgtcaccgctgtgacgaacgaattggaaagaattggatttttaaccattttttattaatcaccattatttgtgccaatttttggcttatttaacgattaatcactcttatttactaacaattttccatatgattgtgcccctcgccccctcattttgtaccatatttaaccctcaatttgtaccttccatttctactccagtcactattcacacataaccaacacaaatccattcacatttcatttaatcaccgataaatctgcaccaactaatagctgtcaaccacaaattaatcactaattaattactaaatctatacttgttaataaggggaattaacaatgtttatatacttttttatgcactcaatttcacttgtaatctcgggacttgagtatggtgattatataaaaaatattatattaaggcgaatggatctggttttaacttttaaaatatttgggtatttttgcataatttaaaatttgatctcgatccctaatcaccgacggataaatttcaatttaaatttaagaatcgcaaaaaatcagttctcttgtatcgaaaattgattttatttttatatattcttattttttaattttttataaaaatttctcatttctattttattttttaatgcttaaattgttgatttttaaaaaaaaatttattacaatatttttcttttgaagtttgtttatatattacctagcctcatttcatgaggcattaaaataaaatgggactgaattggacgcgaggcaaaaaatcgtatagtttttttcatatgcttaaacaatgattgtcatgtcttagtgttgtttgtcagatgcataagtgcaatcacatttttatacacacattggtgttggcataaatctcatttttatgcgaatttccccttattaggctgtcagcaataaattggcactctgccaaaagtgggcatgcaaaatgcttacaggcaaacaaagatttatgaccatgccaaaattgggcgcatagttccatagcgtgtatagtgtgggctataatagtcatagaagtatattattatgagaaaaacagaaatctatttctctatatgaatattggcactgtattttgccgatctctttcactggtgtatctcataattgcaggaacattttatttatgtatgactgactctctttctctgatgtagcccatatttggacgaacattttatgtatgtatgactgactctctttctctgatgtatcccatatttgcacagatattttatttctctgcccactctcttcattggcatgtgctatctgatttttgtttgaccgtcttccatgcgatattgcttcgcatttgcatgccgtgcagtcttttcgctgaaagtgccaatataaaagcggtgccaaactcagccaatgacacttcattttcaactactctctctcactaattgttgcacattccccaattttatttcttccttagtaagtagtattggtgcacaatgcgcacttttct

SEQ ID NO: 7602 - DNA, 1516 bp, Heterodera glycines
tgttagatagtaaacagatttttcacgattttagaaaaccttttgccagacagtccaaagtatgattccccaattttagccggttcatctggcagtccgaaaaaaggttataaattgcaaatttttactccaataaattaagttgcattaaaattgatgaacaaaaaacgtaattaattattaaataaaacgtttattttgaatgattcaaataatgaaaatgtgttattaatcattttatttttcgccttttaggaaaatcgccacatgccgatccgaaaaaaggttataaaaaaaaattcataattaatttttcttttaaaatataaaataagcaatttttgcttgaatgaaataaaaagtaccatttaacaaattcataataaaatatcgaaaacaataattttagcccagaataaaagtcccatttaaaaaaattcataattatgcaccctaattaattgtaattaagctgcttcacaccttgtgccagtaacaccagggaaagtatgatgagcaaggtaaccaacagaaccatgctaccggttgccaaattttgtaatcattagccttaaaatggtgaagaaactgtgtggaacgatgatgccaaccatgaacaaacccaaagctgttgtagtagatgtagaaaaaaaactgtggtatcatcacgctattattgttgtgtaaaaaacgatccgtttttacctcttttcgggaaaaaaaactgcaaaaaattcacaaaaaaaaaaatctcacattgtgcacccttttctatcatttgtggagtaaagaattttcgggaaagacaacaatttgcatcaaatttttttgctgaatttatgcagaaaacagcagcagcagcagcaaatccccatcgatatctcagagcaatatcatttaggacaacagtcaaattcgtgatcagcgagctcaaaaagcttataaactcatttttcgactttttaaatctcaaaaaaaatttttggaaaaggggctacaccggtggtactcttacccagaaataatttttggaaaattttagaccaattaatgctttcataagatgattttattgaaattagccaattaaaaaaaacagtgacgaaatgattggtaaccattttttaaaattccatttaaaaggattattttaattactaaatctatacttgttaataaggggaattaacaaattggtgccacgaccaactaaaaaaaaaaaaatgtcaaaaccaatacgcatgcgtattaatccatcatggagaaatctgagagaaagattaactcaaataagaccggtggttgaagctcaagagataacaccggaagaaatcgaattattaagaaaatcacttgtaaaacttaaacgttcagtgaattttattgatgaaagaattgaagaatggcgaaattacatggctaatgttcaagccgcacaaagagccgaagaagaaggcctttttgacaatctaactaataatggacgccacataaccgaatggttagaagatacacg

SEQ ID NO: 7603 - DNA, 4766 bp, Heterodera glycines
cccaatttactcaaaaaccccgggactcaattaggcgaatcttcctcgtcccgctaatacatttctcttttcccaccttatctcccattcaatctccctcatccatttcacatccgttccccttattccgtttccttccgccacttacggacacttttcacgtacaaaaggcactccgatcacaccaatcggggagggagagaggaagagcacgtaaacccataattcactcggcctctcccctccgtccctttcctccagggcttcttccccttcccctcagggcttttctcaccccaaggaattcaaccttcaatccctccagggcactttctttaccaatggcactcccaaaatccaatcaatccttccttttctaatttcaaacaacatgacacttattttaaacaattttatttatatttattttcttattttcattaataaacaataaaagtcaattcgacatttggaaataaaagggaaattaaaagggaaaattcggtaataaataaagggactttttcggacattttccctcccggcccggcacgttcccacatttctggtagcaccggatggttgtcaaacgacaacctttccatcctctctctgggcaatattgtcccatttcacctctagcatttcttcccgaaaatttacatttttttcgctcattacccccccccccccccttcccttcccaacaatattcacgcactgccgcaattagttgttcagttccaactccgactttttgcaaacaacagctgtcgtgaagttcaaaacttctcgattagcagagcagaattttttttttcattggccaattctcagatttttcgcacaaacagtttattaaagctcaaaagccctccaccacccactctttatcatcgaacatttcattttcaggacaaattgcgcattaaacattcagttttcaggccatttcgcacataaatattcaattttcaggccatttcctcgcttacaacattcaaaattccaggccatttacgcatccaacattcaaatccaggccatttacgcatccaacattcaaatccaggccatttacgcatccaacattcaaaactccaggccatttacgcattcaaattcaaatccaggccattttcctctcatacaacattcaaattccaggccatttgcgcatccaacattcaaatccaggccattttcctctcatacaacattcaaattccaggccatttgcgcatccaacattcaaattccaggccatttgcgcatccaacattcaaatccatgccattttcctctcatacaacattcaaattccaggccatttgcgcatccaacattcaaattccaggccatttgcgcaccaacattcaaatccaggccatttcctcgcatacaacattcaaatccaggccatttccccgcatacaacattcgttatcaggccatttccgtgcatcaacatttaatttcaggccatttacctcgcataaacattcaaattccaggccatttgcgcattcaacattcaattccaggccattccctcgcatcaaacattaaaattcctggacatttactcggatccgacattcagttacgagccatttcctcgcatcaaacattcagccaaatcacccatcaaacattcaaattcaaggccatttctcgtattccacattcaataaggccaaaattgcacatccccagttttcagggaagttttacacctttaaaaattgctttacacacccacatgcacacgtttttaaccaccgaacttaaaatttttttaagttaaaactcccaaaactcaattacattcctggttactacataatagcatccagagaatcacaataaaactgttaagttttatttttagtggccttatcgcaccctccttctcttgtacccttccgaatttatcggtcaaaatactatccctaaattttttcaattaaattaaatcctcaagtaccaaaattcctatgttatgcaaattccagatacataaacaagtggattaccctcactgggttatcttgctaaaaaaacaacaaaactcttagctcctctctcagtttaacctccttaaatccatgatttttcccctttgattaatttaaagttttccgtttttggatttttaattctgcttggttattaaggccagcttttccctcgatttcagaccaattccggcttcctccctgaataccaaacaatttttcccaatgattttgtttccccaattttcgtaatcaatcaattcctttttactttaatattcaaaaagcattaacggtacaatatcctggaaattaattttcgtatgttatcgtttttttaaaaaaaactgccctatttttcttgaatttatactttagctttcaatcaaattcctctggtttcctaactataattagccgaaaatttatcttaaatccatcctaaattacattaatcccgaaattagtgttttttccatgaagcccaaaatgcaaccatcttaaaaaaaagagaaaagcgattttcctcaaagggatatattgcatagatccactacaaatccaaataaatcgttttcaattagtaaaaagggctaattattatctcaattccccaactcacaagctttcatttcagaatttgtgccctatttttctaaatttttgaatttatccattagcttccaatcataatttccgtttcgtttcctaattatttagttagccgaaattaatctatccatccttttgcatcaataaatcccgaaattagtgttttgtttttccaagcgaaccccaatatccaaccattctaaaaacaaagtacacgcggattttcctcaacgggatatcttgcagagaagcaattataatcctttgcaaattaatattaaaaaaaaatttgttttttgacatcactccattcccaacgcagtttccatgtcacaatttacattttacaaaccctatttctcacaccctgcattcataaatgacgccacggcataatgcctcccgatagttccttgccctcctcactcactacctctttccgtgtcatggcattctagctttcctcctttacaaccaaaccctaaccaaactttaatgactctaataaattttatttcagttttctttgcacttcactttgagtttgcgctcagatcccttgacacttcaaaaacatttttgccgcctggtcttcactgcgtaatgaaatcacagatggacatgaattcaataaagatggaaaagatgatatgatgataaatttgatgattccattttcgatggccacattcatatcaactcttatctttcaccatctaccctcaccaaagaccagggacggtcttccgatggcgtcggaggtgtaacccacaaccccctcccaatttactcaaaaaccccgggactcaattaggcgaatcttcctcctcccgctaatacatttctcttttcccaccttatctcccattcaatctccctcatccatttcacatccgttccccttattccgtttccttccgccacttacggacacttttcacgtacaaaaggcactccgatcacaccaatcggggagggagagaggaagagcacataaatccataattcactcggcctctccccctccgtccctttcccccagggcttcttccccttcccctcagggcttttctcaccccagggaattcaatcttcaatccctccagggcactttccttaccaatggcactccaaaaatccaatcaatccttcccttttctaatttcaatcaacacggcacttattttaaacaattatatttatatttattttcttattttcgttaataaataataaaactcaattcgacatttggaaataaaagggaaattaaaaagggaaatttggtaataaataaagggactttttcggacattttccctcccggcccggcacgttcccacatttctacgccatcccatttgacggatgttgggaagtgcttcataaatgttccaccctgttcgctcaattgatcgtaaaaaaacgtccgttgttgttgccggtaagccattgactagtttaaatttccatttaattcgtttgtctaatgcttctaaagtccttaactgaattcgagcaaaaagcatcaaaaattgacaacaaatacagaaaaaaattatgttcatgatcagctcgctccaaaattctaaaaatatcctaatatgatttaattcctcatttacagattctcggcttggtcaagaattatgtccctgtcgaatacactggacatcgaccattcacggtatgttactgcaccaaaaatgcaatgcgaaatatcactattttattataatatcatcggtcaattattttgccgttgttcatttttgccctccttaaaacgtggtgggtggggaggagtctcctcaccaatccgtgcaaaaagtgtagcagctaagccattaatattattacgaattgtatttgaatattttgagccatgaaatgtccccacaaaatccacctcccccttgagcttctttccgagtcggcaaatgccattcgattcaatccccgttgatttggtgtccgagtttcgtccaccttcgactatttcttgtcaaaaaaccgaaaattttttggaaaaaataaaataattgtatttaaacacttgcgtaaaaactggtgaaattttgttctatccttggtcctccaaatgcatgtgcggcgctccttaaaagtgcgaatttt

SEQ ID NO: 7604 - DNA, 918 bp, Heterodera glycines
caggtttttcgtgccaaacattaatttagccttatttttcaaaaagtgtaagttgcacatgcccttcttttggttatttttatttacaaaaaaaagcataaaaggaactttcagcttttttgttgtgcatttggggggttttcgggagcgctgaccacgaatattacatcctcggcctatttcgaatcccgaattcgaacaaaagtcgagaattaatttttcactagaattcacatttattgtaaaatcggttcaaatgcatttcgtaccgacattttcgtacgggggacgtttttgtagcgccgatttcgtaccgccattttgcgccgttttcgtaagggtgacgtttttgtaccgccgttttcttacggcattggcataatgtaatcattttgagggaccatattgttattgatatcgttatagtgttggacgagacgaagaatccgtgcgtcggcaccgcaatacttctttttctgtgcatcatcatgcacaaatttatcataatttagttttgttttaattacttgctgctgggggatcgagccagttccctaccgccaattccctactaaggcatttgggccatttcaataccaaagatatgagaatattcatagagagtgaacttaaaaatccaagaaaatttaaaaaaatttatttgtttcaaatcacggtctcatttcataatttcgagaaattccgatcaaaaaagtaaaaaaatgattgaaaggctgatgaatgggaaaatgttggtgtctctgttgttaagtggtaaataattttgaaccatcgtgagaattcgacggtctgctgcgcgatatttctttgccttttgcggtagttcttgtccagttgaacacttcgcgaaatcataatccgataacttttgatcatttcgcagaagatcaatgaaat

SEQ ID NO: 7605 - DNA, 2503 bp, Heterodera glycines
aaaatctgttaccaaatcacatccaaaatttccaaattttcccctgcggcgcctaccggcaccgctgcccaccccagttcccgaaaattttttggaaaaagtgcgccgcaaaaaagtggttttggaaagcaaaaaaaaaaggtcgtcaaaatatatctttggccaacccctcccccttttttatgtatgatgaccactcaactttcagacggacgattcactcagagcaccgatgagacgctcgagttccttgtacgacttctttgtatctcaacaacctccagttcattctcttgcgaaaaagaataacgaagccaaatactatgcgaggaattgggaattgtttccgagaagtttcgtttcgtcgtcttcgcatatgatatgcagaccaaaaggaaaagaaaaatatcatattttgccaaactaaagcaagaaaatgacgccttggattgaatgaaaccatgtagatacatataaacctctcataattttcatatttcgaatttacaccgtttaattttgcagtccgctttggactagtaaaaaataaactaccgtattttcccgattactagactcccctttgagggggttgaattataaaaggacccttctaatatgtagaagaccccgttcgattataagtgctcctttttgaataaaaccgagtgtttttcgttagaatatgaccatttgatttgggtttaatcaatcttctgacctcaactaccaagcggatttatatgtaattaatagttgatggtagcaccatttttcacaaaaaattgtaaatggagttgattttagaagttttcgtgaccaattttgatgttgataatttctactgtaaaatgcaatattataataaattttggaaccaaatcttatcttaccgattgccccgtatcattggaaagcccataaaaatactatcagaaagggcttctttttttagaatgcaaaattacaatttatttccgatgatacatatcttacaagaaaggatgggacaacacttttaaccatgactgttgaacaattttgccaaattcagctttagcttaattaataaactaggattttcggtaatagttcggtttcgaacaaaaagtcgaacggtcagactatcacggtcagactaaaccggccagactaaacctacccccaccgttcattagctcattttcttattatgaaaagccaaatcattaggggtgtaaaaaagtctcggtctcgagtctcgaaaatcgagaccgagacttgaaaacccgagactcgagaccgagaccaaaaaaacccgagacttctcgagtcgagaccgagagtctcgaacagcactactcggcagactgcttcctccgccctccgtctcgccccgctacttgctccgtcttcgtatgctcccttttgcgaaatttttccttttaaatggttatttattttggtactgaagtgtccattttctctgggactaagttgtcccagtgcttagatggcattggttcgagtttataccttgttttttagacttagctcatcaagagctttcgaatgataccaaatttgtccgaatttgggcgttttaaaaggtcaggagccccccttttcactcaaattttcgagttttaaaccggttcaaaaaccggttttttggcatttccgcaactggagacttactttttcgtgcatagctcgtcgagacgaatcgattgttatatcatttatgtcattttttccggggggttgactacagtacaccccaaaaaaaaacccgctaaacaagtaccaacttctgaaattgaaataggcaatcaattttccagtcttctttgcaacgacataaatgttttctcatttatcacaccacacaatacaaatgaacaattgatacaaattgtgaataatggaacatcattgtgcttaggaattcaaccttatatacagacagacatgggacaaaatgcctaacattacaatacatatgacattatggggcctaagattcacacatctgacatcggacggcatcgtcacaggctgttcacgctcccacaaggcgattcatccgcaatgcgaccgctgctgcgactgctgcgcctcgtccacttccgtcctcgctgagcaccatgaagaactgaaattagaggagatttattcatatcattccgaaacgatattagaaactatgtaactcacttcgcatttgacggccaacagcgccttgatcttctggtcgaggttgaatttgaaggttggatggaagcggaacacggagccgtcgacgccgatagtcacgcggggcctctgcatgcggttgaggatggcggcaagcccacaggcgcagagatgagcggcgcgcgtgccaatcaacgagctgatgtaggcgacatttgcacagtcggcggccgatgagttcgaaatgcctaaaatgggatgttgaatggctaaagtgatcaaatgacaactcaccaatggcgcgcagcatctcgccgacttggcgaat

SEQ ID NO: 7606 - DNA, 3411 bp, Heterodera glycines
acagttttggcacggttcggaaaaataccttgtaatatttctttcatctttttagtttgtctgttgcgccgaatttgccaaatgtatctgcaattgaaagtgctgggaaaaacgcattttgggtgggtcgtgagaatggcacgatagagagggtattaattttggatttgaatgtttgggccaattagtatattcagtggacttctattaacgaagcgcatggcactggcgggagtgagtctttttccctcctttggtccctctcaacaaattcgactcactttggcccttttgacttggcgatgctttcagacaaaaatcatttgctgtacagagacggaaacgaagtgagttgcagattagcattgttttatttatttatttagtcaattccccccccccccccattgtattttttttcttttcattaggtacgtctcctccccgtcgattgtgctgggctttatccaaaatgcgaagatattttttggaatgatcctctccattgcaaatggtgcgctttccaaaatttgactggccataccgtttcgtctccctccgatgacaattccgtggatgtcatatgtcctcgagggtatctgctggagggatgcccaccggcagtgagtgaggtatttttgttcctttcatttacgccacgccacgtaacctaatttgctcatttatctgttaggtggtcccgagtgtggacggctctctgaacatttatgggaaacacctcaattcgctcgaaaactttcacgtttcgctgtgtgactctgaatgtgccaatctcgtcgttaaaagcgatttgtatgcccttcttttgttcttcatttttttttctttgccccaatattcccattttttaagaatccgttgcaaaattccgtccttccaattccattgcgacgacctttttttgtctggatccatgggcaatgtttcaaatatgcgcttccttttcaaaattgcctttgcttccgatcacccgtcccccgtcgtcccctcttcaaatttcacttatgccattcgaattgttttgggtattacgcttcttttgcttctgttttccgttttggtgctattttactgtgtcttctaccctaaatattcggaggtttgtgagcacaaattgcaaatggacaaagtcttttttagcgacttctcaaaaggctcgggaattcgaatttgtcatcgaatggtaaatgcctttccctttttggtgcaactttcgttctgttactgcctctttctttttctctttccttccttcttttcttacccattgagaagtaaattttcatattttgattgataatttctccctttttactcttcaaatttctcttttccttccccactgctttctttctctctcgcttttctcattttcctcttttcatttattttccattgcttttttccaatttctctcttttcgcttcttccgttcctattcctcatttcagtttctcatttcgttgccagaattctcctcttcctcctcctacacgcccatcccactcacagagccgcgctttatactcggcccacaattcaccaaagaaactttctctcccgttcggtttgatcatatggacggcccaaagaatgtggtgcttctgtcggatgggagtgaggtaccatttggatcgggccgagcacaagggcggtttgaataccttagctagccgataaacgccgccataggaaattgatcgagtttttcgaatagtttgtcatggcatttccatttcgcctccctaggtactgctagcccattttatagtattagattggatgtaattttctcattgactgatttttcgtattatttagttggacctgtcaaactgggataatattggaggcggtaagtttttacatttttattcgttttaactttactttaggacattttgccaaagtgtgcaaggcaaaatggcacagaaattcggcggactatgaaggaaattacgtggctgtgaaaattattcgcgacattacagagaattcctattctgcaatccaaaaagaggttgaagcaatgagtcggtgagttttgcccttttgtaaactgataaatgattcacttattaatagctgtgaacacccgaacatcgtccattacatcggtttctttggatccgaccaattgggacccctcggcaaggaacttggcctgatcaacatcgtcatggagttcatgggcgggaaggaccttcacggctacctcataaacgaaaaaattgtttggcaaagcaaagcatggttctggtgaactttataaatccattcgacttttatgagtccaattaactatcaaccctgctaattttgattgtgagaatttgcatattcttgcttctttagactttgtgctttcaatcgataccaaaagtcaaccgtttattcaacgctaagttacggtccggaaaactcaggctttatagttgattggactcttaaaagtcgattggattcataaagtgcactaggaccgattttccaaaaaccctcgctttggtttttagtctccgactattggcaatgccttctcattcatttcgcaaattgttgaagggatggcttatatgagtagtagacggatagtccaccgtgatttggcagctcggaattgtttgctcgatgatagattcgaagtggtaaagataaccggtaagagtgaattcatcgggggggggggacttagacggaatgaaaatcggaatttgctgtagactttggcctttctcggctgatggaaaagtcagcccaacaggaagggaatgagtacgaatatttgggcaagaactgcgagttgctgcccttccgttggactgccctcgaatgttttggcgataacccttcggttggtaatccaatgccttttactgtttcctcttctgctgtttcagttctcggaaaaaacggacgtttggtcgtttggagttctgatgtgggaaatattcgcgagaaatgttttgccttttccgaatatgaccagtaaagtaggtggtcctttcggttttcgttgttttctaacttattttaggaggttcgactttgtcttgagcgagggggtcgtttgagcaaattggatcggtggagttgtccggatgaactttagtgcgtattgctactaaaatgtacaactagcagaacttccatttgctccttttagccaattgatgctgcgctgttggaacgtaaaaccccaattaaggccaacttttacggaaatcagtgtagaaatggcggaaattgtcgaccatttgctggaaactgactcaaattatatggaaacacaatacgaaatgttggaagcgggacataacgaatatgaaacggtgatagaatggatgggggacaacggaactgacattctttgtgttttttatttcttta

SEQ ID NO: 7607 - DNA, 1681 bp, Heterodera glycines
  unsure (1)..(1681): unsure at all n locations
tagataaaaaaatcgtcataacttttgttaaacgaccttccctagctcagtttcttaggccatattcttttttcttacctgaccagtgatcaatgcctaatttttggtattaaataaatgcttaaagtctcggaaattccccacgaatttcaccctaaaaagtggcttttggtaagttcgagtctcttctcttcctttggaacttaacggtctcgagcctcactaataatgctagaaagactagctcgagttttttattttttgtatttttaagttcctagaataattgttaaaaattgatacttttcaaaaaaattttcttaaaaacaagcaggtttattcaaaaatcactaaattatcctaatggcataacacaaatccatgtcgataatcccaacagaaagaacatttttatgagcacgtcaaaaattgaatttcacttttcaactctccataattcaaattgaccgatcacttctcagcaaattcgttcacttctgctgatcacttgggccgggagttgcgccgagaagcctaaaaataaataaatttggatttttgaataagcattcaacactgactgacccgtccccaatatttttctcatcattaatttcaatgtcaattctgttccattgataataaattagccaattagccgcttcttcttcccatttcgcccatttgttcgcgtctcgcacaattggacaacggattagcaaaaagcgggtgttaaagacagttcttttcaatgccaattgttcgtgagtcaattcgttggccaaatcaaagagcatgacggaggcagcaaaagatttcggaaaccaaagcacgacaatgaaattgacgggagatgaagccgaggcaaaagcctaaaatgtgaaaaaatgattaatgatattggggtcatcacaaaaagccaaagtgcactttaaaatggtatttatttttttagggattttcagggactgagaatccgattctgatatccattgcgatccaattccgaacctcggaccatatttcgaacaaaaaatcgaaaactcaatttttttcattttcttaaaacaatcataccatatctaaataagtggattgggcaaaaaaacattttttgtcagatcagcgaaacccaaagaaactaagtgccaaataaaacaattagaaagcaccgatttgaaggcttcaattgttgacgccaaattcacataatctttgttcaacgggcatctcaacacctttggcacattggttggaagtggagtgaaaagccattttgccatcgcttgtccatccgatgccgtggcactgtcatcggccggaaattcggtgaaaagattggattcgctgaaggagacaacgcgtaacaacggacaatcgttgagaattgacgggacgaattgtcgcaaacgacggaacagtttgttatccaaattcatgccacgaagatgtttttcaaggattggccaaatgttgtgcataatcaacttcaaaatgcgatcactgttcgtgtggatgaccaaattaattgggcaggcggcgaaaagtggacgaaaatggttgagaaaagcgatggcattgcggtcgatgtaactaaaaatggatggggaaaagttgccgaaaatttttgcaaaagtaccaatcttacgagatgatgatgcatttgaaaccgctaancttt

SEQ ID NO: 7608 - DNA, 2936 bp, Heterodera glycines
ttcgagattttatgataaattcgtatttttcaaaaaattttcgaaaaatcgctagaaaatttattcaaaaattttcttgaagttttcttatcaaaaaattttctaaaatttttttcttaaaaaaatttctaaattgagtttttttaaattttggcggcgcgtcccgtcccccccccccccctccccttcgcctcagccgttctaatcaagaccaaatgtcgaatgtctctgctatattttgaaatatggagccatattgggatagttcaaagttggacctttcggattaattgcctgggacatcgccgaaattggcaaattaatttcaatttgttttcctccaccctaatgactcacttatgggccaccgtctcaaacattgccacaaaagcgttacaatccaattcctccgagtcgtagaacatcaccagccaatccaacgcgccttcgtcgggcgaatgggaatcggtacgccactcaaagttatcatcggtgagatccctttggacatgaaaaagccgaatttaaatttaacaaaaaaaaaatgaattcaatggctctctcctcgccgcatgaaaacaaatatttggagataaaatcagtgagtgatcttaagagcatttttaggtcgaagatttcaatgaattcatatattttctgcaactttatttagatgagttgactttttattttttattgatattttcttaaatatttattaaatatttctgctggattctttgtaaatataaatccgcgccttattcattttgtcggaatttgttgaaaaaatcagaaaaaacctatcaatcaaaaataagatgaattttattatcagataatttatcacttcagcatagtagaaatgaatccgcccgccgattgtgagcataatccaataaaaaccactaattaacccaatgtttatctattactgttaccgtaatcccccttaattcttcaaccctaaaatgagtttgaaatgccaatattctcaaaactcaccatgtggccacttcgtcatgcgctcggagccaccgcaaaacgatggttgagtcgccaaagtcgccgtcgtacagaatgggcttgtttcgccggaagtagaccaatgcgggaaaggtgctgacgccgcattcgcgggccacccgtcggtcgtccgtcttcacaacctgccaataaaaatgggaaatatttattctaataaatttctacaatttaatttaggttccctcccccctccccgaccccttggagcaagaaaagtcttgggattgatgagtaacataatttctcagggatggcgggagaaatttaaaaaaaaaatgtcggcgagtaattcatttgtcggggagaattttgcataaaaagttataggattatcccaaaatgccggataaaaaaaagaccaaatcactcggatgcgatctattccaattctcattggtttaatttccgtatccggttcgcgcacctcaatgtacccagtcgcctcgatgtcgtcgtcaatctcttccacctcggacaacgctgtcccacactggggacactttgcacgaccgtcatctaaaaaagcgatcgatcactgatcacactcatcatttatacatattcattcattctctcttacagaaaaatacaaccaaatttttggcagtgtcccgaagaatttcgtcaatttgttcctcgtccacatcctcaatggagaactcagaatcgatctgttgctgctgcttattgtgctgttgctggtgttgttgttgttgttgttgttgtcgttgagcggtccgttgtcccttcaaagaaaaatttttcgaaaattttttaattgcatattttataattgtaaggaagaagctggctgtgtgattaaaatgcggaaatgtggatgagtgggttcaattcccacccgaggcgcctaacattttgcacatttcttattcaatggaagtttaaaaactgtattgactgaaagaaaattccaacaaaatcatcaaaaatttttaagttaatcctttaaattgaagcttaatctcgaagctcgagactgaaatgaatccgaaattcgagactgaaaatgggctgtcccgccaagtgagtacctttgcttccggtgctggtgaagcagctgatttggctgtactttgtttatgtgatgccgctgttttctcatggtgtaccacaaccgggtcctctgcagccgttacctttcattaattaatttgacagactaattagggatcagcagggacattgatctcttcggggttaataattatctcggtaaatggaaattaaattaaaattgaaaaaggattatgtatcagtgaaatgttgtaatgccaatttccaatttccgacatttttttggatcggaattacgatttccgattgccaaattttttttcagtcgtcggaattccgattgttgcaattttttttagggcgtctgcaaacattgctggtatgtatatcttaattttaaaaatcaaaatctttttctaagttttcaagtattaaaaattagaaaaataaaaaaatttttttaaatttttcttttcagctgactggtcaagaaattaaaaatttatctatataaaaatatccaaattttttatggaactgagaacaaatttttgtaaaaatgttttggaaaaaatcaatttaaaaaaattgtaatattctccctttactttgtagtggtgattgtttttgcgtgcatctgccaaagtgagaaaaagtgaaagtgcaaatgagaggagaagcagccgactgctggcggcgccgccggcgttttttggacgaacggaattggcacttctgctgatagggatgggctttcggcacggcacagtttcacatgatgctgctgacactaatgatgctaattgatccccgctgttccgccgtttgtctttttgccggacaattgccatttt

SEQ ID NO: 7609 - DNA, 1581 bp, Heterodera glycines
acagtcagtgatagcactaattattgccaagtcatcatatttcatatttcacctgagttcgttatttcgccactctttaaccacagtaaggcattttaaaacagccaaaaatgcacgaattttgtcctttgaattttgcccattttcttccacaatgtttccttcttcgtttttgccatttattaacgcctcaagtcgaacagcaaatgaaaatagcaaatttatcaaatgcgcttcaaattccgagtgatttttttgctgaatttttttgcgcaattcaacatttttaattgcttccaatttagcatcattttgctgcttaattgtgccaatttcttgcataatttgtttggtcttttcttcgcttaatattccattaattgccatttcaaaatttaaaattttcagttctttttctgcccggcatttaaattctttttcctgctttttgttttggccgacctccagaattttggttgttgacaaacgtgctgagccgaagcgacaaaaatatgggtgtttgtaataattaaatttaattattattttaattttattttccaagtaattaatcataacttagcttaagcttagtcaaattaataaaattaagtatttagcgacagctcgaagcatcctctactatttatgaaattttcaaaaaattagtaaaaatttacaaaaagttgtgactaaaaaagtgcgaaaaattttgactcaacaattttgaccctagctttcttgaaattcaataaaattttttgaaatttagcagaacaatagagtaatctttgggctatctaattatataaacaaaattaaaattgattgttttagaaaaaagttatgaaagaattaatagggtcatatttttatggtcatccaaaaaatgtaaggacatttaaatgcataaaaattgttcaaacttaaattaattcactccgtgcttgatacgaaaagatagcccaagctcaccacggttcaattttgactgttgtcgaaaaactttgagagagatgttaaaagtcgcacactttacaaataatgaattgatacagtagattttaatgatatgaaataaaaacccaagacaaaagcatgataatctttattaagaattaattgcaatactatattaccaaatttaaattaaatcactaaaatgtatatataaataaaataattaagataatatttgtcaagtgtaaattcttacgccttctaaggtttcaacaacggtagatgctgatctgaagaatagactgattaccaaaaggacttatctgacatcgttattgggtttgggaaaataccctggggcggcggaaaatcaaaacagaattaaatataccaaaaaattatttaattatttctttaaatagagttgacatcgttttcaatgagatgtcaatctcaaccagcactgtgttcatataatattgtattaaaagttaaatttttttgaattttaggccttccaataaaatattacgtcatctaaagtgtgatgaaaatactatattaaaaatacgaaaatccttaattatctataataaacttaaaaataaaccttttattcta

SEQ ID NO: 7610 - DNA, 3074 bp, Heterodera glycines
  unsure (1)..(3074): unsure at all n locations
tttgttcacgtgcctgccggaatatcacatccctcttttaagctgtttctactcccgcttttcactgatttcttgcccatccttcggcttcttccccgcatcattttttctatccattcttcttccatcacatttcgtccaaacttcgtcctcccccatcgctcatcttcatcatcccattattcttctcttcctctcctcctcctctctcattgtcttcgcttccttcgtcctcccaccatcccataatgtcatccactttctcttccgttggctccaaattcactctgtcctcatctccagtgccattcgcagcagtggacgccgtttcggcaccgctgctaaccatggccacctgctgctgttggatcaacaaaattaattttttttaaaatcattggcatggaccaagaggcctctattagcctgcaaaatttcgaaaaatttcgatcaggttcaaaaaagttatgacaaaaatgactgctgaaacctggtttctgatgtagttttggccataaatttgttcaaaattgaccaaattttggaattttgcaggcaaatagaggacatttaaggctatcgaatgataccaacaatgttggatttggtggcaaagaaaaaatttatagtcaaaaaacatgactgggggggcccaaacgtggtgtgaagtaaaccgatcagaggcggacggacataattatccaattttttaccactaatatctttgccgaattttgccccagatgaattttaatctttaacaaatttcactttttgtgtgtcaaatgcttgtcaaataatatctcaaaataattaactaaatagtgaccaaaaataccaaaaaaatttacgaaattttaaaatccgtgcttttctctatgaaaataaattaaaatcagtatgaacagccattaactattacgaactgtctcaaaaatgccaaaataggtgtgataatagggatcaaacaccaaaacaatggcataattactttagctgtggcgaaaattctaaaatcaaatatctatctctagtatatttctgggttttcagaaaatgagactttaaaatttaaaaaagcactctaaaaaatttttttccgcatttttatttgtgtaaattattaattcttgaaaataaagtcgcctttttttggcgatttttgtatgcctggccctatcaaataaggatatgctattattgacagatgagtccacctgttgcttttgttgttccgccaattgtccagccgccctttgttgttcgccgacaacagcgacagcagcggcactttgtttgcccatcaaagcctattagtgaattttaatgacatgtttgatttggcgtagtgacagaagacccacagacaaaagaccccccacaactttttaaaaataattcttaattaattaatttttaatttcttaatttgagtttaatctgtgagaaaaaatatcaattgacaagcgaaactaataattgcaaagtattacgttgaaactaggaaaattttcacgtaaatagtattttaagcttgctttgatgcttctaatttaccttttcaatattttctgtatttgagacttttgtccatatttctatcggcattttcacaaaagttcgaaaaatacatccctaaatatggaaattttttggaaaatacgtccctcaaaccaaaaaattttgggaatttttgtcaatatttttcgtattttttgtacatctttcagcgttttgaccatatttcgtccatattacaaatgtttagtctatattaataatctatattttggaattttttttgtccatataaatccggcccctaataataatttaaagaaaattttctcaaaaatgattcgtgggtctttttattctcacattaaactcaaattaagaaattaaaatcaattaattaagaatttatttaaaaaaagttgtgggggtcttttgtctgtgggtcttcttcgttgatacctcagatttaattgcctataattggtttgcccacctgctgtcggcccacatttgatgcctgacttgaggcaattgtggctcggccgctgccccattcctcgttggccgactcggccaaatctggcagcagttcgtgtgccgacagctgagaatttatagtaaaataataatgattttcataatttttttttgctctgccggcattttgtttcccctgaaaattttttaaatttcaaaatgaaatttttaagaaaaaattaaagaaaaaaaatttttataagaaaatttcaagaaaaaaatttgaaaaaaaagctagaaaatttttcaagattttttttctcattttctaagattttttctcgaaaaatgttaagttaaaatttctaaactgagtggaacgtaatgcaacccttcgacattgccggatccaaaattatccttttttgtacattcaataaaaaatgcataaaaatgaatttaaaaatgaaaattgaataagccattgctatattaatcagtaataaaatttatttttattcaattttataaatttaaatgtttttttgaaataaatgggaaagtccgccgtttaaaaggcatatgctcacctggatcggcctttgatgtagtgccgccagggattgcatgcttttgctttgtgccattttactgatcggtgccgaagtaatgccacccgtggaaatggcagcactctctgccgacgacgcggcagcattggaggcaaacgcacgcccggacacctttttaagcgcagccgcgacaatgaagcggcgcgcggcaccctgtacggataaaatgctaggaaaaatacgatttttacatattcgttaaattttcgactcaaaaataaacaaaaatttttcgacattttttanatatccgcgaatgatttcaaaattcacctcaaacacttcggaaatgctccgtctccgttccacgtccgcaccgtacactaaccgtatttggtgccgcttctgtgaacatgggccgtgccaactcaccggcggtggtcagcttccggtatcgcactggactgtgctgggccggcgaccctggtgacattttgcgctgtttac

SEQ ID NO: 7611 - DNA, 3222 bp, Heterodera glycines
cacataaaaattttaaaaaatttcgcttacaaattaggcacttttcggtgccgacctttataaatattttaaattctcaaactttccgaataaaaaagttcaattaaaaactaaattgcaaaaagtggtgctgatcccttcttgaaatcccacacgcaccataaattgactttgccgaaaatgtaaaggctgtctgcgttttgtgtgccactttggcggagtgtgccatttgctgttggtggttttgtgccaacgctgacaacggcaccagcggaaggccgggggaacgaagacggcgcaagcagaactcgagccaagttttgatgctggaaaaatctcgtttttttttgaaaatttattttttaaattgcttacgtttgcttggccacctcctcctcaatgatgtactcgagctcttcccgttggagcagctcttcgagttgcaacgattttcgtatgtccacgcttcgataagagagcatgctgaagaaaagggtgctaggtcgtttcttaaatactgccaagttgtaggaaaacaaaaaatgtaagacatataaattcgtatcttggtccaatttcaaccaaattaataattcttggtatcattcaatagctttgagtgttctctatcagaatattaatttagaaaatttttatatgaaattctaaaaaagttatggagccaatattcaccaaatattaagacggaattttttgtccagaacttttttcaaaatcaatgaaatttttttatatgtcttagattttttatattccttcaacttggcagtttttaagaaatgacccagcacgaagaaaaggggttaaattttaagaaattacagtaaaacaagggtctatgtggaattacagtaaccgtggtaagaaattaaaataacatctaaattatcgaaagaaattttaatgaatggagtttataaaaataaaattttataaatgccgttacattgtgacataaatttttaagtagggatgtttttatgcctaattagtaatacctaaacaggtggattttttgcgaattagaaaagttctcttcgtttaaatgtacattgttattttctgattgtgagaatgtaattttaacaatttatttaacgagaaaagaaaaattaattggattttccttaaaagtgcaaaaaatgccgttcggttttaggttttgttaacggtttttctggtttatccctcctaggctgcgcgttctttatgatttttacaatgacaaatttttcaaaaaaaatttcatagaattaccggcaccgccggactaaaaattccgtaattccttaaaaatgactctaaaatctcaaagtttagataattttggccagcacaacacggatcaagtgaatcacgccaattttcgaggtttatgatcatggattgaaaaggcaatagaatcaaatcttgatttaaataaattaaagtattttttaattttaccaaattttggcacattttttgtccacttactaaagcacgtcgtggaatgacacgtcgtcacccccgtgcagcttctccatttcgtagcacatgtgcttgaacagcagccggtccttgttcgggtccacttccaaccgaccgcgcaaaagtcgcaacaaaaattttacacggccaatcggaatttggcccttctgctccacgtccacaatgttccaaacctaggcaaaattttgttcaaatttcgttttcttgaatgtcaaattttcatttttgttttgtctcattaaaactaattgcaacaatctcattatcgagattactactaatttgcccaaattaggggtgtcagctaggaccccaaaaattcgaaaacccggattaggaagtatgaaatgcagaactgggattcatattcccgaaaaaagtcgaaaactgcaacggtaaggcggcgggggggggggtcgaacgtcacccgccgagattaggcacactactaattggcccaagaatcatttggccaaaaaaagaattgagactgttcctcaaaaatgccatactcaaacgccctggctgacaaccacctgttggaagttgcggatgtccgcataactgagcaatgcgtcctcttcagaagagtaaaacagcgagaagttttcgatgataattgccaccagcaggttgcgcacaatgtacgtgatgatcaggtagaaggagcagaagtaaattagggcaccgtagtaattgccacagtccgtctgccagtaattagcgcccggcaaccaatagcaaaacggtgcactccgctttaatagcaacatatgtgcatatatggaataaaactctagtgctactcgagaccgaaaattcctaagatagtaaaaattcgaaattttcatcgagtcgggacccgagaccgagcttcttaagcagttcaaaaaaataagtgcaaaaattttcatgggtggaaacaagtcattagcgggcggcacacttttttctaccacgtctgcactcctccccttatgttttctaacgcattcaaattaaattttaaaattaaaaatattttgggcaataaatttcctggcacctaaaaagtcagtgcccaaataaacataataattttacggatgtgtcatgcattatgtcgttccaatcttcgcccgtgacactgcgaaacagcacaaccaatgcttcgaaccctgatcggaagttcacgtgcctgaaaattaaattttaaattttgagatttaatttttttttaaatttttttatggcactttgacaccgcctgcccatatttgaccatgccgaacagaatcacaccagtgtaggcgtagaacagcacaagcaaaaccatggccattatgatgaagaaggagcggagcatggacctttattttagcatcacaatttctgtatttcttttttaatgcttcttacatcacaacagtgagcattagcattttcaaagtgctgttacggcctgaaataaatgaaattaaaaaataataatatattttcaggggaattcaaactgccaaatacaaatttatatttgaaattattatttttggccctaaataattatttttgggactgatcacgattgctatttttagttttaccgatttattttatcgattttaattgaaaaacaccaatctaaaaatttgggttttagtttgacctattaagaagctggcctggtcgctaattacttactaatcatttacatacaatacatgtaattag

SEQ ID NO: 7612 - DNA, 3500 bp, Heterodera glycines
caattttggggtttgaacttgctttatggaaaagaaatcctctcgggcgatgatccgttagaattacaagctcggttccactacaattggtcggaaattatgcacggcatgaactattgctgctagctcaccatgggtgggggggagacgactttccacgtcagttaaggttcgagaccaatacccgattgcaaacatttctccattttcggcttgcattaatgctccaccataagccacagctgatgcatccgtgaataattaaaacggtagtgcataatttggcgcccgaagactcggcgacttaagtaagtgattttttaacaaattcattgctttctcctcgttctctccccattcaaattcaaatgctcctcctcgggttaatttgtttaatgggtatgctatttgtgcaaagtttgggataaattttctaaaaaatgaaaccattccaaggaatctttttatttctttgacattagttgggggtgggaaattctcaatcacttcacgattagacagcgacggctgataaccggatgcagataaaatatggcccaaatatacacattccttttgaaggaaacggcatttttggccttttaatttcaaaccattttcacagagacatctaaacacattcctcaaactctcaatgtgttcgtccaattcctccgaataaattaatatgtcatctatataaaccattacgttcggtacccccttaagtatttggtccattgttctctgaaaaatgcttggagcatttcttagtccgaagggcaactttaacatttggtataacccccaaggcgtaatcaagccacatttatacgaactttctgcatccaatgggatttgccaaaatcctgaggctaagtctagagttgagtaccatcttttccctgctgctctaaaaatgactttgtccatacgcgggagagggtatgggtctgcgattgtcactttatttaatgggcgaaagtcagcacatggacgcagctggccattagcctttttaactagcacaatgttatgtacccaaggagttgtgctctcttttatcactccaacttcaagcatttttccaatatgagcctttaactccgattcatatttttcgggaattggataaggcctaactcgttcaggcatttccgtcgaagttaaaagagtaggagcaataattttacatgttcccaaatcataatcattttccgaaaaagctttacaattttctttgagacattctcttaatctgtctatctcatcttcattttttgttcccacttccttgagcatttcttccaaaatttgagtcttcgtctccttttcctcggctaccattactttttttgttttctccatcaatttcccactttgtaagtccaacaaaaaagacaacttttgaaaagtatttcgtcctaaaataatgtcatacgacccctttccaatatttctatcaacgaccgagattatgcttttgacttcgtggcccatcaattcaatcaaaatttctgtttgtcccattattggaacaattttcccgtcaataccaaccactcctgggatttccgaattatgcagcaattttatgcccaattttcttgctgtttggacactacataaagtgatgtgtgctcccgtatcgacgagaaacaccgcgtcatgatgattgacccttcccttctttttaaaattcggaacccaattctcagtttcaattagagctaaaactgtctcgttttgcatctgtccgacatcctgtcttgcggttgtacgtacagcacaccgttcttcttttagtctccttgtttggatcacatttttcttacttggcccctttggtgcgaccgttttattaagttccatttcttcaggagacggccatctttttgttagtggtaccctcgaaatctcattcactggcctatctttagctgttagaatagggttttccttaactccgctttccattttctcgaccttttctgtattttccctaattatttttctttgagttagagcatacactctcgaaactattcggctaacatttaaaagtcgccacagctgaaccatagcaaatgggcagaacaaatttactattactgtaatcgttacataacaacaacatagaaaaacccataactgattagcacttataattcctccacgcaaaaatgaaaataaaccattagcgacaattcctccagccaattcattttgatgttcggaaaaagtttcccacacattgggttgagacatgcgtacaatttcttgcattatctttgcactctttatagtctctttgaaattttcaggcgagtatagttccgtaaaatttgttaggactttatttttaaatataggaacgcttatttccgggaaatcaattcttccgtgtcttgttaattggcgcactgattccattggaatttgctcaatgtctccggttttttgattatactctaagagtttgtctccttcatttaagtacagaaaattataatttccacagtcaacctccctagaaaaggggtgaattatgcgtgtcactgggtcgataaaaccattctttattttcccatcaagtttgaaagtaaccgggatttcagaaaaacaaacacccttttgccaattaaaatgcaactgcgtgaaaatagctaaacagggcttcacctccaacttattttccgttactaatcgtcccaccaaaaagggatttcccagaaaatatctcgccaacagagtaggattagccactgataaagtaagaatttgatctgacagaatttgcatatttgtacatattttacggacagtctcttcaaaaatacgccgggtattttgggtaagccttaagcttaaagcggtgagttcagccgataactgcgaagagtagacgagtccaacctctggatcaaatcttttctttctgttcgttgttcctatcgtttgagctttttccaccatagattcataatccgacatcaaaacagcgaaagactgatcagacaccattaattggtcgataactagacattctttttgtttaaaaattgttttatttttaaatgtaagtgcgaaatcaccactctcggccaaccatatttcagaagaatattcgccctccatgtttgccatccaaatatatgagcattgatgaccaatgtcggggtcccaaagcaggctgctttttgtacatctacatgacccggcttggtaaaggcaatttgagcattctccaatgggagtgcttatcccctccattccatggcgtgtaaagaccaccgtgtcatatacataacaattcaaaatctcaaatgtttgccaaaaaagattatatggccaaaagccccatccaacttctaaggaattatttgtggccataatagttccatttatcaaatttagttctcccgccatggaatggtttgtttctcgcatttgcctgcaatttgaggtcggaatttccatttgttccgtttttgactcct

SEQ ID NO: 7613 - DNA, 1695 bp, Heterodera glycines
  unsure (1)..(1695): unsure at all n locations
caatccatcgtgaaaatgaaatatntggatttccatcataaattccgggcggggcaacagacataaagaatgggtcagccatcattatttcgcaattttcttctgtggtactgtcctgactcccatggccagtgtcctccttgtttttcgtttgttggctattacccaattcctcatgttcccgaccatgcccattttccagccaaatgtcctctatgctaggctcttttaattctaatagctctattctcgcccgtaatatatccactgactcttgaaaatcattttccacagtttcaatcttttcttggagtttcccgatggtggtcttgacattttttaattcactttctatgcgttcaacaattcgtttcagacctatcttggccgcttgtttgtaccccttgagagtgttggcattctcttctgcctgatcctccaatttcacaatcctttccgcgaagtcaaaattactcctttcttcaactgtaatttgctcattcaccattctctccaattctctgatttgttcacctttcctctccgactcaattctcatttcgttttccatctgacgaaattggctgcacacggcagcttcaaaggaacggagtctcggtaacaaattttggaagaattcgttttcttccagggtgaacagggaggaatcaaaatcagagccattatttcgttgttgatcaatcggtgattgacttctcgaaaccatgttttttttttctttggcactaagcccggctgaaactacacaagttgatcagctcactgaaatttgatcagttttctgttttttttggatctccggctggaagtacttaactttgaccagctcaaatgaatttcggcactggaagtactaaactttgaccagtccgatttcttctacgaatcaggggagcactgacggcttactcccgggtcgtggcaccaaaaagtgctatgtccctaagtgattcgtacccaaaacttattcaattcacaacaagttaaaaggaaatttatttaagcaaaagcaaggcaaattgtgagtaagtgattcaaattttaaagcaaagaaatggcaggcagggaacctgacccaaaatgagaatgagttaaaagacctgacaaataaatggatttgatcgcttttatatcgtttgtgaggggtgtggtcgagaacatcgagagagagggatgggatagcagtctgttgttaaacatcaaaagcgacaaaggaaaaggacagaatggaaaacataggaaagattaaatggaaacattaggctgggaaaagagagattaatgcttaaaaagaaatggcaaaacagacaggcatcgaagggatccaacaattattttggcagtttttagcaactataaatgtgagccctacttatcgtactatttaaatgaatttttaatgtttttgtaataattcaaacatttatttcttgattttttctttttattccataattttcggcgcataaaatagaagaattaatttaatattaattttaatgttttcctaaattccttaattgataagatctactaaaactttgaaaaccctattatcattactataattctggtcacgatctgacaattggacaaacacgcttgattcataaaatttagaaaactattgaccaaaattgtaaaacttattattttacgggcaaaccttaatta

SEQ ID NO: 7614 - DNA, 2401 bp, Heterodera glycines
ttcaatttcgacatcgatttttaaagacacaccattagcagatataatgacaaatgagtgaattttctctcccccttgggggagatgcgccgttcccggaagtaagtgcaatacgagacaacgcgtggtcaagcgaatgccaaaagacaaacacatcgaccaacttccaaaaagtgttatgctattttaggtaagtcattgttagagctcccacggaaggttaagatctgaaaataataatatcggaacaaaagttttgtccagcagaaatatatggggagagaaatgagtagggatttttcgtgaaaattttgctaaaaaattatttttttggaaaattttccggtttttgaggtcaaaaaggccaatttgtctgttgtgggccgatctattagaggttttttggaaaaacgccaaaatatgcacataaaatatgcacgaaatgccaaaatatgcacaaatatgcacataaatcgcgaaatatgcacaaatatgcaaaatatgcacatggaaagtcatcctagaagcttcaaatcaagcaaaaaacatgtttttcgtgcgtttcacgcttcccgcagtccaggaaaaaaaatatgcatggcatatttttggcatccctagaaatgagtgagaaaaaatggacagacaagaacagagaaattagaaaataaaatgtgcagagagaacagtagcaagcatccagagacagtgagtgcagcagaaagagtgtgttgtatcggcgacaaagaagccagatactgacagacaatacacacttaagagtgaaaagaaatttaggctttaattggcatacattagcgaagaaaaaaaacaaggaattcgatggaacgattttaacatttttctttataaaagaaaccaaatattttatttgcacaattttaaatccatggcaacatcggctaaccatcggccaatcttcgaatttattgtcgaattgggtaggtaaatttttactatttttgggcttttctgcaattttcaaactattatgttccatctttttaattccaaaattacctttccatttaaatattcgagaaatgtccgattttgccgggaccctcaaatttcggcattttgtccaatacgaaccccgttccgaatcgaatttcccccatttatttcccctcatttgggcaggcattcgtctccaggccgattcgctgaccgtcgcctttgcctcggtgtattgccatcgcgtgttgcgccaaaaggcttttccgggcgaccaaatttgtccctttgtgagcttttttttaggttatacgcaaattttatggctttagtgagttttaggcgtccaatcattactttcttttgcacatttttcttatttggtcaactctatgtttttggcatcaaatgaaagcaaaaaactctatagaatttttttgtggacctaaattcttgactaaaagcaacaaacaaaaaaggtattcttggatatgctcgaaaaagcaacttttcgtgttttaccgttgcaattttttcgtaatgtcagatttgcttttttctttttatttttaaattcccgggactttaagctttcatttggtaccaaaaagataggcatttgccaagtaagaaaaaacgtatggccaaagaaactaaagattggacgcctaaagtggcactagagccaatttttgaatcaattttggccgtttggctctttttttgttgaaaatgcttaaaattttccggttttgtcaaatcccccccttcagacaatggcttccgcctgtgttttggtggccggcaaagtgacgaacgacgcgcgcattaacacgcgcgacgtgatgaacatggcctacaggttttcttttttaaacccattttttcaactgtcttttccaaactcggccattttttgtgccgtttattggcctttatcctttcaccttcgacaatgcctttttgtccagcgtcgaattctttggcgaattgttgaaatttgggcaattgttaggctcgaaaacccaatttttttcatttttatatttttcatcgtttatttccctaattttttccatttcccccaaaaagtgttctccacccgcaaatggccccgttggaaattggcgatttgtcctacgcgttgcgcgaagggctcgtcgaaatggagttggtggtgctccgtttcctgcgctttcgtctcaacttagagcacccacatcaggtcaaagaaggggaagggaagggaaagggcaaacgaaaaatgggggataaaatgacgacaacgaaccttgaggattttgggggacggaagtggaccgataagcaaatcgcaacagaaaaagacgacgtaatgttaccatcgcaatttgtgggttgataaagaattcggggtcaacctcgggactttatgaaggcttag

SEQ ID NO: 7615 - DNA, 1016 bp, Heterodera glycines
caaaatttggcgtgaaaaaaaaattatagaaaaaaaaatatttttttatttgaaacggaatatgaattgctctcggggaattaaacacccaaaaaggaaatgccaaatactagacaaaaatttgggaatataaattgtaaaaatttgccaggaacgctttactaattaactaattaattaaatttgcattttttcaattcctcccccccctccccttaaggacctcattttgatgctccgtctgctccgcgattggtaccccaacagtctcggccgacgctttgacgacgcgtgccgcgtgtccgccatgtttctgcaggtgccatcgacgggcggacgaaaattccccccccccccttcgactgatcgaaaaacatttgaattttttccaaacagattttgtccctataatacccacttttggtttttggagttaattttataaaaattcctgggagatttcgaaccccggcggtcatacacacacaaagggtgcgagttattctactaaaaccctttcatacgttgaaaagggggaaggggcgacaaaaagttttgcgaagggcggtcggccgccgattacctttttttgcatttcaaaatcgttttttttgcggcgcgcttttccaaaaaaaaaaaacaaattttttaagaaaattgggatatttggggttgggctcacggggtggatgtgttggatggggaaaaagtcgggctgccaaaaacaaagtcacgacaaaaccttgattttgtatttaataattacatttgcaacacaggatttgtatgccgaaccacaaattgtgctggaccacaagccgagaacgttggccgttgcggtaggcgcatttcgtccatttatcacaataattccgtccataatttgctgactacacccatttttaaattcaatttcctcgcttttttaatttttggggttttttgagtttcatttttcggataaattagccgaacaatcgggaaaatttttgtttttggattttaaaatacgaaaa

SEQ ID NO: 7616 - DNA, 1507 bp, Heterodera glycines
  unsure (1)..(1507): unsure at all n locations
tgcttaatgttagccagccggtccctttttcttttcttccatggtnaanaaagnctnnannaaaaaggagggnnggctttttgaatgnatgaattgnngttttantnganagaggnangaagaggtnanaanaagaataanaanaatattattagtttgaanaggtnagntgantttgaaggaanttngnatattttgnagtngaatgnttngnanggtntttnnattngntggtngnngnaanagggagnaaaagatnnanangngananaagggatnggttnttngtggttnggaaatgtttnatgattaattgngnnaggtgnngttaatttttggaanattgnagaagtaaatattgatgggntaanaatnntttatttaaaatnagnaaaattaagaattgtatggaatgatttagtgatnaaattttaaangacgtaacagccgactcgattaacagcaaatcgttgtcttttattgaaaataatgtaagttcttttatttgtatttgacttgcttttttttctttgctttatccgtaccttgtagtttttttaagtatatttcccaccagtatcttttggccacttatttatccataaaacggacacaaagtgaaatgaatatatattcttaaaaatgtcttaatttttttccgcgattgccaacgataaaatatgcccaattttatttttcaagaacaatttgttgttgccgaccgaaatgccatttcgcgaccgaacggcggaattcagaacagtggcaaagtcatgtcaggttggtttgttggatttttttaacaataaatatgaaattacattaattggcagcttcgacagcagccaaatggatatatgggaaagagcgaacgagaaaaaatcgttaattcttcaattcagttcaaccaattggccaagttgttttgtagcattttctgtggtagtaatcggttttaaggcgcattggtcgggatttaagtatgacatgtgccaaaatggagaaattggcacaattggccaagaaaaaatcattgttcgatgacagagctggggaagttgaagaactttcacaaattatcaaacaggtttttgaaaattttatggaggtggcatttgaccaaacaattttcaggacatcacgggcctcaacaaacaaatcgccaatttgcagcaattggccactcaccgcacttccggcggctcttccgtttcgttgcggcaggagcaacaaagccaaaaccactccaagttggttgtgggtggggttgcagtcgaagctcgccaacattagcaaaaacttccaaaatgtgctggagattcgaacagaggtaaaaccgaggaacggattttaggaggaaattttcgtattgacagtcctttaattacgacaccaagtttgtaaatttttagaatttgaagttcaaaagagagagacgagaaaagttcagtcagtcgggggcaattccttcgaatttgcccccttccacaagaagtggaccaagcga

SEQ ID NO: 7617 - DNA, 3621 bp, Heterodera glycines
aacgccatggaaagcatgaaaagcagcatctctgagctgggcacgattttccgccagttggccactctcgtctcggaacaaggcgaaatgatcacgaggttggtttaattggttttcattttaaatttaaattatgtagaattgactcaaatgtggaggagagcagcctcaacgtggaggcagcacaccacgagttgctcaagtatttcaacaacatttcccgcaaccgttggctgattatcaaagtgttcggcgttctgatggcattctttgtgttctttgtgattttcctcacctgatcggctgataaactcagttctgcggagattccttcacattgtcatcataatcactcacagaattttattctcttaaacagcagtcaaatcattgaccaaatattcctaacttattacccattctttattgtgttaattgttggtcatcattaggtctttctgaaaatcgctttgtgacggttccattcgcccgttccttcttctgtttaaactcttccactcctctttagtccatgtgatagctttgcgactcttccgcttctgaataaattattttatgtatttgttcgtttcttagaaagattctcatatttctgtcttattgtctgtctgttccttcgttccatcagttcctttaagaagaaagaaagagaatggtccgaatttcggtgtcatttgtggtcctggcaagctttgtctctaccgtcttgaccattttgaatgctttcttcctcaagaagcagttctacccgtccgttgtgtatctttccaagagttccacttccatggccgtgagttcgtctctcccctattcatttccatttgcgtttgcttattttaggtcctttacttccaagcagccgtcctcagttacctggtcttttcgttgcttcgatgccttttcttcggccagctgagagtggccgaggtcgaacgtgcccaggaacgcgtttggcacacgctgatggagacgtgtttggcattcagtaagtgcgtgttctgtccgactcgaattcattgattttattcagccgtttttcgcgatgacttttcgccggtgttcgttgttcagtttgttgttctttttttcataaaagcatttcattggctcgctgaggaccgcgtcgattatatggtaattttcaattccttttacaccctttcacatttttatttatttttacataccttaaggagaggagtcccatgctcactttgcttttccatgccaggattctggggatcatttcccttctcagtgccattgactcttacttcatttctcacgctttcttcacaactttgatgcggggggccggcgctcaaattgtgtttggatttgaggtcctaatttggaatcatttatcaaaataggattatgattataataataattgcaaaagaggctttgcacgttaattacttccctcctcaattagtacgccgttcttctcacaatggttgcgcatatgaccatcaattacattttgcatttgcacgatttgcgttcgccgcacccctgggaaaacaaagctgtgtacatgttatatgccgagctgctgacaagttgtgtttgtttctcctttcctgaaatctgcaagttttctaggctttcttcgttgtgccctttacctcgcttttgctgctgttatgatgaaggttcgttgtgacacagagaattcaaactttaatttaaaaaaatctttcaacatgtacaatttttattaattttcttacgaaattttttatttggaatatttttaaactttttttattatagtgttggtttggaaaatttgctttattaaagtttgtaaaaaaatttatacatttctttctcaccgctcttccagatgcacactttccctctgttcgccatccgtcccttttatttgaccgttcgtgccttccgaaaggctgtcaacgacgtcattctgtcaaggagggccataaatgccatgaacaatttgttccctctggcaacagcgcaggattggcagaaagtgggagaagaaaagtatcagtcagttgtgccattgcctttttcactcttcagatgacaacacatgcattatttgtcgtgaggaaatgaccgtcgaaagtggtgccaagaagttgccatgcaatcacatcttccacccgaactgtctccgctcgtggttccagcggcaacagacttgtccgacctgtcgaaccgacgtcttgagttgtttgctcgttcagtttggaaatgtttgccctttcgttcagtccaacggcgtccgtctaccgctgccccggcacaaaatgcgccgccaccccaggcccagcgtctcttcgccgctcctcttccgccgtttgcccacccatttcagtttcaattccaatttggagcggcccaacaacagaacaacttcccgccacaacatccgccgccctttttggcgccgccttttgcctttgcgcctccgccacaatttggggcgccacaaccccaacaggtggccacttctcaactgtggcatgaataatcagaatggaatttaaggcgcagcagaatccccaacagcaacagcaggcggcggcatcgcttgcgaatggttccgtcggtgaacagcctcaaacacttgaccaggaaagggtgcagccgcaacagtcagcaacggatgggacgcagcagccaagccagcaacaagcgcagcacttcccgtggtctccgcagcagcctttctttatggttgtacattcggtgccattgtctctcattctttcccctcttttagcctttcgggggtttgcctccgccccctccgtttctgcctttcccacaacctccgctggtgcgttttctgtttccgttttcactgggccattgccattttcagtttgccggtctcagtgatgctgaaattgccgcaatggaagggacggaaagacgggcggtcgaggcgcgcattcagtccctgcggaacatttcgacccttttggacgctgcactgctgcagttccagcaatatttgagcgtctctcccgggatagcccctcaacaaacgcaaagggacgaaaactttgcgcaaaacctttcgacatcggccgacagcgcaacggatgcggaaacaaacggcagggaaagtcagcggaatgagacggagacgtaagcaaagaagcggaagagagatagagagagagactcacaccagagaagcaaagagatggacagacgccaaaattctacgctttatcttttatcagttccatttgacggctaattgtaagttatttgccaaaattgtctttggtttgtacattttcactgactgaaatttctggtgatatttagaggatgacttttgtgtgatgtcatttatttgctatttattgcatcgtaattctcttcccgactgtgcagttttgcattttcatttcatctcggaaaatcttttttaattcgtttcaatggatttccggtatttcctcccccttttttctttaagtgccttcgttaagtattaatgtaagttgactgctgggggtttcttccgcaggatttacagagaaaacgaagtttggggtgccgtgaaacagacgcttattggttggattgggtgtttttcgaatggat

SEQ ID NO: 7618 - DNA, 957 bp, Heterodera glycines
  unsure (1)..(957): unsure at all n locations
tcaagcgaatgttggcagtcgcttggcttttgccactttttctcagtgttcccncaatgtttcgtttttcgcgtgtttgagccgtccgaattgcccaacttcaggtcagaatcccccatgaaacattgaaattgaccgaacaattctctgaccgattctcatcagacagtgcacgcccatttggacaattctcggatacgaattggacgtggaactgagccaaatgcgaggcgattggcaggacgaggcaaaaaatggacgaagaaggcaactcattgaacaatttgaggaaggtaaagcgggcgaggggagggaaggagctgggaaatggtgaaaggcggtggggggattaccgtagtcaaaagggcggacgaagtgctggggcttactgtgccccccgccccattcagtgctgaagtgggaaagggcgtacaacttggcccaccttctgttcgtcttctggatcccctcccttatcattgccgtcagttacatgtccatactcgccacgctcaactctttttccgttgtccctcaaagcattcgactttcgggtgataatgccaaacctttggagttggcgtaatgccaatgataagataaaccgtcttttccacccaaaaggtgccagtttgcaaattcgcagaagtgccaaaaaaattgtgccggaaaatgggaaatgcggcgaagaaagtgggggaaaagcggccgaagacgaaggatcaaaagaaggaagcgaagggacgggaagaaagggaaacggcagcacgagacggagggtgggcgcattggcagcacaaacaattgccagggccaaacaggtggggaggggaggtgggagatgtcgatttaaaaatggcagtattttcagaacgccaaacgtcaagcagtgagttttacgggcggtcgttcacttaatggattaaatctcatttaaatctcganaaagttaaatga

SEQ ID NO: 7619 - DNA, 2418 bp, Heterodera glycines
cagaatttttaggtaaaaaaaatctaaatggattttctaccctagaaaaactttaaaaaattctttaaagttttttacgaattttttcagctgattttttttttaatttgttgaaaatttaagtgttttaaaaagtttttctaggctagaaaatccatttagattttttttatataaaaattctaagttttagttgaaattcttagaaatttttttgtacgagttgccctgtgtacgagttgcctattgtacgagttgccaattgtacgagttgccctgtgtacgagttgcctattgtacgagttgccaattgtacgagttgccaattgtacgagttgcctattgtacgagttgccaattgtacgagttgccctgtgtacgagttgcctatgtacgagttgccaattgtacgagttgccaattgtacgagttgccctgtgtacgagttgccctgtgtacgagttgccaattgtacgagttgccctgtgtacgagttgcttattgtacgagttgccaattgtacgagttgcctgtgtacgagttgccatgacaccatgaaattcgtatttttctgttttaatcaatcgcgcggaatcccgtccctaaaatattttttaaaattctgcaactctcagcgggatacacagattagaaatttctggtctttaataatgagatagtctctaattgagaaattctcggttattatgtgtttcggctcgaatctctagctaaattatcggttcgcaagccaagggataaattattaatcactcgagtctcggaaatactcatcaaaagcaacaatataaatcattaaatacaaacagcaggttggcccaagaagcatggccggcgacactgtcagtctggtgatgagccaacggaacggcatccaacaagtggtgccgttgacatcaatctcaaccggcgcgtcccgtgccggctccggctttgtgacaccgcggcacgacgcgcgatttcaggccaatgttggcgccacattgccacgcgattacagggtcaaaaaggtgtacctgtgagatgccaacacaatttttaacatccattttttgaaattaaccacattttattttgtttgccattctcacttttattcatatacaatacaaaatgccaaattggggttggtttaaaaaatttacaaaaattgaattttgttgttttcctattttttttcacttatttcctaatatatttttttgaaattttttgtcttaaaaattatggccttagcggtatggccttttattcaaatttccatattttcaaaatttttgaaggggtgaattaaaaaatggattttttgaggtcgccaaaacatttcaaatttcaaaatttatcttcggcttaacctcacgttttgatcgcgtttttccataattctttcccttttcattaaaccggtgtgccttcttttatttttataataatgtcacttttcattatgatcatttgatgaaaaaagttaattttattttgaaatatttaattttaaatatttaaattttgaaaaattaatcatcatatgatcatttttatccataatccataaaagcattggttgatctcatcaacaacagaagtatgtacaatattcgtttccattttcgaatgaatttttaattttaattactttttttaaattgtaaattttgaatttttatattcaaaatttcacccaagtttttcactttctatccatatccaaacctcattttatgttaaccataaatttttttttattaaattgtctgcctcctctgatttgttcaatttcatttaatttgtttaataaacttttttaaaaactaatttatgcaatgataattaaacatacaaatagcagctacttaattatataaaaatatttaaatttcctatttactaattaaattttcacttatataaaatgggttataaatataaattgattttagttattaaaaatatttcttaacaaattttcattcatcgcaattcaacattcacttctgttgctgctgctaatcatcgtttcctgttcacttaaattttttttaaatttaatattaatttatttatgataaaaaatttgtttaaaaatacatttaaaaaataaaataaaaaatatataagaaacccaatttattatatatattatttatgaaaggacttaactcaaattcaatttttcaattaatcaattcatttttaattatgcaattaatttatcaatccatatttaattatgcaattaatgatagcaaccgaatttaattgctcattaaaccttttgtatgaagtaatgatataatttatttaatgatctcaattagttatggaattaatcattatactattaattaattatacaattaaatcaaacattttttctcgatgttggcgcgggtggtg

SEQ ID NO: 7620 - DNA, 1886 bp, Heterodera glycines
cgagacggtgacgcactttttcgagacgtacttcccgccgtattgttccgctgcagatttcgactttttctgctggtgtcaacaacgggacgaagctgtacgtcatgctttttgttgatgatgttatccgtgatcttgccaagtctctgcaaatttgaaagatttttcttataaaatcattgaattctaaaaatagaaatgaatattaagaacaaaaaactgaataaattttttcataatttcttttttatctcattaatgaattattttttaatccgattgagagaataaataaaattttaaattgaaaaacattttttgagtttaaaaaaagtattttattaaaatataaaataaatttctttttagaaaaactttatttacctcaattaaataaaaaatatatttataattcaatgaaagttttgcaaattaacccagctaataaaattaattaattcttattacttaaatttttttttccatttaaaattattattcccatttatatgaatttttagcactctttgaaaatatattttttttatgaattattttcaaccaataaatcaaagttcccggccaaatccctcacgctggtggacaaaagttggacatgttcatcatcagaatcaccatcgtttgcatcagaatgttttaaatcattttttgtttttacatcattttgtttgcccaacgatttgctttttgccattgtgggcacaattttttcggcattttttggccccggaacagttgaatgggctggctgtgcactaattttgccgcctttctttggtgaatttggcgtactgttttttgacggcaaatcagggcttatagtctaaatacaaaaatcctatttaatgatctcagaaaagtcgaaaaaaatgcaattggttacagaaagtttaaaaaaaagaattttacaatgattttttggtgtatgattttacatttacataaatttgaatgggttgaaaaatgaattttccccaaaattttcccgaatttactaattggactatgggaagtttttgaaatggaaaaaatggataaaaattaaattaaaatatataaattaaaataaatttgtttaattacaattattggacgttgatttggaactgggctaggcgtcttcggattttgtggtggtgaaattttgtttttattatgttgcactaaaacggtgttgttttttggagaattttgcttctttggtgaaccatttaaatgattctaaaaatgtaattataaaataaaatatttaaaaaattcaaaagtttaataaattattttattatataaaaaaaataaaataaatttttgtatcacttatatatagaaagaataatgagagatatatttaatattaatattaaatcataattcttaaattaaatttaataaaaaataatatagtaaaaaattaattttttttttgttgttagctttaaaaatgtttttttatacataaaactataattaattaaaaataaaatcgttttatacaatttcttcccgttttggtgaagaattttgtttgaccatttttagcgattttgttttttgatttggtgatgattgttcagcagccggggtttcagctttgctccaactatatatatttcccaatttattcgcctgaattttaaattattattttaattgccattaaattaatttatcattttttttaccatccaaccagaccattccctggcagtgtccatccatgttgtcggatctcttttctgatcacttttttctgaatatttacataattgtcagtattcagttcggactcgctcaatagagccccggcacgtttgggctccgggcagtaacttttttctttgtcaaccaaatccaacccattgctt

SEQ ID NO: 7621 - DNA, 2115 bp, Heterodera glycines
  unsure (1)..(2115): unsure at all n locations
gcatggaataaatgtgccaggattaagatggtatggattttttgggtatttggataattntgggtgtcaccatatagttttatacttttttcattttagcgcggatcacttttttgatcacttagtttatggttgtttaggacaaggatgaaatgggcattatgaaatgtgtcacggttggatgaattgggtatatggatgatttggatgttaccgtatgcttttttgtacctttttcttcatattccgccccggtggttggcatgcttctcgatttgctatattcattttcattttcaattgcctgctttttgccgtcaccatttgttggcaaactttttgatttaccgtactttccatgcgaattactgtatttgtcatagggtttactgtaataattgtcaccattttgcaaatgtttttgcgcattgtcatcactattttcttcattctgctgctgttgttgtccttctaacaaaccttccccaccataccgctggaacataattatttttaatgaatacttttatcggggatcactattctttgtttattatattttaatgagttcaaaatccattcagaagttatatagtctcgatcagattctcatgcacgaaggctaattaatgcgctttaattattttatttttaaatttgataactgtaattagctaatctaattactattcgacagtttcattcagattttttttatcgcaaattagcaaaatgataaattaattttgaatttgataaatttatattagctaaatgctaaatcaggtgttggttataccccgtaaaatgcaacaagttttcgggctcggaggctgagttgggggccctccctatcctatttttatgaataattttacaaattgaaattttaattacccatttttcaattctacaaattaggcccatttaattgccctcgtttaatgaaccctttaccatcagttcacgccgttttatcaggttgtctaaatatccttctaaacatgacgagccaccttttggcaacaaaattggcattacgttttcaccattcaaaatttttttaaatatttgattcatctttttctccgtaatataggaatgggcacgagttttttcgctactaccaccttctgctttttttagaaattttcttgctttgttcacatgtcttatcactgaatccatgcgtttgatgaggttatggtcattcttattttctaactgaaaaattttcatttaaatagatttatttttatattaaaattatttttaattggttttaacatgctcttttatggtagtctaataattgtatattctataattattaattatattaatacaattaaattaatttaataatcaatttttgggttaatttataatgataattaaataatgacttttgcagtatcatcactcagtttaagaaaatttataagcgacccaaatattgctaaaatatatataaaagtacggtatttttactataaaatttgaaaattttaaaggaactttcttctacatttcattttaacagatttttaccaaaaagtgccaaaaatatgaattttttatttttaaatgagaaaatatactgtgcggcggtgccgagtgacgtcgggaaaattttagaattttgatttcttatagatattcatcaaatattaataaagaaataaaaagaaagaattgttttaaaaattggccaaatgatctaaatttctttgaaaatatacctttcctttccccaaattttcatttataaaatgttcacgcctttgcagtaaactgtccaaaatgtattgcatattatttgcatcgcctcttggcaacaaatcaattgcaatcggttggccatccaaaaattgtttgaatttggcatcattaatccaacaatcaatgtcatttgttttgtgtttaaatgccgaagccacacccaattcgacctcggcatgtgtgaaattgtcccgagcatttttaatcaaattaatcaaatcatccaactctttgagcaagtttctataataaaaattattaattaaaaattgctcgaaaaaagagaaattggctcaattataaataatttttatttattacctttcattattg

SEQ ID NO: 7622 - DNA, 2968 bp, Heterodera glycines
  unsure (1)..(2968): unsure at all n locations
tattttntgggttttcctctaccactcgaatttgcacatttttgcccttatctggcgaactgttcaatttctgtgcattatcatttttcactgtcccttcttttggtgggctattaatgccttgtttaattgaattgtccaatttaggcacattatcactgttaattgcccttgtcattagtggattattaatgccttgtttaggtgaattgtccaatttaggcacattgtcgacgttgggtactgcatttcttggaccattactgtcagtttctggccatgtgttccattttggcaatttgacattgttaattactgtcgtcttgggtgaactaatgataccattgtttggccaagtgtcccatttcggtaatttgtcagtttgctttattttaacctttgatgggctattgatgagctttttggatgggctgctgaccaattttggcgaaatgtaatggtcaatctttggcatttttgtcgggctattgatgccacggttaggcgaattgtcctttttatgcggtttgtccactttttttgttttttcatttggcaaattttttgatgtttttattggccgtaaattttttgcaatatgcattaaatcgctatcctgttctgatccattaatttttatgctgacatttggtttcatctttaccaatgacggtcttttctcaatctaaattgaaattacaaaaattgaatgaaaattcttagattttcctatattttttcgagactattctatgtatgatgggatttaaagaaaaaaatcatcaaaatcacacttatcagtttcaattattaagatatttagtgagctttttagcacctctttttcgggttgcaaaacattcaataccccctctaaggaaatttttgtttttaataaaaacttgtttaaataattttttgttcactaagttttcaaaaaatataaatataaaaaatgaacaaaattaagttttttaaattaaaaatttacaatttactggttttagaagcgcctggcatgtaatgacaaaaagtaaaattagagcaaaaaaatttccatatgttatagaaaaatgatgctttttagaagatttattggattaaaatttgctaaaattagtgtttaattacaactaattgaaataaattagggtctcttaaaaaatatcaacaaaaaataccattttattgcgacgtttttccaaactgttataaattgtgtgcaaacagtttggcccacccttggacaacaattcatgttcaatgtcagtgccatacaaaaatttgttgaacaattcgtcgtccacttcacaattttggagcaatgctttgccatgatcttctggcattaagccattctcttgatccctaattaactccgtttttcgccgcttaattgcctccattaaattgtttaatcgttccaatatttgaggcccctaaaaggtgaaatttttaaaataattcatttttaataatttttaaaatgtttttctaagtcatcagttaaaaaaaagaatattaaattatttttctaaatgcttatttaataattatgaaaaagggaggaacattttattttaataaaaaaaaagaaaaaaattttccattttaggtgtatattttttttttaaattggcgtctgttagagtacggggaggggatattaatttttgtatttttggaaaattaaatttccaaaatcactaaaacgatgccaaaaaccttctcatcaagcagcaattggtagcgttttctactgctttcaggtggactctgaaaatgaaacaaaatttaaataacttaattaattttaatttaaaacacaatttaaaaatttaatatatatatataatagggcgcggattcttagttacgaaaatagtaatgaaaaaatggcaaaaaaaatgatgaaaaagtatcaaaatattaaataattcaaggaaaaatgaataaaaaaaagttttatcactagttgaagaagactcgttaaagtaatgaaataaattttttttttattaaactgaaaattttatataatttaaagctatttttctggcactttttcaaaagattatcgaatttgtaatagcagcctagcaaaaattcaaattttgagtttttaaatccattcttaggtgcgtattttgtttgtattgcttttgtgttaagacaatttcttataaatctaaaaaacgagtgtttttgtgctatctctgcaaaaaaaattgctgcagaaaaaatagttaaaatattttaaaaatccgtgccctaataatgaaagttgataagttgaccagtttggtattatgttgatcaataataggttttgagctagtattctggaattcctgtaggatttaaatttacgaattaaatattttaaataatataatttaataaaagcattcatttgagaaaatatttaacttgaccttttcgaaattatgtcgatcaacaagaggttttgagctaatattttccaattcctataagatcaaaatagctttgaattttacaattattatttttaattaaaataatttaataaaagccttcatttaacaaaatttcacctcctcctgcccatcttcgctttgttcatcattttctgtttcatcttcattatgcggttgttcttctatctgaggaattttttttccataataaaataattaattgttgaacattaaaataaatgaaaaataattcataattaataataattaattgcttaacagtttaaataaatgaaataaataatttatataatttaaaataatattttgccactttatttattggcagggcatcttttgccaaggtctaaaattttcctcaattttttaatttataagaagaatgaaaaccagtttctgatcctcttcattgaacattgagaatctcactctctttttaacatctggacctccctaaaatcaaatttaaaataatttaatttctttaa

SEQ ID NO: 7623 - DNA, 6405 bp, Heterodera glycines
  unsure (1)..(6405): unsure at all n locations
tgagtnngtataggcattgtcgaagtgtntaataaatgccataaacaattgagactcagtgctggcttttatttatgttattttgtccaaaataaatattgatagcccatgaattataagtaatttattaaaataatagttttatatcataaaggtcgaaactagcagcataaataacgcttagagccttattttgcgtaatttagatcaaaatctcggccgacaaggtgtttaaaattgtgccattatattgcttttggcgaaatgtattttaaaattaaataatataattaagtctcagtaccaagccaattattttatttttagctaattgtccttatttttatttaatttatatctatatgaactaaaatttattttattcgcttttgatttaattattacttgctaaatgaggatgaaaaactatttaaaccatcatttcggctttttctcggccgacatggtgtttgaattagcgcgttattgatattattaatttatggcaaaatgtatttaaaaatgatttcaaaaaaatgttttgattagtaatatgaaaagtgtgaaattattgtttattatgctaattaagatttaaagaggttatttcttttatatttctaatgaatattcgtacaaatttcactaatttaatttgtctaattttaaagctttttagataatatatttttttaaattgctttaaatctggagatgagccgacgacctcaacatttcgtccgtcgaaattgcgggcaaattgctgaaatttaccaaaacaggtttaatttcattttcatcattcatttttctggggaaaaagaaaaaaaattaattcagcacttggtgagtgattgtggtcagcttgaccgttgtttttttttaatttctcatggggaagaagaaaaaaaaatgtcaccaaaatttctttgaaaaaaaaaaattattttatttttttacgaattcagtctaaaagtcattttctagcatttattaaatgaccaaaaagcatgtcttataattagggattggatatataagaaaatttttgccaaatttttcagtttcagacactcaaaattagctcctttttatggtggcaattgctctcagtttgatgctgcgcacttacgccgacgtttggatgtgcaaaatgatttttgattcttttttaaaaatttctttccctttttttcaggattcaaacgtccacaaaaattgaggcgtaagtttgggttttccctttttttgtttaaattttttttacaattaaatttgagtgcaatcatttcgcggcataagccccgtttttggaggtcgcttaccgaatatttgttgtgtatgccactcgtttcggtgatcaactcatttttgaaggtcgaataattttttgaaatttttttcgaaaaatttgtcccgttccctaaaattttcagtccaaattctcgaaaattctcatttaaattaccataattcccgacccttttagctgagtctttgcgagttgaaattgtgcttccgcgaacggctgactcaccacttttacgcgcagtatttggacgggttcaccttctacaaaatgaccaatttggacaatcgcattgccaatgcggaccaattgctgacacaggacgtggaccgcttctgcgagggcatcgtcgagctgtactccaacctttccaaggtgacttttcaattcacataaattcaaaaaaaacatattcccactcggtgcacttcgaaaggtcgcggaaggctatattttttgggtacgccccaaaaccttgccgcagaaatttaaaaaaaaacaaaaactttttattttttggattcacatgaatttttattttattttaatgggttgttatattgctatagtttttttaatctgattgttcatgccctcaggcaaggcactgtgctgtttgacatttgttgaagcagcgatctgaagttgcgcattgctattggctgacgtcgcagttgcagcagcgcactgttggcggcggcggcggcaccaatttgtttttcataaaaatcgtaattggatttttcttcgcgcgcaaaatcggagtcaaccggatttaggcgattggcaatagtgaaattattagaaataaacattttaaattcatataatttttatataactccgcaactttttatttttttttattaattgaatgaaacaattcaagtattagtagtaagagatttgtaatttttggtgagtcagctgtctcacttacaaaaagaaacatttttttttagatttaatgtaaataattttaatattatggctcaaatgtttatttaatttagtgcttgagcgtattcggaagtgtgcacgcattttggaccacgaccaatgatgtgccaaattgatgcgaaagacaaagatggtcgaaaatgatcaaaaaaaaattttttttttaatttttacatttttgtattattattttttctactattttattgttaaatattttcaggccctcaagcgtggaattaaataaattgaaattttatattgaacttgcaattgatgtcttctttttaggcaagacattaaaaataaaaatatgttggaaatgttagacaatttgtgaaatttctaaaacgtagagagtcggcaacttacatatagtgtttctgataagctcagaagtataaaaataattattgacttgtagaaaattgtgattacgtcccgtcctaacccaaaatgattgaagtgttcgatttttggtgtcgattaaacttttatgctgaactgttggcctacctccgcgacaagaacaactggaaaaaggtttcggctgtgggtggtttagccataaagctgcgccatgaacaatggcggccaaatgcacccggagcaagacaatggcgcactctcttacctgatgtatggtaatggagttgaccgaaaggtcacaaccatctttcggaagggcaaggaggtgctgccgttcaccgacgagactgatgccggccttgagcggttttttttgtttttttttgtaaaatggttcaaaaataaggttttttaacgaaattgtgaatggcccattgccgcaagagtggcgatatggcacacgctggtttgtgccagacgctaagaccaccgaaagctatcggctgattagtgaactgttcaattcctgtaatggggcatatgggaaaatggtttgagctgaagattttggtattttgagtggtaaaaaaattagggactcgacaaggatgccacgctcattcgtgggatctgcgcaccgcccgagaccagcctgttcgccctccaccgtgaggacgagcatgtccaccatttgaattacaactaaggaccgggtttaaaggttttttggttctttagttaaataaaaaaaaattttgaaaatccatgaaaaattcagttgtggctcttcattggcggggaattcgaacagcaggtttcccaattgggccaggtgctgttcaccgatcgttggcccaattgttcaaatccgcttggacacaatagtttctttttctcccctgcgcaactgcgtcaggcgggaattacctttgaattccacatccagcggcccggtgatgttgtgctcaccgttggcctgcattgcgggatcaatatcggagcttcggtttgccttgtgaaggagttgtgtagcccgagggcagcaaaacaatttaaaagtaaaaaatgggctccgacaatgacttttcaacaattttaatgatttagaagtgggggaacacactcgttgtgactgcaaagagcgggaagcctataaattcaccgaaaagcaaaccaaggagtatcttggtggaattaagtgagatgaattgtctcattcacaactaagtcaaattttaaagagccatggaaagcgaggccagggtcaaggattatcgcctgaaatatgagcaaagcggaaagcgcgtgcgggcggacaacgaagtgttgccagcccagcgccgtgctcagagggagaaacagaaggcggaggggcgagtgcccatcccgaaaaagaagggcacctcttcggtcatcaatttagacgagatcgatctcgaataatttcattgatttggttaaataaattttgatgttaatggttactgtgctactaattcacaagatctttccaagttctcgtcctcttcctaaggtcatactttcttggttccgtatccgttttttcattgacatttttctcctcatcggcttcaatttctggtcttgtttccggctctcgggcgtggatttcctctaaattttcgccttcccgggattcggggtccatttcatttcggattcacggacctttccgaactgacttcttccacattttgtgtcttttcaaggcactttttctcttcaactggttgtgttggcatagtgcagggagggcccaaaatttcgaaacactttttaatttggtttaagtgaagtctttttgggttcgaatttggcgaagtgcaactaatcacagtaacataaatgccatcaattttgatgacccgaaaaattcctcgccacggtaaatggaattttttggatgtgcctacccgtccgtcgtagtttctgatcagcactcgatcaccaattgtgatttgttgtggccttgcctttctgtcatattgttccttcatttttcgctgagcttttgcatattcatcagctgcggcgtgccacgcgtgtcttatggcaacgccaacttctgtttaaattcatttcggtccgaaattgctatcggatcacgaacctttgggtcaattatttggtctacacaaaaaattgggtcacgcccaaacataagaaaaaatggagtctcacccgttgaagcatgcactgacgtgttgtaacaaaaattagcagcatccaaaaattcatcgaagtcgggctgagtcttcgaaatatttggccaagatgttgtgaaatgtccgaaaagtgcgttcagttgacgcattgccttgactccaatgaggacaggcattgtcgcgaaaccgcgacgagagttggggtgaaggatcgggccaattgtcctttacccggggctcgggcgggcactacaatgcccgtaaaatcgatgaggaggaggagaaccgatgggccaccccaggcgcatggtttactgcacccccacgagtctcgggcccgaagaagaagaagccgtggtaccattgatgatcgggaacattcccgttggtcagtcggtcggagcagaagatcggagagatgacgaaacccccgccaatctggcttttcccttccttttcgtccccttcttttttctccctattatttaaatcatcattttccatttcatttctcattatctaatttgtctaccatttcacatctgcatttttctccatcttttcttcgccccatttgcattttttccatccattcacattttcaaattccttttgttcggcccgattgggcatccttttctcaaaatgtttaccattatctttctgcccgccatcccctcttttcatccattttctgtactctgatccccccaacatattcagcgatgcctttttccctttgtctctcaaaaatgcccacttttctccttattcacgtgtttttgcatattttgctcgggggctatttaatcacagggcccccctgcttccttcttctccttctctttttctgcgtccatttttttgttgatccccaattttgccttctgttgacctatttactcttatcgccattttctttcccctttggcaaataaatttggttgtttggtttgctgttcctttttgcctaagggacgagcccctctctttggggaaatcgccaattttcgttgtttgggggcattcctcgccccagggtccgcgtcgtcaagagcagccaaattcgtacggggtcggatcaactcctctgatccgaagcccatcccctcccttcgcctccccattttggtgattggaatcgggaccgatcccggcgcacgagaaggaggttcactcactccaaaactgagtggtggtgccgttagacccatccccacccttgtgctgcaaatcgggatccgctcccgtgaccccgcatttgccacaggcatactttttgtcaatgtaaagcatggagcaaaattctctgaaaaattcggaagtgaaggcagaggcattatcggtatcaattcaacacaaccgccgtattttaagtaacaattggtgagaaaagcgtgggcaattgtttgtgcttttgtttcggggactgggacagaaattacgtatttggtgaaccaacaaacggtatttaaaatgtgtttgttccctttttgagtgactggaaaggggccggccaagtccatgccaactttggcaaaaagagtgatagctggcaccatgagcatctcttcccggtac

SEQ ID NO: 7624 - DNA, 6298 bp, Heterodera glycines
cgatgcgcaattaaaagaacgactcgggctgccgtgtgcaaatgtcaaagaacttggaagtgtaccatgggacatcggagcgcatttgtttggtcaaggggaaacttgctgctacaatgattgtgtgagttggggagggagggtaattgttgttttatgattaccgaaaattaaattattttgtttagaatgggcgcaattttggaaaaaatccaggaaaaaattgacgccaaccacgcttctgaccatttcgacctgaagggattggaccggaccaaagaggttggatgacgagggcatttccaatgcgacttttaatttgttgcagatgaaatttgttgtgccaaacacttccgccggaatggtcataggaaagaacggcacgagcatcaaagagattcgggacacaacaacgggttggttcagcttgacatttgaccagcgcaggaattcaaatgttgtaattttgggttttcagcaaacatccaaatctaccccaaggcgggctctgaggaggccaaaatttcggccgagagagtgattacggttggccacgaatcgaacgaagttttactgagcgcagtgcaacgcgttctggaaaaagtggtggctgatccgatgcatgcgcagccagtcccagcggagagtcaggcgagcaacaaagggaccaaaacaatttcggaatttagttttattagggatattattaataaccaaattcattttttaaaaagataattcaataagaaagcatttaaatgcaggacataaaaagggcgtttcattatattaaatgttttctcctcactttgtcagttggcttcgggctttgaattcggcggatcgcggctcagtgccgggagcaatcagtttgggggaatttcaaacatgggcaacaattcgggtgagcagaaaccaaatgtgacattcgtgtgtcttctaaaacgcctttattttcagaagcaatgcatgggaaatcatttggagggccttccttcaaattcaatcccctccaggggacgggaaacaacgaggcgagtcattgttttgaatgacttctccattcagtgtatatttttctaaaccattcccgttcagctgttggcttttctcgacaatttgcagtccactttgcgctcttccggattcaacgaccaatcggtgtcagaggtgatgcaggcgatgcaagtgctggccaaatacaacataatggtcaattccatcaaattcctcgctgtgattcccctcatttaacgtgtgactttagggtcttggcctgggcctcggtgttgcggcgatggcccaaatgcgtaacactgagagtgcgatggcccagcagaatgtgctgcttggtgctgccgcatcgaatacgccgttgcaacagcaacagcagcgctacgatatcatgtcacagtcgaacatcaccgggtcactgttggactcgtcgcagaacattgaccaggtacaggagaaatttggcatttgatttttgcctttgcattcagtcaatcgttggaggatcgggcggtgttctgatcgatgtgatgagccaaaagaagtcgggcacaaatggaacgaatactttcgccaactccgtgatcaaagaacgcgttgtggaggatggacacactgaacttgaggtggacaggcgtttttcctatttctttggaatttgagcacttttgcataaaatgtgttgtttttaaattatttttattttttgcttgaatttttgacaataaatataagacagtttgttgcttctttgaattcaacaaaaacgtgtttttgggccacaattaaatcaaattatagaagttgattattacaacccaccccacccatctctttgatttttaatttagattgagtttcttgtattaattttcctaattttatttatttttattcctgctggcgttttcatattttttgtgttatgaatttatttattatttttcaggttcccgataacattgtcggcgccgttttggggcccagggcgaagacactgatcgaaattcagcagctgagcggctgcaaaattgaggtgcacaagcgtggcgcgaacaccgccagcccgggcggacgcgttgtgaggtcggttttggccaaatgtttgttccccgccggtgtttccctccgtgttgatcattttgacttggccattcgtctgatcaacgccgctttctttcatttatttgtcatgcactttccgatcatcacgctcctctctctcttcagtttaactggagacaacaatagcattctgaatggacgcatcatgatcgagaaagttattaaccaggaacagcaacgtcgttctatgatgggcaccgctcgctgagtgtgcctcccgtgtttctgtccattttacaaccgatcaccgtcaatcttttcaatccatcttttgtcgtttctttctttctgatctgtctaaaggatggggtgtgacgtggcgcattttcaccaaattggacatttttagaatgcgattgtggtcattttaataacactgatcagtttctctttttctttttgtccattctctttttttctttcccctgggacatttctgcgtttctgtcacaccctaattctttcgctctctctctctctattttcattctctgcctcttcgtttctgtctgtccgtctgtttgtgtgtggtgactcttcctctttaatattacaacttttgcaaatttttaatttgtcaaaaaggcagaaattcgaaataattcataccaaaaaactattattcgccctcaaaaaacaacttatgcaagccagctaaaagaaacgattattatccttttcccgtcattttctacgatcaaattgcacttttcactattatttttcatcatttgttatttctttaacggaagtccgctgtcgttcttttttattattgaataaccagacaatgcattcgttttgctcttgtttattttctccgattatcacatcattacaatatttttcatcgtatttttttgttaaattttcgtatttcgtaagattttcatcgatcatttcattattcatttcattgctgatcgcttatttaagaatggttaaaaaatgaacaacgctattcgtaatatcaactgtaatttatatcattaaaaatgctcactttacatttttatgcttttcaaaaaggggtggattctgctgttgcctcccctaattttcatatcagtcatcaaaattaattaggttttttgggttttagtcattgcttttaaattctcgaacaccgtttgatcttctatttacaaatccatggtatgttttcgtcggcttatttcgctttcgaattgctctcttcgttttcaaatcaatcgtcggctgtttaatgcgtcaaatcgtttcaattttcagtcattcattttctttctgctgagccatcactttctaatgaccgtgaaaagccgttgaagatgcttaccgatcatacatttgtttatctttcaggacaggttaagctgagaccgtcagcctcttaacgaagtgatcgatgtggagaagatctcgagactgtgatctatttattacgaatgaataccaattaaagagaaacgcgaaattaattgcattcgaaaaaattagcaaatgttatggggtgtgagtgtgagtgggttaaaatgggcactgatgcagaattatggtctcaacttttattttccaccgagttttcgagtgtgactacgaatccgacaacaggatttctccacacttcctaaacccggaacagaatttgatttttttattgcctaaacgcagacaatttgtatatttaccttcttcagactcattgttagtgcttccgaatgataccaataatatttattcgaacatgaaaaattgtggtccaagagtaattttatgtgcttttttatttcatatgtatttttgtgtagaattaattaaaaacgcataaagcattttttaaaatggccgatgttcagtaaagtcaaatttcaaattttttccttcggcgccgggctcccaatacgtatttttttttaaattggctcaaagtcgaaaaaatgggcatttttggtgaaaatcttttaacaaattgcactttaattctctaattttcaacaaaaaaatttcccggtggcgcctatcggcaccaccggacccctatttccaaaacgttttttggaaaaagtgcgctgcaaagtgccgataggcgccgccgggagaaattttgaaaatttgagtgtgatttgttaacagaatcttataaaaaaaatgccaattttgcgatttctttttaagaaaaatagtagtttttggtcaggtggtttggtcaatttttattggtgtttttgtttaaaaatcctatcagaaataaattagaaaagaaaaattccaccagtatcgaaagtcactggggctgggtttgaagcgcccataatgttcgaaattcggttaaaacacttccgaatttattttacatttttaaacaatgataaaactaagtgagaataatatttcacattaagcgagtcaatagatagatagcctatcatttaatgatcggaaaaggccggccaatcactgaagcactgttttcctttccctcctcgtccgtgcaccgcttaacgaccacaacttcggaggttgccgatttaacaccatccattgacgaagacacagagcgaattgccacccttgggaaaatcaagaactgtgtcaaaaaaacggcttttacttaatgtcttcggccgggttcaagtccgtaatgcgcagtcgccgagctttggctttgaccgagtcgcattgctttccgtttaggaacagttcataagctgaaagtacaagcagagggacgcttttgtaaatttcaataaaccgctaataaactgaaaaactcacagtccacggaattcatcagcggaatggcattctcccacataatgtccaacgcatcattacccttctcgccgttttcgtgtcttttgcaggtgatatttattggggttgggatgagcagtgaacgcagttgtcggtcctgagcctgacgatcagacatttccatctccaattgctgaaaagtgtggtgtttaggggaataaatggtaagcaaatgcatcgagaaaattgccttaatttttgcggccaattcttggaaagtcagcacatgcgcttcgttgatgcctgtcagcaatttgttctgctcgaccaattcgtttactttgctttgcaatgcgcgaggcgttggctgtggcgcgagcgccggagagaggcgtttggagtgaaggccaatgcttggcttcctccgaatgttgagcttacgggccaaattgctgaatcgtccctgaaatttaaattcaatatttgatttacttgatttttttctttcgtattaaatagttctatgataagattgtcgtcacagccgaatcctttgcaaaggtcgtctattataaacatgaggctgtctcctcataatttgtcttggatgagttgaagcacggggtgacttcttttgggaaggattccactgctccgtccatctgtttgtgattcccccccccccctctccccacctttttccttccgcttcctttgcttgagcctgcgctctcctcgtccttttgctccccaacgatgctcttccgtctcattgcgccgactttccgttcgctgttttgcataattttgtgcctgtgccccgccgttgactttgacgatgacagcaccggtcgcagcgattgcttcttctgttgttgctgaatggcttcgatgtcacttttttgaagggtactgaattggcggtgacgcgctgaacgcgcagtgagcgacgaaacattgacaggaatccgtgaagaaacgggcgaagagacagaagcggtggaagagggaggcaaaaggcgggaggaagaaggcggaggaaagaggggaagagcatccggcgagggggaaaagggaggggcagcgcaaacggacgaatgttgctgattgtgaggaccaatcgaatcactttcagttctaaggaaatcgaattgaatgttcatggagatatatgatgttcaacttcaaaagcagccaaataaattattgagacgactgtttcttacttggagaaattcaatcggacggtgtcgaaactgctgccggacaaaataacggtgcgggtgggcgaaacaggcggtaggacaagcgttgagactgtccgattcgtgtcacaactacaaaatggtaaaccccttatttgtccattcattccgtcctcacccgtccatcgccgaatgactccgttcttttggcttttcct

SEQ ID NO: 7625 - DNA, 1464 bp, Heterodera glycines
cgaaaagagcgcgaccgaccgttcgggtgtgaaaaccattcgccttaaatcggaagaaggaattacacaaacaaatgatgatggcaatgaacaaatgagcaaacctttgagtatttcctgttcattcaaaaaatacccatccaattgtttaaggttgagaacacacgaaaagatgaagggacggtaggaaaactaaaaacttagaaacactgtttcgttgaatattttaaaattattaaatttcgaataattttgaatgaagtgtacccccccgccccatttttttggaattggcgtactgtctgtagaccaacattattcactcgagtgcacgggttgcccatgacgatcaaagtatccttaaaattaaaaaacacccacgtttcgtactacacaaaaaccgcaccaaaaacaatccacaattgttcaaatggtgaaattcgcataggtcggacaacaaattgccaccaatgtccaatatacggagggaatttcttgggagaaaattgcggacggagtccaacgaacggatggcattgccgtgcaaatccaaatcaacgagggcagtgagccgggaaagattgggcaccgatttgaggtgattggaggctaaattgaggtgacgaagccgagagagttggtcaaggacggggaagtgctgaaacgaattgaaattggtaaaacaaaaatcaaatgtaaaaaatattcacctcaattcgattgtgcgacaggtccaatgtttggaggaagcaaaaactgttgagggagcccaacgaactgatccgattatcagtgagacgaagatggaccaaatgggaggccaacggagagagacaacgcatttgggagagttcgttgtgggagacattaatctgtggaagaaacacacaattcatcaaggttttgaatttgtcaatttaatttccaatttggtattccgttcggaaagtctggcgaattgtcaaaaaaaaacctcggtacagtgctgcagcggaaggttggcacagtccaacgaccggagaaaattctgcgagacattcagctggcgaatgggcggccgttcgtctccgtccgccgccgtctgtcctttctgtcgtttggcccccgcgtcggtcagtacggccaaatgctttcccgacaaatcgactattccgtttttcacttcgctcaagagatcaatttccgttgcagttgttgaggtggcatcagcagcagagctgaaaggtgggaaaattcactagaaaaatattagaaaaaaatttttggaggtttttgtcaattatttttcgggtcactgatttttttttaaaactttgcaggctaaaagtgggaaaactgatggacctaaggccagcaggggtagaagaaagtgaaatggagggcgatttgacggaacagagagtgggcgagtgcggcattcgtgaattggaacgtgggaatggcgaaagcgatgaatcgttcaca

SEQ ID NO: 7626 - DNA, 3302 bp, Heterodera glycines
aattccaatgcccgcagcaattgaagcggcagaagaagccattgctgctgctgaagagcgaaaaatttcgacaatgagtggtcgaatgaaaacaattcaggtgacaaattggtgagaattacaataaaaataaaattgatcagcccattagacaatgatgatgatcgccagagatgccgcctactgtagcaagagggcggggccaggtacggtagtgccgaaatgggcgacactgcacaaaggagccgtaatgggaaatgataggagcggaagggacgaagagggcacgggagcaggcgatgccattggagggcaacagttcgagtgcaattcaaaaagtcgaatgcaattcggcacaacggctttgaaaagtgcgccgatttgccaacacttggccaagtgagaaaagttaatgggcaattcaaaaatggtaatgacaaaagtggaatgattcaccaaaactgagttagcatcaaaaattagtgccaaaaaagaaaaggttttaaggaattggttctggaatcccgacattttcactcaatattcgtgacaaaattttcccaaaaggttttaccaacagttcggcattcggcactttgttttggtgggagttttggcattttatgccgtgtttggcggtcttttgtttcaagtgataaatttttaaacaaattaattccctctttaaatgattccctaattaaggcgattgagaaggaaaatgaatacatcagcctaaataaaaacaaagaagctttggacgcaatgatcgaacaattggctaaggtcaatataagatttaaattaatttataatttttgattttttcgaaataaaattaattacagacggttaaactataaattaggactaattaactctctccccaacaaattagaatctcactgtgctgctaaatgttcagccatcggccgacaaaatgatcgcgatgcaacagctgatcacgtcagttactgtatcagtcacagtattccctgttacagcaatcaaaaattaaaatactgtaaatttcatttcagaaaagactatcaaatattgcttaaggtaaattaacgaagtttttatttatttatttatttattttgattttattttcaaagattgaaggcaaatacgtcggctcagtgttccacaaatatgagcacatcgtattccatctgaattggtgttttggaagctccatattctacggtaatgaaaaatccatacaattgtttacagtattattggttttcttcggtcatttaaattttcaaattcaaactttgtagcaatgacactcttcacgacaattggtaattagttttcaattaattgctaattatttatacaattaataatatgtaaaggttacggtaccatcgcttgccaaacgcctttgggcagaattgtgagttgaatcaaaaactttttcaaaaagatatttcccattaaattaagttatccatcttttatgcactgttcggtaattattaattaattagcatttattggccaacccaattaaatttatttgtttaattgccaatcccttttatgtattcctcttatgcttgtcgttctcagcgatattggccaattgatgttgtgctttttgacctgttgttacaatcgtctctgtgatataattaggtgaagcggaaaagtcggacaatttaaaattaattaattattaaattttgtcagtttttggctccgttcattggcttttcgcattttggaaattgacgaggaagcggcacaagtggccaaggagaagaaggcggagcagcaactgcataaactgcagctgaacatcaacactaaaaataccggagaagaagcagcgcaacaacaaaaacaacggcacaacgcgtggggtgccgccagagacacggcgcaaacgcaaaaaacagaagcagcagcaggtgaccaagcagggcacaatcacaataagctaattatgacgcactttagcagcatatttaaattttgtaacgaatttttcacaaaataaaatgaattttatttgtaggttttggggggcaacaaaaggcacggatgcacactaattatcatatgtttatctcttattaactcaaaagcttaattataccccaaaaattattctgctggtttctcgatgccaatttttgcctaaattggcagatttttactacgcgaccgactcggaaaatatgctgatcagtagcaacgatcaagaggaggacaacggcatcgatgccgaccgttcttcgtcgtcctctgccaccgctttcgatggcactttcgctgccggccaatccgccgccgatggtttgccattgttcgtttccgtgccgcttgtgctcctctacctgtgcttcatcgcgtttgtggtcagctgcttcgattggcccgaccaacggacgggcgacgacggaccgccactgtccttcggcgaagcgttttattttgcgtacggggcgacataatggcaaacaatgagatcgaaaaaagggacaagcatttttctgaacagcttaaatcctccgaaatccatggacttaatttagttttgtggtttttggaaaggtcgtagagatttattaaaagtgagtttttttgggggttttaaatccaaaaattggcagctaagtcaaaatctgttaagaattttcagctaattttaaaaaaattaacaaatagcactgaacagattaaaagtcttgtgcttatccctccaccgattagtgaatttgttgtttaaatgaaatgacttattaatcttttgtcattatttaaagatttaattgcgaccaaagctctaattaaattaaaataattagaatgattttttaaataaaatttcggttttcttcatattcataatagtaataatatttttgttttattttgaaataaaaggttcatctcattgtccaccattggccttggtgatgtgatgccaaacagcatcgaattctcgccccttcttgccttacttttccttggcggtttggcactgctaagtgtcgtcaatttaacagtaattaatactaattaaaaaatcaaaaaaatatatttaattttttcccagatttatcaacatattcaaagccttttcctctttctgtttgatcatttggtgagaatttaaaataaatatattttaattttaattgaaaataaatcaggaagcctttctcgacgacgtttattctgttcaaaatgcgcaaaatgatgcccatttcgtctttacttcactaatgccaaacattcaggcaaaaaatcacccaatattttaaaatgccataaattaa

SEQ ID NO: 7627 - DNA, 2017 bp, Heterodera glycines
gcaacaacaacagcaccgacgcctgctgaactgctccatgttcggtgcatgttcttcgtcagcagaataccgtcactgctccattcggacaattattacccacggaaaggcaccaggtagtacagtatactcgagttgttgtcgccgaacaaaaacactgtactgtaccatttcatctggattttgcggactttgtccctgcgggattccatcccgaaaaattttgagttcaaataccgtagcggaatccgaaaatttgggatttccgggctaatatgacatcctaaccgatactacttgagaacatcgaaaaggcttttttggcacgaaatgccgtttttaagttccgccctttttcagagttcgtgcattttccatcgcaaaaagtgaaggccaaccgtaccagcaataccataccccaagcagtgctcatcaccggtctacctaccacactgtgcatggcactgactttcgtcccacccttggcattctgtccacggcaccgtcgtcgcctgcccgttcccgagggccttccatccgatcgcgcaggacaagcgcacacaaaataccaggtgatttatgaaataagaaatggcaaaatgttgggtccatcggttgcgcatcgaacccacgccttccgcgagcagctttaccactgagccaccgagacacaatatcatcagcctaaattttttaaatgtactaacaataagtactatttttcatctcaaaaggatcacccgcttcgcagcgaccgtgtcgaaaacgagcaatgacaattggatgcgattttgattatgccaaaaatgcgcacgacgcaggaggcggtgacaataatgccaatgttgacactcgccaaaaattgagccggcataagtcaacttcaaacgtttggtggaggacagcaaaaagcctagaggccatttcgaacaattttggaatgaaaatgtcacgaaatttggctgaaaatgaagcaaaaaatgatgacattgaaatgcaacgagacgaaaacgaaattggcacaatggcaaaaagggaatacgaagcgaaggcaccgaccgaacggagaatatatttcaaaaaaggtggtcaaattaggcaagaaaaaagaaaatcaaagtttgtgaaaattgtagtaaaaattgtcaaaaaagagcaccagcagctgatcagagtcccaaatcatcctctccaacaccaacaatcagatcatttaaagtatccaaggaaccatgttttcagacatttttggccgtaactttgttcaaacttgacaaattttttaaaatttacgtgagctcatagaggactctagataatgaatcaaccccgattaatccagcaattccaaaattcgggtttgtggactgggatcccgactgcgcggggtaattaattgagtcccgggggcatttattaggaagaaacaaagctattttgtctaaaacccttgtgctatttttcaagtttgaagatgtacattttgtacaaattgcccttaaaaaattaaattaaaaaataataattattattattttaacagaaattgccgaaagtgcggcttcgagcagtacagcagcagcaaccactaattacaagcagatccgccgcacgcacagtgaacgcgtgtcgcaacgacggcgccacgcacacggcggcgcccagctgtacgtgatcaatgagggggagtcgcaccagcagacagtcgccgggggcgagcgactgttgcgcctgcggcgactgcgtcggcaacgctcgcgccaaaacgtgtcgccgttagtgcagcagcagcagcagcaacatggagacagcagtggcacggcatcagtggcacaaatggaaagcggcgatgagcggacacagcgatgttgcgacgaaagtgtagcatcaagtccgagcagttcaagacggttgcagatgcacgccgggccccaaccgccgatgggcgcggacaattcgacgaacggcgaatgatgccaaaagtaagaaagacaaaacatttaaacgctttggcaaa

SEQ ID NO: 7628 - DNA, 1755 bp, Heterodera glycines
  unsure (1)..(1755): unsure at all n locations
tttttaaattcattcattagggttttacctttgagttccacgatcatagaattataaataattgatgtaatgtattgttatatggttatcaaattttcatttcattatgtctaacggcataaaataaggacaattttacggtaatttgggagcgttggtgcatatttacagtattggaccgtatttattcatctgtgatcaatcactcttcccatctttgccaattccttctttctgatggatcctcttcgtcctccccgtcgttcatctttcaattttggtccgacccgaatggcatggcatcgcctcccatccccccgggcattcctccaggtcctcctccgccacctcccattcctccgggcattcctcctcctccgggcattcctcctcctccgggcattcctcctcctccgggcattcctcctcctccgggcattcctcctcctccggacattcctcctcctccgggcattcctcctcctccgggcattcctcctcctccgggcattcctcctcctccggacattcctccgtttccgcccattcccattggtgggcccccctgctgctgttgattttggtcaaacccataactttgtgtttgaattggtgacacgacgaaaagcacaacgccaatcatagagcaaattgtcagcagcggaaaggaacccattttgacttaaaaacggaaaaataattatgtaaatacctaaatcacttatcggtggcggatttaaaaaatctgtgttttgtgccaattttaaatgtggaaaatgctgagagcgaatctttaaataggctcagagattcaagggtcgagatcgaaaatctcgagaatactcacttaaaattgttcacatgacaaatgggcaattgtgccaaagggcggggggggggcaaaggaaggcaaatgctgcgcaaacacaacaaaaagcaattatcaaaaatgaacactcgagaatggcttacgcaattcgagatcaagtggacaaaggcataactgttgaaatttttgtgaaaatttctaaaattcaaaaaatgatgtcataattggaatttgttatctaaaaaatttcgaattttcgaaaattattcaaaattattttcggatttaaaaaataaaagtattttcaaaaaatcaaggctacataccaggggtgggacaactctcgcctctcgtctctcgcctctcgccaactctcgccatttttggtactctcgcctctcgtctctcgcctctcgttttttgggacgagaggcgagagttgaaaatacacccctaaagattgaacttttgagcagccagaaaaattttcaaatttacgcgaaaaaaaaatctctctttctttccttccttaatgttttctctatttttggatatctccaattcaaatatggtctgctggctaaaccttctgcctttcattatttttctcttgnngtcaattccccaacggtacagaatttttttaataatttctttaaattattttttcaatttaattttaattaataaaaatatttcaatttaaaaatattattttttcttttttaaaacagctanaactgcaaattaaccaaaaactttgatcattttttgacaagntctgntaatatattacactcaaattattaaaattttttcccggcggcgtctaatcggcaccgccggaccccgcacccatgtttccaaaaaaatttttttgaaaaacagcgccaaaaaaaaaacaacttaaaacaaaaattaaaaaa

SEQ ID NO: 7629 - DNA, 1135 bp, Heterodera glycines
tcatttagagtcagcaaaaagtcatttgacttaaattcccatccctagtcatcattttgcaaaatattctcctctttggtggtcctcctctgttgcgttccctttttcttcctcttccaatcggtcattttatgccaaaatgtttccgccccttccgtttttgtcaatgatttttcgcctcccattggcacattgtccaaccccatttaaggcaaaaaaaatgtgattttcgtgtttctttcatcaagtactatccgtaaaaaataggaaaaatctaaaaaaatcagggctctctctattcatatacaaaaaatattcaccaattcccttttcatgactataaaaatcttttgttttccgctttgactcattaaaaaaataaagtttccaacgaattattattctgctcttttgtttgacatcattcggaactcggccaaaattgtgctaattgcaaaaaatgaaccgacggtaaaagaattttaaaagtctaaattcagcattatttagctaaactgttttcctatttcagttggatttgtaacgacgtttggatggacattttcccatcctttgaccatgctcaactcggcctcaaattggcacttctttcgccacgtttcaatgcgttggtggacaaacatttcaatggcaaaagcgaattgacaatttggagaccaatcgaaattagcaaggacaaaggaccagaaccgaagctgattgtacaaatggatgacaaatataacaaatttatggaatttccattgccggaccgtccgttgcccagcaaaatccgatttaagcgccttcgaatttagtaattaaaaatcagagagctatgacaataaaagcattccttccattttcacagatacatcgatcactccgtcatcgcttttcttcgttcaaatcaccaaatatttcgacaaaagaggcaccaatttacatttgtggattccatcatcacactctacgaatggccaaccaatttgggacattttggtcccaggaatttggccaattttttctgaaaacattcgccacttgagccttaacgatggtgatcatttggacaatttgcgtcgtcaaattcgccgacaattctcactgatctcaacccaattgacttcaatca

SEQ ID NO: 7630 - DNA, 5178 bp, Heterodera glycines
  unsure (1)..(5178): unsure at all n locations
agcaaacaaaatgtgtttaaagtttgggttccagagtcaattaagtcaactagcaatcatttcattactaacgcttaaaacagtgggatttgatcattttcactgcttaggcattggcccctgaacccaatcattcctattgttatacatgtgcagaaggtcagcaccacaccctccgaagtttgtcgtacggagcagaatacataccgacaagggatttgctatgagttaatttaaacccattatttcatttggccgtatgaattattggccgaccctttgcacacgtacaaaaagaaaccgtctgttcagtgaaaatttcatccgaatctgctacatagagatttgataatatatgacttcgaattattatttacaatttctggcatttgtcacattgcagtttttgatgtcctttgctaattggttgttgttttatgtgttatggttttaatgcgtgcattctttgaagaggctttggccaccctttccatcacagaagcaatcgcatcggtcacatttcggtcttgcgtctcgctcaatttagacggactcagcggtttgtcgtcaatttgaggcgaccggtccggcaacatttccatttcggctgccattttatcctctgcgctcattttgatgtgattggtctaaaaaacaaaacggcataaggtccttgtccaaaaattgctgttttttgcgattttgacaatgagccaaattttttttaaagaaaataaggattttggtccgacagtgccgatatatcgccgccgaaggaacagtgagaatttaggccatatttttagattttcaccaaaaaattggtaattttgatgaaaatttgggtgatgcaccaacaaggaaaatcaaaaattttttttagcaaaaatactatttttacataaaaatttcgaacgggaggcctcggaggggggggggggggaggtaggacccacatttcagtggcaaaagcgaatagacaatgcgtagaccaatcgaaattagcaaggacaaaggaccagaaccgacgctgtttgtacaaatggatgacaaatatatcaaatttatggaatttccattgccggaccgtccgttgcccagcaaaatccgttttaagcgccttcggatttagtaattaaaaatcagagagctatgacaataaaagcattccttccattttcacagttacatcgatcactccgtcatcgcttttcttcgttcaaatcaccaaattttcgacaaaagaggcaccaatttacatttgtggattccatcatcacactctacgaatggccaaccaatttgggacattttggcccgtgaaatttggccaattttttctgaaaacattcgccacttgggctttaacgatggtgatcatttggacaatttgcgtcgtcaaatttcgccgacaattctcactgatctcaaccaattgacttcaatcaattcctatgatttgtcgcccgctgcgtttggtgatggttttgatgggccaatttctgctggccaaatgttgtccaaatggttgcactctccgagaaaagatggcgaacccaagcgattgcgttgcgataattacaacgcacaagcgaacactgattgggtcaacaatttcaaggaggtgtggccccacattttcaacaaatcactgatttttgattgcctatatttttgttttccctaattgtttagcattttcttcgtgccaatgccatttcttccgtcaattaccaaattcatttttctgttcatgtgtcgccaatgcaaatggtgccatttgaattggtaaacgaatggacaaaggaaaagctgacattggccagagcaaaagaaaatgaatgggacaaccgatggataatgaaacgatgcaaatttggggagacggcagcggttcattggaaagacggaaattgggacaacaattgtaacaatgtgatcattttgcttggtggcactaatagcattgggtgagcaattagaaaagacatttaattttgtttaaataattcgaattgcgcttaattaaggccattgtctcctccaccagcagaagaaactggacaaagcatcacaaaagggcgaaatgagtgacggacaaaacaacaaaaaaacaatgatcagccgcagaagaagaagaaatgaattaattgagaagaatgaccgactgatcataattaaatcaatgatcaaatgcaatttatgaagaaaatcctcttaattggtaaataaatcggatgcataaaaatggcttgctatctatcgagtgtatgaatttctctctgcttgaaaattgtgacattaattttcgggattttgacgggggatttacgacgtccgttagcaattagcacaggcaatattttaaaaagtgtcaatttgctgctgttcctctctcttttctgcttcattctctcctctttcttctcttccttccgccgaatttttccttttccctttcctctctttctcttccgtctctcctccttccccagtgctatttccttccttttccacctcttcccttgtttctccatttttgctgttatccatcttcatctccattcccaccaaaatttgcttttgttgttgctgctgtactgcttgaacttcttgcttttgttgttgttgtttttgatgatgttcaactgcaactttcttttccttttcctctgcttccgctgctgctcctttttctcctcccttttcctctcttttccccccattttctcttccttctcctcccccttcgctgtttcctttttgctgttgttgatttggtgttttcttccgattgtttggcgccgacactgatagtccaccaccagcagtggagccagttgaatgttttgatttcgccttaaaatgccatttttaaatgtgtatgccatggaggtgttcggcaagccataaatgccggaatgtgtaattccgtcgcaaaaagctcccggaatgcggtcccaccactgacggtatccggattccggacaatccgtcagtggataatctttcggaagacaattctatcagtgacggacaattcatcagtgaaggacaattcgtcagtagactgacgttccgtcaaaggacatttcgtcagagaattaaaaaaaaaatttgttgacggattgtccactgacagattgtccataaccgacggcggattgtcttacaacagattatcctgcattcccactggcgcacatccagtagcaactttttccaaaaggcccaccgcttactgtatgccaactagctacagtatattattgttacaaaaacccatcccaagctacagtacccttcccctgctgccgccgccgtcctccattttcgttgttgctgttgttgtgctttcctttttgtgccgcatgaagtcgatcattctgtcctgcacaatgtccggctcggaagcagcttcatccccctcatttcgtgactctgtcgaaatggagcgaccaccgccgccgccagcagtgatccatcgctcttaaaaatgcattatcccattttaaaatatttcttttatctccgaatgccgtgccagatcgtttcataaatccgccaattttagcaaatttttcgacaaaacatggcataactttgcttaaagtcaatcaaattttagattcttggtaccattcgatagcccagctttttctctattagcttggaaaatttcaaaaaagttaccaaatttaacataagttatggcagaaatagtacttattttcatacaactttttctaaagttgaccaatttttatttttattttgcgggctaatagagaaaaagctcggctatcgaatgataccaagaatatacaattttattgcatttaagcaaagttatcccatgttttgtcgaaaaattcgatataattggcggatttatgaaagaattggcacctctgaatgctaagacttggcaccactgttttggaaaagggctgctgctggccagccgcgcattgaggcccagaaaattaggcatggaaaatttgagactcgacaagactcggaccgagattgacctccgaaaattcgagactatagacgggaagggatcgggatcccattaggatttcccgagacgccgatccgtttttttttattggaaaacgggaggatcgagatcccgacaaaactgggactcgaatttcggtgtcgggactcaaatcccggcaaaactagttgagggccaagtaaggaaggacaaagcagaaaatctgtgccacaccgttcggtccccatggatatttaggcaaacggcaaaaaatattaaatcggcaattcggatcggcggaacttgaaccctggcaccgtgccaagaaattcttacctaaaatcctccaatttaaaacctcgcaccttcggcccaatggcattatgccaaaaaatccaatttcaaccctctctcgtgtccatgtaaaattgtccaattctctaagccagagattcggtggggaaggttcttagttctggcctggtcaatgccagggctcccagatgtgaggctttagcctcattttgtgtttttttgataggtcaatgaggctaaattttcaaaatgaggctttgaggcgttttgtggttttttgagaaattttgaagatttttggggaaaattcgtcagattttttaaattttgattaattttgataaaatggcataatgtttttggccatatttgtcgacaaatctgttaacaaatcgcattgaaaattacaaaatttttcccggcggcgcctatctgcaccgccggcccccattattccccaaaagttttttgaaaaaagcgccgcaaaaaaatcaacttcggtttttcatgcttagaatttcacaaaatgtttatttcgaacaaaaaattgctcaaattgatcatgggcaatcaaaaatataaaatttgaacattttaagcgtgtttagaataccttttataaaaatgaggcttttttgcctgccaaatgaggcttttgaaaattttgatctgggagccctggtcaatgccaataattttctgctctcgaccattggcacacagtgccanaaaatggttgtcctatccagggctgtacgtaactggattttccattacgcgaagccgtaattacagctatttttcgacacggaagccgtaatccgtaattacggagctcaaaaaccatgtaaattcaa

SEQ ID NO: 7631 - DNA, 1627 bp, Heterodera glycines
  unsure (1)..(1627): unsure at all n locations
aattttatttncacctttttantcattttttaaaaaaaagatacaaaaataaaagtgattttgggcttcgggaccataggggggtgcacatggtttttgagtgaaaaaaaattttcaccaaaaatcttccaaaaacatcgtctttaggcgttatttgggccgctgatcacgaatacgtgatcagattttacttttgacatcgtcaagacctcagaatccctgtgtgattggggattctgggacatgttctgagggggggggcggcaggttcgaatccggccggtgtacattatttttacgtgcattttttgattacttttacatgtttaatttcatttcaaattaaataaatattcaattaataatttccaaggttgtttttaattaataaaagagtattttattattaaaaaatttttaaattaaaatgcactcgaacgggcgcgaagcgcccgtataagcccaacaaaatttaaaaaacgggcgcgaagcgcccgttcgaggccgcgaagcggcctaaaagtcccagataattttaaaaaaattccaaatctccacaacaagagctaacttctaatcactgttgtacctcttttaatcactgttgtatctcttctaatctctgtaaggccaacaaaatttgaataacgggcgcgaagcgcccgtccaaggccgcgaagcggcctaacaagctaaaaaacgggcgcgaagcgcccgtatgagttcaacgaatttaaaaaacgggcgcgaagcgcccgtccaaggccaacaaaaattgaaaaaccggcgaagcgcccgactgaggctgcaaagcggcctaacaagctaaaaaacaggcgcgaagcgcccgtatgagttcaacggatttaaaaaatgggcgcgaagcgcccgttcaaggtcaacaaaaattgaaaaacgggcgcgaagcgcccgtctgaggccgcgaagcagccttaatagcccaacaaatttagaaacgggcgcgaagcgcccgtctgaggcctcgaagctgccttaatagcccaacaaatttagaaacgggcgcgaagcgcccgtataagcccaacaaaatttaaaaaacgggcgcgaagcgcccgttcgaggccgcgaagcggcctaaaagtcccagataattttaaaaaaattccaaatctccacaacaagagctaacttctaatcactgttgtacctcttttaatcacttttgacgtcttttaatcactgttgtacttcttttaatcactttttacctcttttaatcactgttgtacttcttttaatcactttttacctcttttaatcactgttgtacttcttttaatcactttttacctcttttaatcactgttgaacctcttctaatcactggaagcggcctaaaaacccctaacatttttttaaaaattccaaatctccaaaaccagagctaatctaggtagcgaagctcccaaagcgcgaagcgctttttcccagctaaatagccgacggttcacgcacccgctagtttatactactatagagaaacgttgcagttcgtttcaaaaaacaaaatctcccggccgaaggccgggagcgccccgaaagtagtggaagggtcttacaactttttgaggcgcatctgggaaaa

SEQ ID NO: 7632 - DNA, 2767 bp, Heterodera glycines
tttaggattttttaacgattttcccagaaaaacggagaccactccaaaacatagttttcgagctcttcgattgtaatttttcggaaaaattcgatttttcccggaaatagaaaaatttttggcctcagcgggacatttgagtcccgggcccatactgggtcaggggttggttttagccaaaaagtgccttagaccaaaattgtagagctttttaagctctatcgaatggtgtactacatgatgtaaaattttcaaaaattttcgagctaggccccctagaaattttcggaaattttttttcggacgaaaatgggggtgaaaaatatttttctggggtattttgatgtgctgagtacgaatatgatgtctattttaagtttcataatttttggaattttttaaaaattctttattttttggcaattttttggccctcgggattttgggtgaatattggaaaattcataactcggtgatggttgcatcaatttatctataataaagctttaaaaatagagaaaaataaggagaattttatgggatttatttgagttttttatttcaaaaaagaaaaaagttattccagaatttctggaaattttcgatttttcagaaaaaaattcgtagctggcttctgaaaagctattcgggaaaagtaaaatactacaaaaatccgcaatttttttctctataatataaattttattttacatttttatcacttttttgcgaattgttataaaaataaaagtgattttgagattcgggaccaaaggggggtgaccaggatttttgactggaaaattatttttcacaaaaatcgtccaaaaacatgtcattaggaccattttatgacgcttattacgaatatgcaatcagattttacttctgacatcgttaagacctcagaatccctgtgtgattggggattctgaggcatcatttttttgggggggggggcgaagttcgagtccggacggtgtaaattattttctttgtatttttgctgtttttacatattttaattaattgaaaatcaaaaatcatccaaaaatatgtctttaggggttatttgggccgctgatcacgaatacgtgatcagattttacttttgacatagtcaagacctcagaatccctgtgtgattggggattctgaggcatcattttgagggtggggggcgaagttcggatccgatcggtgtacattatttttatgtgcattttttgattacttttacatgtttaatttcatttaaaattaaataaatattatattattaattttcattttaataaatataaatagttttgattaatccataaaaaataaaattttttaatttaaattaaattatttttttgtgaaaaatgttttaaattaaaataataatttatttacttttattaaagaactcctgtattttttaaattagaatttgtaatattaatttcaatttaaataaatattcaatccctgtacatttcaaactctctttttaattaataaaaggaaatttattttatttttaaaaatttattaattacattcaatttttaatcttactttttaataaacgatttccttaattatttaattttaaaaccatgattgtactctttttaaccattgttgtaccattccaacaatttttgtacctctccaacaattattgtaccttttcgacagtggttgtacctcttctaatcacttttgtagctcttttaatcacttttgtacctcttctaatcaccgttgtacctcttctaatcacttttgtagctcttttaatcacttttgtacctcttctaatcaccgttgtacctcttctaatcacttttgtagctcttttaatcacttttgtacctcttctaatcaccgttgtacctcttctaatcacttttgtagctcttttaatcacttttgtaatttttttttacttaaaaattttcattatgtattttttgaatttgcaaaaaaattaatttcatttcaaattaataaatattcaattattaattttcaacattgttttaattaataaaacgagtattttattataaaaaaaattttaaattaaaatgcattccatttttaagtgcgaagcgcccgtcctgaggccgcgaagcggccgaatatccaccacaaaatttaaaaacgggcgcgaagcgcccgtcctgaggccgagaagcggccgaatgattactacaaaattaaaaaacgggcgcaaagcgcccgtttggccccaacaaattttaaatgggtgcgaagcgcccgtccaagcccaacaaaatttagaaacgggcgcgaagcgcccgtctggccccacaaagtctaaaaacgggcgcgaagcgcccgtcctaaggccacgaagcggccgaatgattactacaaaattaaaaaacgggcgcaaagcgcccgtttggccccaacaaattttaaatgggtgcgaagcgcccgtccaagcccaacaaaattaagaaacgtgcgcgaagcgcccgtctggccccacaaagtctaaaaacgggcgcgaagcgcccgtcctaaggccacgaagcggccgaatgattactacaaaattaaaaaacgggcgcgaagcgcccgtcctgaggccgcgaagcggccgaatgattactacaaaattaaaaaacgggcgcgaagcgcccgtttgaccctaacaaaatttaaatcgggtgcgaagcgcccgtccaagcccaacaaaattaagaaacggatgcaaaagcgccagtctgaggccgcgaagctt

SEQ ID NO: 7633 - DNA, 731 bp, Heterodera glycines
gggcaggggggaagcgtggggggaaggttggggagccacggatgttgtggtacacgcatcgattatggaagccgcgcatgcactagcaacgaagtcctttgcgcgaagcgctcatgtaatgcatattcttttcatctctcacaagtatactgtctacaccgagcaattactgtgcaaagcatactgtctacaccgagaaattactgtgcaaagcatactgtctacaccgagcgaatactgtgcaaagcatactgtctacaccgagcaactactgcgccacacgctagtttatattaccatagagaaaaagggggtttcgtcttaaaaactaatttgagtcgaacggctgtcgggaggggtctgaaagtggtggaagggtcttacaactttttgaggcgcatctgggaaaactataggttttccgctccggtggccaactgagtcccggcggctaatttctcacttttgcttgcgtttgaaggcccgtaactttttttctaaaactctgatcaaaaaatgcttgctggtaggaaactaagttgaagtgttttctaatttttaaaaaaaattccaggcctctacctatacttggaagggctgcagaaattggcaacttttcagtaccaactttttccagttcagtccccgttgaagaactcattaggctttgacctgagcgcagggtggccagtgagcttattgtagagctcggtgagctcgattttccaaat

SEQ ID NO: 7634 - DNA, 2114 bp, Heterodera glycines
  unsure (1)..(2114): unsure at all n locations
tcgtcatttccgatcggtactaatttcaatggatgaactaaaactttcntgggcattaaataacaaaatttaaaacattttaagaaaataatcataaactggaattttttaacgaaaagcaacacccacaaattaaatcctactgtatttgtactggccctagttcaatgtaattacatttttttataaagtgtatttcgctgaatatttctaaccattcagtgccacgtgcttggcattttttttaaaggagtacaccccttgattctttgcagaaaagtgcacgcatttcgtcatttccgatcggtactaatttcaatggatgattaaaactttctgggcattaaataacaaaatttaaaacattttaagaaaagaatcataaactggaattttttaacgaaaagcaacacccacaaattaaatcctactgtatttgtactgcccctagctcaatgtaattacattttttatcaagtgtatttcgccgaatatttctaaccatacagtgccacgtgcttggcattttttttaaaggagtacacccccctgattctttgcagaaaagtgcacgcatttcgtcatttccgatcggtactaatttcaatggatgaattaaaactttctgggcattaaataacaaaatttaaaacattttaagaaaagaatcataaactggaattttttaacgaaaagcaacccccacaaattaaatcctactgtatttgctctgcccctagttcaatgtaattacatttttttataaagtgtatttcgccgaatatttctaaccatacagtgccacgtgcttggcattttttttaaaggagtacaccccctgattctttgcagaaaagtgcacgcatttcgtcatttccgatcggtactaatttcaatggatgaattaaaactttctgggcattaaataacaagaataataaactggaattttttaacgaaaagcaacccccacaaattaaatcctactgtatttgtactgcccctagttcaatgtaattacatttttttatcaagtgtatttcgccgaatatttctaaccattcagtgccacgtgcttggcatttttttaaaggagtacaccccctgattctttgcagaatcatttccgatcggtactaatttcaatggatgaattaaaactttctgggcattaaataacaaaatttaaaacattttaagaaaagaatcataaactggaattttttaacgaaaagcaacacccacaaattaaatcctactgtatttgtactgcccctagttcaatgtaattacatttttttatcaagtgtatttcgccgaatatttctaaccatacagtgccacgtgcttggcattttttttaaaggagtacaccccctgattctttgcagaaaagtgcacgcatttcgtcatttccgatcggtactaatttcaatggatgaaacaaaactttctgggcattaaataacaaaatttaaaacattttaagaaaagaatcataaactggaatttttaacgaaaagcaacccccacaaattaaatcctactgtatttgtactgcccctagttcaatgtaattacattttttatcaaggtgtatttcgccgaatatttctaaccatacagtggcacgtgcttgggattttttttaaaggggacacccccccgttttttttggaaaaaagggccccttttccccttttcccacgggaataaattttaagggggaaataaaaatttttgggggtttaaaaaaaaaaatttaaaaatttttaaaaaaaaaaaataaaatgggaattttttaaaaaaaaccaccccccccaaataaaacccactgggtttttaccgccccccaatcaaaggaaattcattttttttttaaaggggttttgcccaaaatttttaaacctacaggggcccccggttgggatttttttttaaggaggacacccccccattttttttaaaaaaaaggacgcatttcctccttttccaaacggactaatttttaagggagaaataaaaacttttgggggttaaaaaacaaaaattaaaaactttttaaaaaaaaaacatctacttggatttttttaaaaaaaaaccccccccccaaa

SEQ ID NO: 7635 - DNA, 1148 bp, Heterodera glycines
taacaaaatttaaaacattttagaaaaggaatcataaactggaattttttaacgaaaagcaacacccacaaattaaatcctactgtatttgtactgcccctagttcaatgtaattacatttttttatcaagtgtatttcgccgaatatttctaaccatacagtgccacgtgcttggcattttttttaaaggagtacaccccttgattctttgcagaaaagtgcacgcatttcgtcatttccgatcggtactaatttcaatggatgaattaaaactttctgggcattaaataacaaaatttaaaacattttaagaaaagaatcataaactggaattttttaacgaaaagcaacacccacaaattaaatcctactgtatttgtactgcccctagttcaatgtaattacatttttttatcaagtgtatttcgccgaatatttctaaccatacagtgccacgtgcttggcattttttttaaaggagtacaccccctgattctttgcagaaaagtgcacgcatttcgtcatttccgatcggtactaatttcaatggatgaattaaaactttctgggcattaaataacaaaatttaaaacattttaagaaaagaatcataaactggaattttttaacgaaaagcaacccccacaaattaaatcctactgtatttgtactgcccctagttcaatgtaattacatttttttatcaagtgtatttcgccgaatatttctaaccatacagtgccacgtgcttggcattttttttaaaggagtacaccccctgattctttgcagaaaagtgcacgcatttcgtcatttccgatcggtactaatttcaatggatgaattaaaactttctgggcattaaataacaaaatttaaaacattttaagaaaagaatcataaactggaattttttaacgaaaagcaacccccacaaattaaatcctactgtatttgtactgcccctagttcaatgtaattacatttttttatcaagtgtatttcgccgaatatttctaaccatacagagccacgtgcttggcattttttttaaaggagtacaccccctgattctttgcagaaaagtgcacgcatttcgtcatttccgatcggtactaatttcaatggatgaattaaaactttctgg

SEQ ID NO: 7636 - DNA, 1370 bp, Heterodera glycines
  unsure (1)..(1370): unsure at all n locations
ttgtaaaaaaagggggtaatgatttttttcggaataatcaatcggtggaaataaaaggggggggggggggggaatttgtggaaaagtatgaaggaatgtgctgataggaatggatgaaccctcgtaaaaatatgtaatttaatgtttaaaaagggacaaagggcggaggagggaaatttcactgtntgatcagaaacagctgaacctttctctgatcagtttatgagggatttaattttataatgaaactaggcagattttagtacataaaaaagaaactttcgaatgataaaattagaaatttgccataaaaagccttaataaaataatgtcactaattgacaaatgacgcaactcaattacgtagcgaatttctcatgagaacagttccaattttgagctttttgccatttgaaataatattccgttggattatggcattttataagtgagtcatttgtcacaaattcacacaaaaaacaaaaccaaattagcaatggtttaaaatattaagaaattatgtttatacgcaaaattagtgaaatgacgaaaatgttctgctggtaatttcttagcgtacgaaaacagagcgcacttcttcaaactcaaggacagataagcctatctccaaggacaaggacaaagtgatgatttcaaggacactgagagaatttggcatttaatgaattatgataattttggtttcaaattttgtgtacataaattttttaaagaaagactatgaaatttataatataaagccaaaagtcagtcaaatggcaaaattttcggtagagaataaatataaggcataattattgctaattaaaaatggaattgattatttttagcagcgcacaaatgaaaaatgaaaatggtaatggcataaaacccgaaggttaatgaatgaatcgtgaaattgaaatagcaacaaattaaatgctgccccttaaaatgcccattaaaggcataaaatagaaatttcgatacaattttctttgattttggtaaatgccatttacgtaacttttccctctgaattggcatttccttttcgattttctgcgatttccgtctctctccaacttttgcttttgtcctttcccatgtttcttctgtgacttcacacattcaaaggatttaaatgccaaatgacagcaaagatttgaagatttgcgttggcattaaacaaaatgtgcctttttctttcgtttggagggaaatccccgcgggcattgcgcaaagggacggattataagcacacattaagcattactcaccccgtcaccctttcctttttcgtttcgcgcactttcagccaaagggtcgcgggagagggggggggggggaattggggggggggggggggg

SEQ ID NO: 7637 - DNA, 1998 bp, Heterodera glycines
  unsure (1)..(1998): unsure at all n locations
attttcccgccccattttttgcgccgtccaatggccatccgtgtccaaaactttttgggacatcagacggtgcaaaaacaaattttgtcccgccccatctganccgcataaatagccgtcncaattgcagtctcgattcagcagatgacagcatccaactgtcatttgggcttaatccttttcaaataaacaattttcaccggaaaaatttccaaaaattagccaacaaatatgccatggacaaatggcactttgttaatttagtcgctgtgagtgaatccccgcctctgaaaatggctttttcggcttagtcatccgctctttcattctttcgatgctgcgttctcatctcttttctcatggcttttctgatactaataaagcttcatttcttcagcaaaaaaaaaaacttttccaattttccctcaaattttctttcgaattcaaaaaatggcccctctcttccatcgcttctcatctctctttgtctttctgatgccgttcctttccgttgtgcttctcccgtcaactgtttgtaccggctctgacagtgccgccgcgccgttcgaccgaaagaattatccgaaaatcgatttgcgagtaattaaacgcctaattagcatattaaaaacaatccaaaatcccctttttagctgttcgagtggcccattgcttcacattcgggctcgtccgctgaggtctcttttatcgccgtcgactgctacacccaattggaccgttctttcatctcgaccgatgccgtgctccgtctcaacaattcgttagcacttcggcaccgcgcctgtctcttgcgcattccgacggggacgcggctgacagtgaccgaaatgcaaacgaccaacagaaaggtaaataagtgattggagagaaattggatgggagggggagcagtgatcgaaataaactttgcttttccaatttagagttatgccaccgttttggccggcgcttcgcactacgaattgccgttgcgcactgagtacatccgcaaaggtgggaaaaatgcattgcaattcaatatctaaacagttttccctccaaatttaggacaaaaccaaaacttcggcccatggcacgtgccgtgccaacaggcgtatgtgctgttcaactcgcgcgggcgcaaaatggaatgggtcgaatttcgtctggacgacgaaacggaggcggacaaagagatggcgagcgcggacgaatgtttggcggacgaagaggaggacgaagaggaagaggagaagggataccgcaaaaagcgagctcattgagccgctgggcagcagactcttttggctttgatggttcggctttttctaatcactttctctccaactttgaatttatttgtctttcagagcattgaaaatgggcaattacggacaatcggagccaaaagaatgccgccgcgtgttaatgatgccaaatggatcaatttcaatgatattcccatctcccacaacgatcaaaacccattcatttcgggtgaattgccattgtccccaatcatatttatccaaatatttggccaccgcatttctcgatgataattttttaccacaaatctttttgagtccctaaattataccaaattatttaaatctcccttccggtgatctcataaaattactttgtgttgtaattggagataaatatatttgtgttaacttttggttgtgagttttgactttttaatgggttaagcgtctgcttaaagttgctaattttagtcggaaattaatttaattgcctctcttttttctgttcttttcttctttctattgatttttttcttgcaaataaatggctgtgaatggtccctttgtgccccgaggggagaaaatggcggtggggtgggcaattccggcacactttgtgcaaaagagagaagtgaagaagaacaacaaacaactcacccagcagccgaaccaaccgaccgatggtgccaaacggcggcgggtggaaaaaggggaaggaaattgagga

SEQ ID NO: 7638 - DNA, 1907 bp, Heterodera glycines
  unsure (1)..(1907): unsure at all n locations
attgaacggtcgaaatgaccgacggtgagagaaaattaagtctaaaaaaaagaaaaagcattttgcattttcagccggacattcaactgttatggcgaccacgcgagcggcaacttgtgagttaattaattggtcatttaaaagtaattaaagaaaaattggaaaatgaaaaaatcaacgattaaaacgacccattctgttctggtttgtacacatccgctgacaaaatgttgatcaaaaacaacaacaaacaaactctcgacaaaaaatgacatgacctttttaattttaaaatattttattacacaaaaaaacatttcaaataaagttaattttctttcaaaaaaatcatcactttttttctcattttatcagttaaaatgattgtcattttatcgggacccaattatgcttttaccaattttccgcttctttgaaatttaatcctttcttcttttcttccatattaattagaaatgaaatgccgcctcacgcaaaggcaaaattggagaaaaaatatattaacgagaaggataagcacccatccgttttcgttggcatttcctccatttgtcccacaattgattccccccccctccgttggcatttttctctccctttgcctttgacattggcacaaattaataaatgatacaaattcatctgaaaatttggcacaaaaataaattctgagcggtttcattctcgcgaaatggcatatttgctcaaatattacacatgtaaaaagcgaataattcaaaataaagtgccaatgttaacaatttatatttcgaatttcttctcagtttccgccaaaattcggacgcttagcgatttccattcgcgcatcgtttgccaacaacagccgccgagcagtgccgaaattgtgacgacactgcgctattttcagcaaacactcgtcgggcaagtggccgatgaatttttaggaacaatcgaacacatttaaatgatccattaatgctaatatttgagttttaattattttcgaaaatagaaacttataatttttataattttaagttttttgaaagaactcccggctaagcgcagcgaattgttcgaagagttcagtgccgagaacacgacagttcggaccgggctgtacccgaacctgaactattcgggactgttctacggcattaccaatttgttggacgccttcccaatgctcagttcggcacacaatggtccttttgtgatggtcaacactcagagatgaaaaatgaatggccaacaattcagatattgctgaggccattttggacactttgaaggcgctgtactttttcgttgatcgggactgtgttggtcggttggggtattatcttccgcattgtccaccgtatattaccttcccatattaccgtatattaccttcccatattaccgtatattacctcccgacgttaccgtatataacttaccgtattctattataagtttgcattatgtataatcagatattaaggtttattttactatccaatattaccgtatatcatttccctttattaccgtatatcacagtctgatccgccaccccgcccagatcaaatgccgcttctgctggctgctcaacttggcgttttccctgcagagatggaccgtcggcttgtccacttgctctgcgattgcattttgccgtactctttcggcgaaggtgccaacggtcgcgtgtcagttccccgcggtgcttatgctcatccttcaccacccgaccgatccgagtgtctttcaaaattaaatattttggataattacattcatttaggcattcacacaatggcagtcgaaagtctaatgcgaactttgcccgacatttacaatggtgaaaaacccttnaatatcgtctgaacaaataaatttaggcaatcggacaaataagg

SEQ ID NO: 7639 - DNA, 1866 bp, Heterodera glycines
tcatcggaacactacaaatgcttactaattttcctagattttttaaacccggtgaaaattttttgcagacaccaccacttttgcacttaaaaaaatttcaaaaaactttaaaaattcatagaaaatttaaattcataggtactactgctaaatcaacgcagagacgcctttccttgacctttttaggcccctgcaaaatctggtgcgcttctgatcactactcgaaaaatgagtgattgaattttcactaaaaagttaagcctaaactgcagtttctgtaaaaatacttatgaattaattatgcaaaagacaaataaataatgaactctcttccttaataattttcctgcaccgaaggtactcactcggccgcttcgcggcctcgggtgggccttcccctcgcactccgccaccccgcccagatcaaatgccgcttctgctggctgctcaacttggcgttttccctgcagagatggaccgtcggcttgtccacttgctctgcgattgcattttgccgtactctttcggcgaaggtgccaacggtcgcgtgtcagtccccgcggtgcttatgctcatccttcaccacccgaccgatccgagtgtctttcaaaattaaatattttggataattacattcatttaggcattcacacaatggcagtcgaaagtctaatgcgaactttgcccgacatttacaatgtgaaaaaaccttaaatatcgtctgaacaaataattaggcaatcggacaaataaggacaaattattctatttcatttagagaattgttcaaattaattagtgaacattagaatgatagattaaagccttgctttttttctgtaggaccttgtgactgtaattgcgtcaggcaccagcgaatcgcgaatcgttgcggccaatctgctctttcactactggccactgatgaatcctgcgattttgcaccgcagatcaatccaatacaaaatccatggtatatatcccgttgccatggtccctttggcattcattggtctgtccaactttgttcagtttggtcccctccgccatgtcaaaacatcggttgcgctgagcacggaaaaaggtaaacaaagcaaaagcattgttaattagacaatttgttattcattgtttcttatcagcacacgcctcacttttgagcctgctttgtgtgctttgctcggcgacacttccccaccattggccctttgcgaccgttgtgccgactcgtgccaagcggaaatgccaatgccttttctgtgccaacctttgcccgtgctgatcagtgccacatgccaattaaaagtgagcaattaaggaaaaatcatccaaactgccaatgaatgatctgttcggtaagggttgccaatcgtcgagtcgtattgctgtcagcacgtgttttgacgaggattgcatccgagcccatgggcacgtgccgctcagactgtgccacgaatgctccgtccatttgcacgctccgccggtgcgtgcccatcgctgccacttcggacccggcacaatttggggcacgcctttggagcacacaatggccgaggcggtggtgaaactgttgcgcgagacatccgcaaaccttgtgtcagttttaaaagaataaaacggcaccgaataataatggaaaagccaaaaaataaattgcaaaaaaatccgatgattttttagaagttcatccgacggtgaagcggccaaacgtccgaaatggctgaggcaattggaaagcggtcgcgagttgggccgggaagtcgacccgttgagcgacgaacggcgaatgctcagccgatttggcatttggctgatggccgcccataatgccacccagtggcggaagcaacgcagggaacggacaag

SEQ ID NO: 7640 - DNA, 5310 bp, Heterodera glycines
attaaaaaatattatcatatcaaaaaacaaaatccaaaactcaaagaatacgaaattgccgcaaaattgggaatttcaatgagctcattatacaaatacagcgatgaattagtcaataaacacattaaaatatgctaattattccaatttatcgttttaattctttttttattagaaataaataaatttgcattttccatctgttctttggatccatccttgtccaaattagagtcaaatccttgtgatatttttcatgatacaattattcatttatatgtttggctttctgtgattttttatacaccaatttttctaactttatgcttaatgttgttctattctcgtctgatccaattcaatcaataattttgataacattgttttattaacacgcagtgggatttgaaccatacaataataatattatgggatgaaacatttttatcatatgtaaatatcaaacataaaataatttatgggttgaaaatttgtacaaaataatataaaagaaattgtggaaaaatttcataaaattaaagaaaaaataaagcaaatgggaaagaaatattcaaacaaagaatggtataaaattgaaaaaaaaattgcacaaaaattgggaacaaatcaaagggaaatttacaaatggaaaagagaatttggattgatcaaagatagttattcagaagaggaaaaactcaaaatattagaacgatttgatcaaatatatgaccaaattaaaatcaaattaaaaggaaaattggatggaaaaggaacaaaatgccaaaaaataatagcaaaacaattgggcataagtttaatgagcatttataaatggaagaaacaattaaataatgtaaattcggtggacatccaaaaaactgatgatgaaaaaagagaaattatagaaaaatattttaaaataaaaaacgaatttatgcaaaatggaaaacattcacagaaggaatggaaagaatttagagcaaatattaaacaaatgattggtgtgaatttttggacgattgaaagatgggcaaagaaattaaatattaaacaaaattttcaaaaggttgaatttattttgaagggttttataaatatcaaaaaaggttatccaatttttaaaagattatgaaaaatatttgttttgttgaataatcaaaaagggaatgtgccgtatcatttaattaaatccaattgactaataatattttaatttattttagctccttccgcttcggctgacagaaaagagaaaagtacaaccaaaatattacttaaaataattacatttttaataattaaaaatgcaaaacagtagaaagaacagataaataataatttaaacaaaaattatcgaaaatttaaaaaaaaaaatttaattttttaaaataattattaccattttcaggaaaagaacaaattatcaaccaatttaataaaatgaaaaacgaattcttgaaagcaaatctaaaggctaataacagaaaagcagaatttaaaaattgccaagtaaatgggccgacgattcaaaacaattaatcggcggcgcaaggagctgaaacagaattctaactgacaaagagcaattggcactgtttttaaaaaaaccggcacgtcgccaaggaaaattttaaaaattttgatgaaattacagatttatttaaaaagcatcaaaaataagtaaatcaaattaaattgtaggcaaatcatgattcttttttgactgttcattttaatttaaattgtgatatttataaaaaaatgcagaaaattagtaatttaaaaaatattttattttgacacaaaaaaattaataatttaatttgtcccatgcttatctgtgtttctgtgtttattcgcataattttttaactggcaaataataataattttataatgaacaattttgaaattggagattttgaaaattcgaaataattcgtaaaaattcaattccgaacattcgctgttgctacgcgaattgcccattgttgttgctgcgttcctatgcttgttgcgtaattggttggttgaagaaacttgaacactttttgaaatgctttccgatattccatgctgaaatatttttaataattaaattatctgattttttggaattattaaacgattaaatttcattaatttacaatttttttcaaattacaaatttatgtgttttttcgttcgaattaaatttatctccatttgaagaaaaatgagttttttattatagttagtcataattaaaagtatattaataaatttattttatgtttttttagtgattttttggatttatccagagcaggttctatttctgggtttttatgagttttttgtccagaacatacggttctaggccaaacatgaacccagatccatatttatacttttcaaaattttgatctataagacgtagcattaaaaattaaaatcatttttcccctaaaatttacttcattttgtaaagcactggcccattcacagccagcacaatgtttgtcaagcagctgagcaaaaatgtcgagacagctttactggtcacagacaattggagttgcggaatggtcagccggccaatgcttgacaatgtgtgcccggcgagctgaagtgccaccaaaaatgccaatgccttcagaattcgacgggtccaagcatccgatgaattgtctggcaattttgaaaatttaattaaataattaatggaattccatttttaacacccataacaatgcctttgtttttatatgttagcgccatacttaatttgataatttaaaaatagttttttaatttatttttgattgtattcatttgctactttttgaaatccaatttttaatgagtcttcaaaaaaatctgaaaaattattttctttaactaattatgttttttgtttatataattattcaatatttttgtatatttattactcgtattttgggcattctgatttcggtataaaagtataatccatatgccaatgtatgtggcaacggtggtgcccgtgatgagtgtattcaatgcgtaattctgattgcttgcccaatcccaaatgcactcatgcggagcgcacataacagaccttaaattgaaaaaattaattaatcaattttctattcatataaaatacatatagtgttgttaggtttttctaaatcaatagaaaaacgaaaaaatttgcttttttttagagaaaacaaattttaaattagcttttgtaaatagaaaataaacaattttcgacttttataatcgagacattttttcaattcaaacagcattttttgttgttaccccacatttgcgcctatgtccaaaatcgggttcaaacttaaattttttcaatcccagacagattttaagctatcagggcttgaaaaaatttatgtttgaaaatccgattttgcacataggcgcaaatgtctgaggcgcaaatgtgtggacataaaaaatttctggggaaaagagggacccgccgataggcgccgccagaaaaatcaaattatttattttttcgaaaatttaattctttggactcaaaactaaataatgccaagaaaatatatttttttacttttgttccggtatgtttagcactaaacgaagaattgcttgaacaatgaaaccgggaaataacaacgaactcagcaaaacgagaaaaaacgaatagagacgtgatggtttacgcatggcatacctttcaaatttatattaattaggtaattagtcaaaaatttcaaaaagataaatttaatgatagataataaaaattttttggcaattttaaataagacaccaaattgggaagcaaatgctgagaagtcgatcaaaagcgatcaacaaattggcggacattgaagcataaactcccgtaatgaatggtagcaacaggtaaacacagcacaaacgaattggcacaaattgttggcccaccaaaatttggaacatgccaatccatgagccaatttcaaaccaggcacaagcagctgcatcaaaagcgatcagaatgttgcaggggccattcaatgagctaaattaatgatattttaatttttgatttcggcactttgtaaaataattgaaaaatattcggaaattcattaaaaaataaattttttctattttttcacaaaattaaaattaaaatagcggatttttaaaaaatttcgaattaaaaaaaattctaaaaaatgaaaaatgaaaaataattaattctaacaaataaaaatgatttaatttattttatcatttgttattacttggttttgatggtgacgtatactagcgctaagttacatattatcccaattgtggagataaatgttcgtaccgctgttaaagcgataagtgcccatggcaaaccgtcttccgcataaagctcaaaaagctaaacaccaaaatttttattatttttatattatatatttattttaaataccgtttcgttttgattcattttaattgatatagtaagcaatgaataaatgattctaaaacttaaatattgtgaattagattttttctttattttgattatatatataatcgagaactccaaaaatttaaaattaacgatccgttaattttgtataattttaataaattaattgactttgccaaatctcacattaatatgaaattattattgtgatataaaaaatcgctaagtttgagacatttgcgttacacattttcacacattttgaaaaaattttcgtgagaaaatgaatgaacgtatataaatttttgaatttgtcctaaaatttccacgccagaaaattataatgaaaaactcttaacaattggaaagaaattaataagaaatgttaattaaaaacgattcctatgtgtgaaacagctgtaggtaaacttccaaatttttatgaaccaaaaaattaattaatttttctatttgccagcggcagatttatgacgctgatggaaaaattgtttaaattttttaattaattagaaatattaaagctgataattttaacaccaagctgatgatgaatgaagaaattttgaatgcttttatgaaaaattaccaagaaaaattattgccaatctctgagataatattgcattttttgtgattagctaattgttattatattgattagacaaaaagttttcgaattttcaaataaatgaatttgtaatttatgtgaaattattacccgagattattcacaaaatacataaatgaaaaaatacataatcaaaataattcgtatacaatttaattaaaaatcataaagtaaataatttttttttggtccattagacgaaaaaataactgac

SEQ ID NO: 7641 - DNA, 2381 bp, Heterodera glycines
ggcttttattgttcaacccttcaaatattactacaaattaatgcaattttttcagaagcttcttttattcaagtttttacgaaaaactacgttgattttttaactttcaggtgccaaatacaaattattttataattaattatggacgcaacaaaaaccttacctgaatcatcgactaaaaaagtacctacctattaaaaaattcttttcaaaattacctatcttaaggtttgctgttactgcatcaatccttgttcttgtgcccaccaatactggaagtgcaaaaaaccttgccatgcgattgcgccatgctcattttcacatgacggcgaagagggattcggctcaaaagtcacctgctgtgtgtgctggctcgacgatgacgttgaccaaagcgcgagtgccgtcgtttcaacagaaccaagcagcaaacaaaacgacgaagcattgtcacagttcatcactgaacaaattgttacggaggacaacaacaacatcaacgacgctgtagaatgggcttatcaaaccaaacgcaaacgccgtgcctacagcatccaagagaaagtcgagattctggacttcggcatgaattcttcgattcatgccgctagccaccacttcggagtcgaccgaaaaatggtccgtgaatggaaaaaacgaggcgaatttgaggaaagagtaagatgcctgtaatgtcacaatgttttaattcgtttaatttagggccgaatcgtcaaaacgaaaacgtttggaagggggcggaaggaaagttccaaacaggaacttcgaagaagctgtgttccagtgggtgtctgaattgcgacaaaagaaagtgcgggtgacacgaaatatgattgctgcgcaagcaatcaaaatgagcgccgcctacgaagacatggaatgttttgcggtaacatttcgaaaaatttttgaacatttttcacttaggctagtaatggatggctggaaaaattcatgcaccgtcataaattttccttacgtcgaccgacaacagtagcgcaaaaagaacccgatgcatacaaaaacatcatcatcaacttcatattatatattcaacaactcatacacaaaaagaagtaggtaaatgagaaattttttttcaaacgactaattttcagctacacacatgtctacgcggcggacgaaacggcggtttggcttgacccgggtggcgggacatccgtaccaaacatcatcgaccgcttcaaaaaaacacttgttttgtcatggttggcagaacatggatggacaacgaattgacgacggagtacttggaaaaggtgcagaacaatgacaataattcattaatagaaacttcttaaattaagattttcgggaatttccatttcggcgcccgtctcttggtttgtaaaaaccgaaaaattttctttttgtaagaaacttttggaaaattttttttatttaacttataaaaaatttttaaaatttagaaattcaatatttttgcaattgtataaaaaatgctccttagcccttgttgtggtgatttcaaagtcaattcttaatgtacacacaatttttggcatttttttgaaagataaaagccattttttggcagtttttaaggcatattttagtgcatatttgggtatttttcgggattttagtacatatttgggagatttttagtgcatatttatgcgcatatttggcattttttagtgcatacaacttcgaccctagccataagaaaagggtccactgcgtttgggcgctggcgtttgagcgcggccgtttggccccagctcgtttgagcgctggcgtttgggcgccaaaaaatatataaaaattcaaataatttggtaaaacaaaaactttttattaaatataaaaaacaataaattggtaacaaagagcaacaattttcaagggttcatttgataattgtgggaaatgcctcgaagaaattccaaaataatgtgaaattgattgggctggggattgggtggaagataatcatatatgcaaatttatttattgttttttatatttaataaaaaaattttgttttaccaaatatttgaatttttatatattttttggcgcctaaacgccagcgcccaaccgagtaggcgccaaacgccagcgcccaaacgcccgcgcccaaacgcgtgggtcgcataagaaaacgccaagagaagtgtccgaggccgtgaaactaaacagtcccggtccgttctgaacagggttgccagattaaaattttaaaaagcctcattttgggtcaaaaagcctcattttttacaaaatttattcaaaacacgtataaaatgttcaaatgttatatttttgattgtacagtgatccatttgagtaattttttgttagaaataagcatt

SEQ ID NO: 7642 - DNA, 2031 bp, Heterodera glycines
ggaagttgattttttgcggcactttttcaaaaatccaaaagtggaattttgaccttccaaattagacctttaccatcgactattttgccttcaaaccaattaggcttgccagaccttccgtaattcaacacgagaacagtgtcgatgcgattagccgtgaaaggacatcagcttgtccaaaactttccgatttcacatatttgatgatgaagtcgtaattggccaaagtcagcgcccagcgctgcaaacgagcggctgtgtagatcggaatccctttcttactgccaaaaatcgctaaaaggggcttgtgatccgttagcaatgaaaaatttcgcccataactcatgcggtgaaatttttgacatgcaaaaataagagctaaggcttcacgttcaatttgcgcataatttcgttcacttggcgtcagacttctgcaggcgtgctcaattacgcgttcagagccatcagggaacttgtgactgatggttgcgccaattcctgactgactagcatccgcagcaacgataattggttttgcggggtcgtgtagtgcgtcaaaagcaagtcggactggagaatctgcttagccttttcaaaagcattttgttgatcatttccccaagcccaaggaacgtctttacgcaaaagaatgtccaaaggagcgcgaattacacgcatctctttgataaaccgaccataataattcagtgcgccaagaaacgaacgcaaagtgctcagatcatttggcggcggcatttcgcgaatcgctgcagatcgagccgggtcgggttggattcctttggctgaaacaatgtggccaagaaattttaattcagtttgcaaaaaatgccatttttccaaacgaatgcggaatccaaaatcctgaatttttgaaaataatttggacaaagattcaatgtgatccgtaatgtttgctgaagcgatgataatgtcgtccaggtacgcaaaaacaccaggaataccggacgtcatttgatccataatcttctgaaaaatcgaaggggcagacttaacaccaaagggcaaccgttggtactgaaaaagccctttatgcgtgttaatccccactaacgatttggacttttcatccaattccaattggagatatgcatcgcgcagatcaagttgtgagaaaacttttgacccacgaagtgcatggaaaatgtcgtcggttcgtggcaatggatgacggttgagttccaacgcatcatttagtccggtcctgaagtcgacgcaaacacgaatttcaccagactttttgcgcacagcgaggacaggtgccgcccaacgcgaaaaatcgacggggtggatcgctccaatttcaacaagacggtccaattcgctgttgacggcctccgaaactccatgcggaacgggcctagctcgacaaaaaacgggctgagcaccaggtttcaaatgaagcgttgctttcatcttcgtgcacacgcccaaacctggccgaaacctgcaccgaatgaatttgcccgggaccagacaaagcggcggccgaattttgaagcgattggatggagcggcactcttccataagtgcttccaaagtcatggacctcggtggcgttgactttcgcgctttttccatttggcggagacactcttgtcggagttctttgtgcgcgtcgctcagacctgtgatgaaaatcaagcatttgacttcctcctttgacagcgtcatgtcggcgcgttcactgcgagcgttgaccatggcgccaaactccatgacattttgtgaggggccacacgacagctgaaagcattcgaagtgcctgacaaaaattgatttagtgtcgccaaaaagtgacttaagagtggaaattgtaagctgaaattcgatttcggctggcttcttaggaagaacttgctgttgtcgccggtcaaatccttaccgtccttttcgacaaattgtccaaaacgatcccaccaaagtgagaatgttttatctgcctcggggtcgtagtggaattgcggaagttgactgttgatttgactgaa

SEQ ID NO: 7643 - DNA, 3610 bp, Heterodera glycines
  unsure (1)..(3610): unsure at all n locations
catacactaattaanttgagcacctggggccgacgactcgctcagcgccgtctccaaatagccattggtcacccaatgcaacgaacggatccgcgtctgtaagctcaggtcctccgcttcttcctccgttctggaggcaattaatttaaaaattaaatgattttttaattcaaatataaattttagagagcggattttttttaattggttatttttcaatcttttaaatgctaacaaattgaaaaacacacaaaactctttaaatttcaataaattttgtaaaaaaatcaagcaaaagaattttcttctgaaaaaacttatttaaaaatgctttttttctggagttgggagaggggaggcgttcaaaatgagaggaacaaatggcgccgtgccgtaccgtgagccaaacagcacggggtacgcacgagtgcacacaaagttctcaatttccgtcatgaagtcggaggtgctgcacggcgtggcggcgccgtcccccgccgttgcggcggcgggcggtggcatttgcgcagcaaatttgacggcactttctttgatcgattggtaaaatgcctggacgagcagagagagctcatcgcttggcaaaaattcactctaaaattggggggggggggaggcacaaatagacaaagtagttgcctgtccaccttgaacaagttgtcaatgaacacttggcactgcttgtccaactctttggcataaacgtgggcaaaattggcctctaaaaattggtgtagatgctcctgggcggtcacagtgtccggactcggtggcctgaacaggtcgaaatgtttgggatgtttgagaggttttcgtcgacacttttttcgccaataaaatatataaaattatgttttatacctcggccccaaagtgatgagcggcgattggtctaaaattcggaatgtgttttaaaagatgcaaattagcgacccatgaaaaaatttgaaaaatttggtaaggcaaaactattttaaaaggggcgggaaaacaaaaaaattatatttttacacgttgacagatttctgcccaaaagtgaccaatttagagaaattgggggaaaactttttggaaaatctaaccgaattagcgcttttattaatatttaatttccgcttcccttggttaccggcctaaccaaacccaaagtttccgtgtcagttttcggtcaaaaaagcaagtctgacaaaaaaaaattcgactgaaatgccggggcacaattcccctttgtattttgctatgcccttcgcatcggccaacccaccgcaagtgctggcggataacacggacggcgacttcttcaccagcgtcttcagcgagttgaagcgcgcgtcggagcctttgcgcgtcaccgccgccgccgacgacagcgccgccgcacttccaccgcccgcaccgcttggccccgtcgcgtgctgctggtgctgtcgcaacactttgatgttgttttggtagtcattttgccgcttgctctccagctgaaagtcgcgccaacagcgtgagcacaacccgtcgcactggggcgtgccgtagaagccgcaccggttcctgcacagctacaaaagcggcacgaatgtcaaatttatttccacccgcccccaattaggcattgaaaatttgttttatttcgaaaattgtgcgatatatttgacaaatccttcaattctttatttctccatgaggccaatctacctaattgtaagctctaacaatgcttttgacaaaattataaaaaaaaatccattaatagaattttcgacaataaccaccccaaccattgaggtcgccaacatggcgtggcgcgaaatttgctcatcggccgaagaacacattattgaacaaagataataaataataaaaaaagtcaaagtcagtcaatttggtaacacaaatggacagatttatgagagcaaaaattgccttttttagcacgcgtttgggagggacgacaatccgagaaatttgctaagcaaacattcaaaaaaatattctttcatttatggccatgaccaaattgcaaatgtgtaaataaacattatttacagcaacaacagcagaacaaatatgtgcatatacatatgcatatgtagcgaatgaaatgatgtcacgtgaagattttttaataaaatttattcaaattttgtgtaaaaaatgttaaaatgtgtaaaaatgttttccttttttaagatgttggcgatgacgatctgatcagtgagcagcaatcaaaacagacaacaaaaacatcaatgataacaacaatgaagaaaacgccgggggggggggggggaaacacacaattaatttcaaaataactgaaaatgggtgcaaaacaatcaaaaaatggtaattccccgttgctcctcctcatcgtcctcctccgatcagatggcatgcaaaatgtgtttggtgttctcgtaggtgatgaacagcgcagcgctggcaaagcatgttcggatcagtgtcgggaacagacccttgtacagagcgctgacacctagcgagaagaattgccaaaatgtacgaatgaacacagagagagacacgaatttggtaaacatgcggaagtggtaactgatttacgggtttcccggtctcgactggtgcacactgaactgagagtccccccgataaatcccagagcccacgacctatttttttaattcctcttcgtcccaattaattttgaaattttttgcaaaatttttgtttatggtaatttagagagagtcgccattatagcgccaaaaatgatcaaattggccttaataattttcaagcctaaatttgaacaaaatcaaactagtcaccttcttgtttgacaatgcgcaaaaacagttgggtcgaattttgttctcccgtaatttgcattcgacttttaactgaaatgtgtaattttttatgtaattaaatattaatattgtaacattttctcaccgacgtcgacgggaaaaatcgcagtccaaagagcctttaaattgagaaatcataagttgtttcaaaaaataaatgtcaaaaagacgaacaattcctccaaatgcaccggagagtgccgtcctcgcaatgccttaaattcggttaaaatgctcaaattttccgaaaaaataaacagagttaaacaaaataaaaattgccaaaattaaaaaatgcataaattagtttttttttggaaatttattttggtggccaccaaaaaagaccaaccaatctcctccttggcggacccgtccggtctcagcattgtcctgctcagttcgtaggcaccgaagaagcaaaaatagccgggaatttcgcgtgccattgttggggccaacccgttgaaaaatgaacgcaatccgtttcctacaataggggggggggtaaacaaaataaaattttaggcccaaaagtgccccatcctacgaaagaattagatctggaatgggttttcgagaccaggttaaggggacagcagagatttacattattttaaataaaaaagtggaaaattcgaacttacagtaaaatttaaaattcgaggcttttttaaacaaaaagtccaaattaattaaaagccgcacgtctttttcaatatatttcttctcatatactcact

SEQ ID NO: 7644 - DNA, 1703 bp, Heterodera glycines
  unsure (1)..(1703): unsure at all n locations
caaggggctcatttcctttgtggacccacagccggtgaggcgggcaaccaacttttggcagaagccgtaggaagtgaacagcaccgcattctccgccacattggcagccaacgcggggacagtgcctgggggaagaaaagtgtggcaaaattgggtttgatgacggcatcaatgggaaggaaatgccgtcataaatgtggacccagacaaaaattcgcgaatttaatatttccgcacacaaaacttttaccgaattttggtaagaaaactgatttgaaattttaaaaaatcgccccattttctttaaaaaacttttagtgccaatgcttaccggcgtaaaggccgcggacgccctcggcacggaatgtccgtctcagacagcgcacccaattgccgtacaaggcgggaaatgtttgcatcttcacttaagcaacggaacatggagagtgaatgaagcaaaaatttgatactaaaaactatgtgtgatcagtttccaaacctttgactgtgtccagcggttgtgcggtgtaaaccgtggcaacgccacctgtgaaacggggaggaaaatgaaaacaaaccaaaaaggggagtgcaatcagagcggaacgattgagacggcttcacaataattcattttgttcgaatatcaatgactttttttcggtttttcaatttatgggatgattatagaaaatagaagagacttcaagcaatttccaacaactcaccagctgtgccggccacaaagtcgatcattccgtcttttaaatgcgaaatgtgagcagtgtccgtcagtgccgaatttatcggcaccgtcgccgaacttttgtcgttcattcgcttttgacaaattccaaaaagcggaatttgaataaaaacaccaaattaacgaagtacgacagatattagaatttaaaaatacaaactgataagtggcggaaaacgaggcccattttttacactgtcaaaacagagagataacaaacacaaatcaacactgaaaatatttaaaagtgacaaaaaatgataagccatttcattcatttaatttgtgatgagttcattgatcagtctcatttcgattattctccttctcctccctcagataacaacaaccgcacttttgacgcacattcttctgattattaattaattcattcgttcgccacgggcggcacggcgtggacacggacggacttgtccatgctggcggacaccacggacttgacatcgtcggcaaaacagacgccggtgactggctgagagtgcgcgttgaactgggcaatgttgttccaacttttggcctggaaaatctgcacgttgctgcccccgacggccaaataggcgccagactggtcaaaagtgaggcagttgatctgagagaaaatttcgacgtatttaaaaattaaaaaaaactttggcgctatattaaaagtgacaggttttgaaaattttttcaaaaggggggacccttttgttttgcaaaacttttttgagataaaaaagcatgataatttgttatctggggttttaaaggtcgctaatcacgaatctgacatgtattttgactaatttctaatccctaacccgaactcgaataaaaatcgaaatttttcaaatttagattaggaaatcccnnnngatcaaaagaattgagattcccgatcggtgnncccaaaaaccccagagaataattttttatg

SEQ ID NO: 7645 - DNA, 1246 bp, Heterodera glycines
  unsure (1)..(1246): unsure at all n locations
caaaaaagtttgcaaaacaaaagggtccccccttttgaaaaaattttcaaaacctgtcacttttaatatagcgccaaaacttattttaaatttaaaatgatttttaattaaaaaatactctgactcaccgcctgcttcacatcgtacagtgtcaagttcttcagattcttcagtttgcgcaggtcccaaattttcacttcgccgtccgttgacccggtggccaagtagtagccattttcggaaaacgaaatggcaacaaccgcctcctggtggcccgggaattgggccacgttgatctgctccttgatatcccagattttgacgacgctgtttttgccgccagtgccaaagatgagtccgtcggggtgaaactggccacagcaaattcccggcacatcgtcgtcgtcggatttcacctgtgccaatgtttttggttttggaaaaatgtatagtgcactttttccactggttgattgatttaaaaattgtttgcacccagccacaaattaaatgagaaattacaaaaatatcctaacaataaacaatttaaaaacttaaaatttctggggctagaaaacctggctttgttctccacattttttaagactatcgccatcaaaacggctttgaaaacattgtaaaaatatttgtctcccccccccaaaaaaaacagttggcaaaatgtctctgtgactgacttttatcaacggacgtccagcattgaggtcgatgagcgaccaatgcgaatcctcagaggaacagagcacataatcgccggttgggtgcagagacacgtcagtgacgggtcggtcgtggatgccaataacatttctggcactttgatcatccgcgttccaaattcgtatctgaagcgagaacggatgactgggtagtagcagcaaaaacaacaaaacaccggggggggggggggaaatgggcataccgagttcctattttttggaaagcaccaaatgttcaaatattcagaccactaaaaaataatgcattttcaccttacaatttattgttactcattttttgttttttccttccacgcttaaaaaataaaataagttacctagcaataagtgtttactctaaatcggatatttgaaatgccaaacaaaagcaaaacctgtgagtcaaaagagcccgagacaattgtttgaaggttgggatggagacggacggcactgatgtgtgggctggtgcccccttgaacgntgttcttgaatggtctccgtct

SEQ ID NO: 7646 - DNA, 1324 bp, Heterodera glycines
gatttgtgtttaaaaacaaattccccggggggcttttttttgaaaaaaacgatattggaattaaaattttaaaaaagataaaaactttttttaaagaattttattttttttttagcaacaaaaattgggaattgcaaaagtatgaagagcatttgggaaagggatttacggaaggtgcctaattccttatgaaaaaggggcccttatctgagtgttccgcgccaaaaataaaatgtggtgttgctttcagtgcgcttttatatacgtaaaagttccgggcaaaaatatttttgctattcatttcgcgtaacacaaaaaataccatcgtcatccacacatcacctggccaaacgaagaaaatgtgaccaccgccaggccaccaccgccaccaataaaaacgaaaataattataaaaaaagaaagaaaaaatgttcggaaaaaaaatttacacctgggccattaaataacaagaaaaaaaaaaacattacaaaaacaaaaacattttttggtttttctaagaaattttatatctaggacaaataataataagaaaatatcaaaacaaaacattttgggtttttctaaaaaaaaaaaatttacacctgggccattaataacaagaaaaataaagcaaaacaaaaaacattaccaagacatattttggttttctaagaaaattttttacctgggccactaataaagaaaaaaaaacaaaaaacacacctaagccattaataacaagaaaaagcaaaacatacaaaacaaaacatattttgggtttttctaaaaaaaatttacacatgggacattaacaaaaaaaaaacattacaaaaacaaaacttattttggtttttctgaagaatttacacctgtaccatcacactaaacaaagcatatttgggttttatgtttttgtttcttttgtttttcctcattccataaattctgagaaaaagcatgtgatgtgtgtgggcgtgccctttttgaagaaattacgaatactgtgtgctcttgccctaaatttggccctctgctatgctttttgaaaatgccgaattttttcagggttcgaaattcaaggccaagagcttggcactaatgaattgatatattgggatttctaccctcgtcgcattataaggtttttcctcccatctcaccttcgtcgggattcaagactgagatttccaagaatttgacatgaacaccacaagactaatgccagctttcaaaaaccagagactaggtccggttaagcgaagccaaaatttaattgaaaacactcaaaagattgagctttttggctgccaacgagacttttggc

SEQ ID NO: 7647 - DNA, 1841 bp, Heterodera glycines
  unsure (1)..(1841): unsure at all n locations
aaagttcaacaaggaaaatccatgcgcnnttaatgacgcattttggttttngaaaaaaataataatttaaaaattgggtcgtctttattcaaattaaattttaatttaaaaattggatgtaaattaatatgaaaaaaaactagaaaaaaagtttatggcacgaaaccacaaaaaatcgtcaattttcggaaaaccaagatgtcgggttgtcttaaaacatttaaaaaatcgcttattgacgcattttgttttagaaaaaaaatatatgtaaaaacgaaaaaatattttatggcagaaaaccacaaaaaatggtcgactttcggaaaaccaagatgttgggcggttaagcttaaaataaaatatttaaaaaatgccaaaagggattatgccacaacatgtttttgaaccatctgaaaatgccaagaaatccacttaaaagagaaaaaaaaggaatttaaagggtttcttaaaaagataaatgccattaaaaatgcacttttgaggaaatcaaaatgtcttcaccaaacaaatgaaaaaattcttttttttctatttttaatttcatttttctattgcgagggaaaaaaattcgctagaattttaatttcctaaaaggacaaatttactatagtttttcatttcatattttattaaaacaaaaagtattcaaattaatttcaaaaataaaaaccaaaactaaaaatgaatagaaatggcaagacgccggtggttgaggaaatgaataaataaattctcggcgcaagcagtaagtatatgaactaaatttgccaaacttagatctttaaaaaatcccaagaaaaagcatattattcataaaacaattaattgcatgggaaaaatacgaaaaaataataaaaatgaatgtgagaaaaatgtgcggcgcgacacggagccaaatttggcacacaaatattattatattgcgcaacaaattcatgcgaaaaacatgctgcaacacatgtgtaatgcaatgccatgattagtcagtctatcacaaatgtttacaaattaggaagaaaagaggtaattaaaattaatgtaaaatgcaaaaaaaaaattttttgaattattaacaataagaaactaataaaaaataaaggcgctacttgcaaagtataaaattgttctcgtaagttttccggttcatgatcaagaacctgacaaatatttcaacacattacgaatctctcgaacctaattgaacaaaaaacgaaatttggcataattgattatttttattttttcgatttcgagttagggattaggaattggtcaacattaatgtccgatttgtgatcagagaccacaaaaacctaaataataacctgatcaaagaagaaattaaaaactgatattttgttaataatttaaaaaatagtaataataataattgaattattatttaatcacaaataagaatttttcaaaaaaaaaattgtctcatttttttccaaaataattagtaaataattatgggctgaccatccgccgcccctcgccactatatatttttgtttacaagactgaaaaatgttttgttgtgcttttggactttggttgttctttgcagctaacaaaaatatgagtagataaaatttggtcattgttcaaaaaagcgtatttttttggacaaacgattaactaatgcatttaattagtttaaaaaaatagattattattaaaaaaatataattaatttatccaattctaatttaagaaaagaaatccatttacatttccattacaagcagtttttgttccttcaagatttaattttaataaatattaatataaatttgatcaaaaaacatttttttggg

SEQ ID NO: 7648 - DNA, 1942 bp, Heterodera glycines
  unsure (1)..(1942): unsure at all n locations
taaataatttattttaaaattttttagaaatataaataatttaaaaaattaatatttaaaatcttttacatatattattttaaattaaacaaatgttatccttccgcccacctttatatgcgaacaaggcttctcaatgtactagcaaaaagttatgaataacaacacccaaattaggcattaattaattaattttcatcaatcactaataatggtagacttaattgcgaaaaaatttaataaatgccaaactttgtgggaaagcttcttttttggcattttgttccccgccggcggaagggatttttttttctgttatttatcccacttatccgtcccggtgaatattaattaattaccgcagcccaaaatatacatgaaggtgaagcacaatcttttcaacattttaatatgcattattatgagagagcttgttttggtgggcgcaaatgtcaccgtccgcgccctggcggcggcgacggcggcggcgccaatgaaaggcttaaaattgcatgcgatgaaaaaaaaacaaaaaaaaattggcaattagaaaatcggaaaaatatcataaaattcaaactcattaaaagcggacaaaatgtcatcaaaactaaaaatggagaagccactacctttaccaaatttcaattaaaccaaaattaaaaaaaaaagttttttttaatgagttggacaaaatttggtaaagatggctgaattttttgagagtttcaactagaaaatgccacaagaaagcaatttattggaaataattattaaaaacatttttctgtctctattgtacaaaaaattattatttaaaaaatattaatcattttttaataaattagtaaacaacacttgaactaataaaaaagtggtggattgttggaggtttttatttgcaatttgcattacacaattaaatgcttttgcattatcatgaaaaataatctgatttttgatcggtttctgaacaaagagtggagagaaagaaaaaaaattgttgctaaacaaatgggcccaacaaataattaattaattaattaattaatatgtacacattctgagaaacgcgaacaatcaatttttgcacgtgaatttgtttttattgttttctttaaatcgcgtgtttataagaatttaaaaaaaattgaaaatttattttgtttaatttagttgagaaatattttatttggctccagaacagtatttattgtaaggattaagcaagcggacagttcaaatttatttaatttttttaattttgaatattttataactcaaaaaattattaatttatttgttaatactactaaaaaggaaatgtttttgaaagaaataaaaaactaggtctagtccttatacataatcagaaaaaagtgacgcacttacaaattagtgtaaattaaaaaaaaagaaatgccacgacccgggattgaaccggggacctttagatcttcagtctaacgctctcccaactgagctatcatggcgacaagagtttggcctaaaagaagaaataaaaataatttaaaaaggaagtgcgaatggtgatggcctaatagcttaccattttatacaacaatttattctattgacagtattgaacatattgtggattttgcatttcgcaatcgcgacatttgggtattctttaagaattaatgagctggattttattattcaaaatatatttacgcggggttttcgtggtcactgatcacaaatccaacttccattttgaccaattccgaatcccttccgaatcaaaactctaacaaaaatacggaaaattatttttcgattttgatttatgtccaagtttaggtcagtgaattttgaattggttgaaatactggttcacaactagagccgattttggatccanaaattatgaatgccctgaagtctgttggactggtaaaaaaaatgatgataaaat

SEQ ID NO: 7649 - DNA, 1450 bp, Heterodera glycines
tgaattaaagttaattttattattggtcattgatagggttgtaaattatatggactaaaaaacgcgaaatatggacattaaatatggactaaaaaagcccgaaatatggactaaaaaggccaaaaatggccaaatatggaccaaaatatggataaaaaatgccaaaatatatgttgtaaacccccaaaaatcccaaaaaaggtgtgcatatttaatatttgcttaaataaacctaaaaagtacaataaacaaccaaaaatggggtttaaaacttaaaaatgcatattttttattgttgttcgttgtatcaaaaacacctccaagtttgccaaatttcgaaaaaaattctcattaaaaaaaaagaaatgttcgcaaaaaaatgacgaaaatatttattgaaaatgccaaaatgacgacgaaaactcaaatttttcgtgttttgtggggtgtaatttttaaaaatttccaaaaagttgatctttaggggtgtatttttcgtttttttttcatttttcttgtgaaaatttccaaaaaatggccaaaatatggactaaaaacccaaaaatggcgaaatatggatttattcccgaaaacccccaaaatatggatttatatggactaaaaaccttcaccaaatcaaaaaattttaacgcagaaatgctatttttaagcccctttcttcatagcatatgcgtttaaaaaattttttatgaattaaagttaattttattcctagtcattgatgtgtagtgtggtgtagtggttagtgaatcaaccttgacattactttctgtcgtgagttcgattcaggttgacggtttcttttttaatttatttttttaattttaaaattcacctggcgctgcctatcggcatcgcacgcccaaaaattcgtaaatcttattaaaaaaattctctaaaaattgcaaaacctatcattttttggacaaaatctattaacattcccggcggcgcctatctgcaccgccggacctctacgctcgcacattcaccaagttttttttttttggaaaaatgtgcctcaagaaaatatgttacaaatctgagttccaattttgagtaaatcatgataatttaatatattaaaaaacaaaaatttatcgtaaaaatcttatttttttgtaaacatctgttagaaatcgagcttaaatttcaaaattcgccaggcggcctatcggcacctccggccccccaaaaacctattttttcttaaaaaattagccaaaaatctctaaaatttggtaattctttagacaaaatctgtgtaatttatgccaaaaggaattgaattgaggcgatacattgactaaaggaatgtggagccatcacatcattcataaaaaattaattttttgtaaaattttttggagttaattcaaatcaaacccccgcccccgtccccgcgggggcggaattatcgcgcccccgt

SEQ ID NO: 7650 - DNA, 1762 bp, Heterodera glycines
agcttagaaaaagcctctaaacatgttaagctttgaatgataccaaaaatgttggatttggatgaccaagaaaaaagttacagaaagttatagtggaaaaacatgctagggcccaaccgtgccggcccaatagtgccggcccaactgaggtaaaccggctaaaattgatgtatgctttaaaaaagcgtcgcaaacagaacgccaaaaatggtcacgccaattaagcaatcattcgaaaattccatcgtacccatttgcgcatcgcaacgattgtttgttacgcctattagtttattatattgtcttaataaccccacaccagcggaacagaactgcttttgtgatcatatcttgtataagtttatgataaactaccatttagtcttgaggattatattcgccgaaaaaattacggtaggcattttttttggaattcctactgaattacatttatcattttaattggacaaaaactcggtcatcaatatacagtaggctatttattaattgatgaataataaccggtttttgattattaaataaaatttaattagcttctaattttaaggagagaaaaataggtataagtaaaggcttcaaaagttataaatttaagagaatattaatttattaaaataaccgtttttttaatttttatttctgttattgggagggttaattttttaaaatttacaaaatttctaaagaggtctttcaaatgcgtaattttcgaaaaacaatttaacaattgcacttagaaagattcaccattgtcaatgagctcaacaaaacaatgctaaaccaggaattggtgccctaattatttgattttttaaatttaaaattatttagtaaaagtgtgttaattagagaaacagaatggactaccgactgtctgccgactgttactcacaaataaatgtgttatctttaaatacataatgttttaatggacgagaaaaaaaaacatataaataattagcagcaaccgtcagcagcgaatgcgaatgttgcgcaggcggtcaaggttagacagcgcaaaagcaaaaaataaataacaaataattaaaaagtcaattaagcataattagtgggggtggggagggaggcaagagaggcgagagccccagcagagatcgcacctttctgtgttcattttgtgcttaatttattaccattatcgcaaacggttttgccgagaaaagagatgataattgttttttgttgtaaatttatgtgttttgtatgggaatggatatgataaagccagccgatcgacggacgaaagcgattgattttgatcatttgtaaggtaattaaataattaatgaattgaacaaaaatgcttttgtgcggtgtattaactcattttagtgtggatttttcaaattttagggattttacccttcgtttttatggacttgctttttgtaattaacggggtggtgggcttcatcccgataaatttgttcatttttatactctaattagttcataaaactgaatattttaatttagttgctattttaaattgataatccacttatctgatcaaaaaacaaattttccatgatcatttagagcctgaaaaaacaacgcaacacttatcagcgctgataggcttatatcaggctgcctggcttggtaaatcttcaaatactgataaacaggcttatacgactgtttattgttagcttggacctagtccaaaaaaaaatctagggccttagcctggagatttcaaatttctgtgctctgacaa

SEQ ID NO: 7651 - DNA, 2248 bp, Heterodera glycines
ccatttaaggaattggggtgtccgtcctgtgagcacttcatccccttaataataaatatataaaaagcagccccctaaaaattggccttcaaaatttcaaaaagtgttttacaaactatgagaaattttccattttttaaactatgaaaattttcccaaagttgatcccaaaaaataaattttcttggacaaaatttttaatctattttctaaaaatgacaattattcaaaataaacaaaaatttgttcaattttatttttccaaaatttttcaggtgactctggttaaataatagcaaattttgaataaataaaatttcaaaaaagccacacacctaaccgccaattaaaacatttgttttccctgaaaattgcgacgaattctggcggaatcataaatatgtatgaccttggccatcagccggcgggaaaaaatgcccggaaatccattcattcattctcccacccgaccagcctgtcttcatgttcagcgcggagttcgttttggtgcccaccaatctctgcccaattttctcccctttttatagtgctaattgagggggttggagaattggaaattgtcaacaaaaaaaaaaattggtgaattgtgggaaggttattgtcctgctatgtgttatgtgatgattgggtaggagagacaggactaaaaaagatttaatatgatttaatttaaaaattcaactccaatttaagaatggttttaattagtatttttgaaaaatctgctgctgggttatttttgggcaaaatgtgtttcaccaaacaaaattgaaaaaacaaaactaaataatgaacaatgaatcattaaaaaataaattggtataagtttgcgatagaattaatttaaatattcgcaatcagtttaataaggaccgatatacaaaaaaaggaaaaaaacattaaaatgcattttcagaaatttgaaataatttgatgaaatttgttattttttaaattcatcattaaaatttttagttttacattaaaagaataaattgaagaaagtgaaaaaaagattttatgaacaaattgaaaaccaaactaccaaatgaaaaattgaattagagaaaacattttggtttaatttctaccaaaacttaatgcaacattcgtcacgaataaaatatataatcaaattttctcgacatgaatttctgtcatggcaattagcgtcaaaatgatttgtcccaaaaagaaaaaaatttcgaataaaaataaccaaattgaaaatgaaatttaattaaattaaaaatattatttatttcgaaaaaggaaaagtgaacaaaaacaattaaaaattgtaaaatatttatacttttatttaataaaaaaataaaaaaagtgatggaaatggtaaaccctttagagaaaattgaatacgatagattaaacaataattaaactgctgctaaagtggtttgcaaaatgttgtacagaaagtgacaaaaacaccaatttttaaacattaatttttattgaagcgaattcttttctcttacacacattgtggaagacacacaaaaatgtgaatcacagcttcacaataaaacgatggaatgttttttaaatttgaaaggtgaaattctcaaattcgttaaagaaattttattttggaaatttcgaaaaatcaatccaaaatactaaagaattaaaagccgattaaaatgggaaaagtaaaattttaagtcaaacaaatagaatttacctaaaatgcgttgggaaagaaaggtatttgcatataaaaaatggaaaataatattttaagaaaaaaaaaataaaaagattttcgagcctcgaatgaaagaggtacaatgaaaatagaaacccaaatataagggttaaaaatttgcaaattcttctaattcataggggggggggggtgtaaaaaataacgtatattttttggcacaaaattcgacaaaaaaatttgccaataaaaaataactaaaaagtaaaaattgagacttaacagagcaaaaaataaaataaaaataaagctctcggccataaactgaggcccaaaacattggacacagagcagtgcaggagagagatttggcggttggattagggacgaggagatacggcttaggggttggttgggctgtgggtaactgctctccaaattgggggacatggggaggtggggggtttctctatgttaaatcctccccactttttgcatagcgtcagataagaaaaatctgactgtttctatcctggtttt

SEQ ID NO: 7652 - DNA, 1308 bp, Heterodera glycines
ttttgagcggttttcaaaatttaaaaaaaatgtgcgtgaaggcactcttttattccaaagaaatggacaatttgcaaaacaagttaattatagttgggattttttgataaaacgaaattatattctaacgtatcagcagggcagtaatttatgactcctggcctttaaattgaaaaaatttgtttttatttgtaagccctaaaataaatcgtcaagaaacaaaatgataatttaacagaaaatatttgacttttgatgaaaccgaaaccttatttatccctccccctaaattttattttttaaattcataccaaattttacatttttttttataaatcctatttttggcttttcaaatcccatatcttacctattttggagtttttctcgctaaaaagattggacaaacttatatgtagagagagcgaagacggctgaacagcgataaaaattgaaaattttgcagattttatctaggccaggagggggggggggggggctgactggccggcaattttaattttaattattttcaagttttttacaaaatgctgagatggttaatgtgattatggtggtggtggtggtggtaagtgctattcgcccccccgccccattcacatcaattaatttgctaaaaataggcaatgttatttgtgtgacatgggggaaacagctgaccccacaaaaaaaaacaacaatgttttctaaaaattggatttttttaaatttcttattttggaaagaggaggagcgacagctgaccaccgaaaattttcaattttcaaattaaatgatttaattaaattttgctggtcagaacggtgattgatgaatgtggttgcttttgaaatttttgccacgtcaactgacagcacagcgaagaaaaggcaaaaaaaaaaaatttttttttttgaatattaagcatttttaaattaattaatacaaaaaaatacaaatgactgttctaaaaaaacaatttttgttcgtataaatgggccttttaaataaaaaaacaaaaatatttgcagataaaaatcacaaaaatgctaaaaaatacaaaataaagttttaaatctaataaatgcaaatatacacaaactccaaaatatgcaaaaaaaggggtcactttcgcttttcgcttatttcacatttcgcattttggcactttcgcttttcgccattttagcattttgccactttcgcttttcgctttttttcgcattttgcatttttttttcaactttcgcttttcgcattccattttaaaagtgaatggtccacccttaatttgcgtacactaatcca

SEQ ID NO: 7653 - DNA, 3194 bp, Heterodera glycines
cgtccttgcagattttcgctggtgtgaaggccgtgatgatcaaagttgccgcgttggggctgacccccaaacatttgggccattcgcttgaacaggtcagaagagaacactaatgacggtgacagcggcgggttgaatataacgatttttttgaaaattcccgaaatttttaaccttttttttacaaattttacatgctttgaatagcaaaaaaaaaagtcgtcgccggagaaaattggggacattcgtacgaaaaatttgttatgttttgaaggtcccaagttcaaatccaacatcaaattaaacaaattttaatgaatgcttaacaaaagtaaataatcttggctgagcaaagagtcgagactctcgcgatgcattaattataaaaattctttaattttcaattatatattttttgtttttccccgcattttgcagatgcgtgcccatttagtgtccatgcatgccaagtatgggctgcacgtgtgcggcgagggcggtgagtatgaaacatttgtgctcgactgtccgatgttcaagcgacaacgcattgtgagagtgtgatgccaatttttaaaaatttatttgggaatttgaaacaaaaattcgttgggggaaatgaattgatgttctattgcttcatggctgggcaaaactaatcaaaaccaacaagaaacgagaataaaacattttcggatccggcctcaaaatttggggtgcaccccaaaatttcgtcgcacgaaatttcgcgggacataatttggccgccaaaaattaaaaaaattaaactttaaaaattttctggatgccaaaaatggcaatggtcaagaattggtgtcccgacgaaaaaaaatgttaaaaatttcatagatattttatctaggcttaaaaaacgagccgatcacgaatctgaattcagattttgaaaatcactgatttttgtctatgatttttatcagctacttgattttttccaaaattttaagaaaatagtctggcataaaaaaactcataaacagatgttgtagagcttaaaaatcgaatgagctattgaatttatggaaaagacaagtttcgatttttaatgattttttgaaattaataattaatccctaggggtcacatgagacgggggcctggggttcgagtccgcttggctgcggtttatttttttatgacacttgatgaaaaatcatagataaaatgaaggttcatgcataatcagtgctcagaatcatgatcagagtattttttaaccccaaattcaaactggcatattttcttgcaattgatttttgatcaaaatgagtaattaattaattgccaattaagtcattgtcttctgatcagtgatcactcaaaaaacattcaaaaattttgtggcgatggcattccgttgtgactgctgcctgttcacctttgcctcatttgggctgctccatgaccatttactctacatgggtgagcaagcattttgtaatgcgtttgtattgtggtctctaaaagtcttgacgaattccgattggaactggacttaattggattttaattacgcaacaccgtggctcgtaattacggagtgtttaatcgattacggaaatccgtaaccccgtaattacgggagtccaaaaaagccttgtatattttcccccaaatttattttcaaacgggtaatgagggctattataccgaacaggggtcggacaatccgtcaataatggataatccttcagtgaacaattaattctcagaaaaaaattttttgagcaccgatcaaagattttcgagaatgattgttaaatttaataaataaaatttcatatttcttaaacattctattatttaataattcgatttaatagattatttatagaaatttcattttttaatataaatttattgacatattgtttactgacgaatgttcgggagccctaattccgacgcccaaaaatttttgaaaatggatttctgctcccaatgcagaaaatgtaattccgaatcatgtctatctttgtaaattgttgcgacagtgtccgcctcgtcgttgtcccatgccacgcattcgttcgtctgtccgttgtgcagcgtgccgtccccgtcgcggtcgtccgctccaccgcaacaacaatttgccagttcatttggttgcgcaagcgtttgccgaacacattgacatggcacacgtggcccaaacaccccacgaaatggtggattgatggctcatcggttaagagccttggacaatctcaccaaagaggcacgggcatttggacgaaagactcactccatttcccactccaaattttttcacggctatcaaaccgctccacagaaattctgacagaatttatttttttttaatgacaacatcaaaatacataataaatgcccagattaagcgatggacaactgcttgctgcttcatctaatgctgatgcgatggcggcgtccacttctgctgctgtttctgtaacggcacggcacggcaaacggaggactgaggaggcagtatcacattgtgtgcttgaaacaactaataattttccagttacaccagaaataatgaattcatttaatgccccgggattccctgttcatgaattaaaattgaagctaaactgtaagataatgcttctaaggaatattagcattgaaaacggactttgtaatggaacaattttacaagttaaagaattaaaaaacaatgtattaaaatgtataatacttggtggtgataaagatggttctgaagcttatattcatagaatttctctaataactgaaagcgaatttcctgttccattaaaaagacatcaatttccggttcgcttagcttttgctgcaacttttataaaaggacaaggtgcaacatataaaaaaattggagttgattggacgagacaaagtttttctcatggtcagacatatgtagttttatcgcgtgttggttcatggcaacaaattaaagttcaattatcacatgaaaatctaaatgcaaaaattgataacattgtatggaaggaaattttataattttattaaacatgaaaatacgaaaaacaattaataataaaatatttggaaaattgaaattgaaaaggagcttttaaggtaagttaatcgccacattaatgaggggggtgtggtgtgtgatagggcgggaccctattgtccctctaactatcacagaa

SEQ ID NO: 7654 - DNA, 3023 bp, Heterodera glycines
tgctaattttatgtaaatacatatttttttcctagattctccttagcctaattagtaggaaaaacactttcttttttgtgtttgcgaacaaaagttgggacttttatttacatattttcgaatttttctacatattacatatgtacatattttggactttttcgtacatatttttcatttttttacatattttgaggatttttgagaatttatagaaattttttataaaaaatttaaaaatttttttttgaaaatgtatctctaaaaaatcgatttttttcaaaaaatgatatatcaaaaattaatttgtaaaatattcaaatgtgattctaagcctattttgttcatttttttggcattttgtgcctatttcactttttacgaagaatttttttccaaaaaataaccattaaaaaaattttatttacatattttagtacatatttgggggtttttgtacatatttcacacatattttagcattttttatacatattttatttacatatttcgcaaattttgttacataaaattagcatccctactgatcactatttcaaattcattttttttcaatttatatggctgtataatttcctattttcattttaacaaaacctcaataaagtttttaaattatattattttattttataattagatttgttagttatcttgaataaagaaaaattttttaattcacttttgcgtaaataaatgaaaaataaataatgggcttttaattctcatttgaacatttaattcaagaaagacgcaatgttttattcttttattttcgtaattgttattgctcatcattttctaattccattttcaaatgcaaaacaatcggcgagtcaatttaatcagggaataataatttgtctgatcatttttaattaggtggaagataaaatgctaattgcttttgtggcaaatgatcagaaaatgcaaatcagtgaatattctgtgcaaaaatatgaggcataccttggcattatgtattatatgagaaagaattggcactgtgacaaaataacagatgaatttgaagaacatgaacggacagaatgccaaatatttcaaaattatttgaacattttatacgaatatttgttcagagagtatggcgaaattccaagagtgaagccaaaatttgtatttaaaaatgaaattcaaattgaaggaaaccaaatttaaattgaaggaccaataatttatgctttgaattgtttggttagaatttcacagttttattttataaaaacagtgggacaagaagataaacataagttaaaaaaaatcttcaataatttgggaaaatttgaaccaaaattgttgaatgaggagagattaaattatgaatttaatttgaaagatgaataaaaaatgccaattaatgaaatgattttgcaattggaaattgaatcagcgaatgaatgtcaatctaatgaaaatttagacggaataatccaagaaaaatttggaggaaatgttcaaaaaagcagaagaaagggaaaaaaagaccgtttatggagagcaaatgaaataaatgatgacaaacattggataattttggaatcgaaattcgattatatatatatatatatatatatgggtgagaattaatagaattaacatttaatggaaattaactaaattcaaattaagattgaagatgctctatttttggaatttgtcaaaggattagtgacaaattttgataaattttttgaattacctagagaatattctaagggtttgatgcaaaaatataaaggcaaccttgacgttttgtatttaatgcgtgagaattggcactgtgaaaaaattggtaaggaatttaaagaaaacgaaatgacagaatgccaaaaatatcggaattatgtgaacatttatatgaatatttattccggctttatgttgaaggtttgttgagttttacatagtaaagcgggaccgggatgagaattcccggtcctccgaggtcccggttcccggtcccagattttgcaaagcccatgtcctggccccggtagggtcggcccaaccgggaaaaacatgcactggtaagaatgtgagtctgagcaaaaaatcaatgagcgaaattggggaaaaggaaaatttttgataaaaataatttaataatatttattaaagttatattttcaaatgcacaaatggtctagtggttaattaaaaaagcagccttttttgttgcaaatttgttaaaaaattgtactcaaattttcaaaattttcccgacggcaccttttggcaccgccggacccacttctttcccaaaagttttttggaaaaagcgtgccgaaataaatgatgtagaaaaccaaaaaaaaaaggttgtcgattagggcggtggtatcccctcaaaaaaaaaaaaattctgggatcgcccctgacctctggaccacaacatcttccctaattataaaaaacgattcaaatcccaaagtttggcgaaatttggaataatttctgtcaacaaatatattaaaacttcaaagattttttacggaagtgccgacaggcactgcatccctcgcctacatagcattattgaaaaataccgaactttctgaagttttcaggaaatttttttcgattttgcaaatcagggttggcagatgaaaattttcaaaagcctcattttgagtcaaaaagcctcatttttacaaaatttattcaaaacacgcttaatatgttcaaatgattgtccaaaattttcagtaaatttttttgaaattttaagcaattttcttaatttttacagtcaatattaaaatggtatattagatccttctcctgacatggacttattccaataaaagaggaaacatttatttttataaaaatgaattttttttaatttgttgatttgatttgttaaacttatttaatattaaattttttgcccataaatattttaaaatttgtcactttttctcaaaaaaaaagttttaatgtttttggtattaattaacccacaaaattctgcacagatt

SEQ ID NO: 7655 - DNA, 2596 bp, Heterodera glycines
  unsure (1)..(2596): unsure at all n locations
ttttttacacctttattttaatcanctaattaaatttgaaaggcggtacacgtccaccattctggcataccggttgtaaaccgtgggttcgaaatttttcgagcaaaccgacactgtnttcttcgtaaaattggtttgtgatcacatttntaggactntaatatttatatttttagatcgaaattgctctggatttcgaattggcttgcgcaaaaaggaacctccctggtggagagctcttcattcagttcagcttcaaagatgaccaactgctggatcctcaatacttcaccgactttgtgcactacttgtgctttgggcgctcgggcacaattacaacgacgagaatcatcacatttgcggcagtaagcgtggataatttaatcataaaaaattgttattgctatttaagtcagctcaaatcggtgagcttttcggcattctgctcaattatgcattgagtagcgcaaatccgctgaccatgaagaagcgaactgcgggaggttatctgtctcgtcagcattttccaccgatcctcaagctcactgccactgagatggcatcgcggggagctggactgttggtgcgcaccgacggaatggaaatgtatcgattgatgaacccctaccaccaaaatgatgttggctatctgattgtcattgaaagatctaggcaccctggctcgttttatttcaatttttcagttgagtaattctcgtacaaatgttaacaatttattattttgcgtaataaaatatcacgtacatatcggggcttgcacaattattaagcacgttaagaaagtgggtaaacgagtctccttgggacatgtggtaaatgaaaacaatgcaatgtgcggcacacgtagacactaaaggggactggaatgggcaagaattcttccttaatccttcggggaatttggtcaaaaaagatgatgtaatggctggcgggatggactgagcaagactatcataatagagcactggcgcacccaattccttcgcgtaaatagcgcaccaatgagagccctccctgtggtgggggtctcggttcacatcgagtgctgcggggtcctctagtggggagtagtcccgacaactggtctctgattgcagcagcatcagaaatacaaactctgtctagtctggagtaagtgatgatctacatggcatcaatgcttagtatgaatcaacatattatgaacaccgcgccggagaatcatggagtacgtattttgatacatataaagccttattttgtaaaaacaatttttcaaaaatgtttgaatttcgggttagggatccggaaattcgtcaaatagagttcatattcatgattagcggccccggaaacccctggaaacagcttttttatcattaaaaacaagattttatgtgggtcaaactgtataagtaccgcaatctgaggcgccgagcatgaatccggccttattttgactcagtttcgaaccataaacccggactcgaacattcttcgaaaattaattttttttttttttaattttagaaaattgtttttaggggcaatctgaggcgccgagcatgaatccggccttattttgactcagtttcgaaccataaacccggcggactcgaacatttttcgaaaattaaatttttttttttttttttttgcaaatattgctaaggcgttgattgaattgtgcaacaatatgagttaacttaagggacccaaatgtgcatcacgcattcacaaggtaaaaatgggaagtctgatcgatactgttgtcgaatgcagccaatgtctttttcccattgaactgtctccacatgtattcatcgcaataaataggcaataagttctacaattcaatcatgcccttacttagcaatatctgcaaaaaatatttttttaattttcgaaaaatgccgtatccgggttcggggttcgaaactgagtgaaaaacaaggccggattcgtgctcggcgcctcagattactcctaaaaacaattttctcaaatttttgtaaaaacaaattttcgggaccaattgccgaggatttctagttttttaactattttttctgcagctttatttagatgggaaatcacgaaaaacacatttttagctcggcaattcttcgttttaatgccactattcatcactaggaatcactattttggagctttgccactaaaaaaaattattttggaagttggccactaaaataattttttgccactattatggcgttttgtcattatttttgccactattttggcattttttggaaatttaccaaaaaaaatgcaataaaaaacgaaagatacacccaagaatcgacctaaaaaattcaaaaaaacacccctaagaattggaaaaatttcacaaaaattcttcccccaaattttttttcttgttcaatatttgctaagaaaatattttgtaactgcaatcagtgaataaaatggtttgccttaattttaaattattttcaaattaaaaaacagctgtttaaaaaattacacccctaaatttagaactttttcgccactatttttgccactattttggcatttttttctcactatttagttaattattttgggg

SEQ ID NO: 7656 - DNA, 3771 bp, Heterodera glycines
aattcggagtttaaaatctgagtaaccgccgaccatgcttccttttgcattcggcctgcgtcagcatggcgtgagcccgggaaaagttggtcttttcgagcttggataagctcaagcaaacgggcattcatttcggaagaaaacactatttgggaattgataaaaagacgtgaaaacattagcatgaatatgacaaattttgacaaatttcttattcgaacagaaatccgaaatttattttattttttcggttttcgcctttgttaaaatttagattatggactcggaattgggttaaataggtgtcagatttttgatcaatgatcacaaaaactctcgggaatgttatttatcacaaaaacccctctatgttttgttttttcggggtgtcccaaaaatgtcggttggtcccccgccctgcaaaaaaaaaattgttcccctcgaattttttcttctgttacggactgcatttgctgttgctcgttcgccgcttcctgtgacgctaaaagcagcaaaacatattaataaatataacgaaacaatgaacaaaagggcgacagtaaaaatcaattatgtaaaaataaaaaatttgtttaaatttggaaaaaacatttcattcttgagcacttagtttgagcgctttattaaaacatttttaatttcactaaacgatttttgtggaaaatttttttttttgtaattttgaaaaaaggccattaatacaagggggcattcatgactttttgaaaaatgcccaaatatgcaaataaaatatagatttaagtgctgctgaggacggactcccattttggcacaaacactggccaaaaataaaaatggattaatgaactcaccgactgttcaacgttcagtggcgactggtacgcgccaaaaaggtttaaattccctgttgagttcaactaaaagaatttgtgatgaaacgttgaagaaggctcatgaatttctgtcacccaccaagtgccgtgtgaaaatgggagaacagaagcggcacttcgttcaaaatggcatgtttggtaattaaaacaaaaataagctggtgttggaaaataataattgtactgatcatgaaaggcttggtcttagaaattcactcattttactctgttttggtatacacagaataacaaaatggttatttttaccaaaacttttttataaaatggtccattttggtgctaaataaattcaattttttttttgccaaacaaaatgcatttttatctaaaaaattttctcttcgtacccaaataacaattctgtaaatgtccttgtcctccctctccttgatcggtgtgatgtaacatcccctctccacgtcatgacaaacattgcacagccggcaaaacatatcaccacattcatgcagcttcttcgggttatgcagataggttttgctgcatataacacatcgcctccacagtttgcaagtttggtgtccctgatggtaatcgaagcattgccggttatagaagaagcggtggcaatggggacactcaagcttcactccaacatctttcacacacggcactcccccaactttgttgcaataataacaccgggctctgcactcgtacgtatgtttgcttcccgtccaataaaaacactcgcagtccacgcaaaactttctcccccggttgaagaagctcacgtagttcttcagcccatcccagtgctttccctccaaaaatatcggtaccaccttctcccgggccatcgggcccttccacagcacgcgaatcgatttcttcggatccgcagatttctcaaatgccacaatcctgtactttcccggattcaaatcgtcctaaaattacttttatttttctcatcatttctccaaaactaacccaatgagcctgaaccatcaccaaatgctcaagtccatagccactttcattcctctgcactcccgaatttagcaaaagttcaaacgctgcctccctctgcctcgaaatattctttataaaacgttgaaaagcgaatcgatccatcatcagataattcttcgccaccaccagcgcatagaataagcaaaatttgtcattgttctctatcctcaattttttaatttttttattttgttttttttcttttattgattaaaatttatctatgcaacttaatccgctgtttctccttgaaaccaaaatcaaatttgtgcacatttcgcggtccctctccagctggcagcgctacacaggtaaccttcatctttattgattccgaaagcagaattgttcttttgtcctcctccccttcttctcctccgctctgccccaatttattgatttcctccatgacaacatccgcgttgttttgggggaagggtcggtacggcagccaaattgggtgtccaagtccagcagtcaatgccacgccaaacattttcactttgcgccccattgtctcctccgtcttcgatatggaattctttatcatcatatcgatcgcttctcgcagtgtttcatcggggcgctccacatccgggttgatcacaaattccgttatgtttttcgcattttgtagtttggtggtcaataagtttaaagggctccatcgggaaattatttctaaaacggattagctatttatatgttattgcttattaaacttacccaattgagcggaagtcccattttttggccattggcacggcggtgggttgggcagagttcacgcgtttaaaagacatttttaaaaaccaaaacgcgaaattgaagaagagtaatagaaaagagcagagagatttaaagaaaatagacggcagaaaaataatagtagattggaaataaaatgtagaaaaaatagagcggagtaaaataaattagagcgcaaagagagtttaatgaaatccaactatttagttgaatgatttacgatttgggccgggtgtacgaattgggggaaaggggaggggtctagtcacgtgactgtctgggtctaccttaatttagagggtcatcaatcattttagtagacaactgtcacattttattcaaaaactgcaaaaaaatcgtctggatattctttatttcgaaagtcgtcaatcattttttttgtgacagttgacccaaataatgcgcatattgtgaaatagttggtccaaaaactaaaagtcacgtgcacattacaaaataaagggtggaaattgcgaaataaggaaccaatcaatcattttttattgacagttttattcaaaacggtgcaaaaaaaatcgcctggcgaaattttttatgcataatttaatgccttatttcttgagtcatcaatcattttttttttgacagctttgaccatttattttaaatgggcaaaaaaaaagagtcatgcaaaaaaatatttcgcaatcgtcaaaacaaaaagaattacgaaattgttaggtaaaattcttttattatgaccttataacatgtacttaaattacattccaaatgcactactaaaaattcggtagttttcactcacaaacatttgaccttcacgcgggggaggggttggggagggggggtaaatatgtttataaatatttaaatttcctatattaattgcatatttaaaattgtttttaaatttataaatttttcacaagtttccttctatttgtcttttttttaattttaattatgcgtcattaacatgtaacgattaatgaccatcgcgcggggcgacggaacgggcggcgggagggagagatgggagggacgggggagagacgtaaaaatacacttaaaatatttaaatttgtcataa

SEQ ID NO: 7657 - DNA, 2480 bp, Heterodera glycines
tcgcccggtgggactcgaacccacgaccccagcaatccgtgccgtgctctaaccaactgagctacgggcgctacttttagaggttctctcaggtcctttatcccactttctaccacactccgttccttctggcatcacattccgcctccctcggaagaccggtccctcgggctctccttggcacttcaccgacggacttggactctccttggtccagtggtcccggcagtgtggaggggatccgcccaggagcgccatgtagaacataaaaggtaactcgcccggtgggactcgaacccacgaccccagcaatccgtgccgtgctctaaccaactgagctacgggcgctaattttagaggttctctcaggtcctttatccactttctcccatactccgttccttctggcatcacacttgctcttgtccatggcatactctaccccttggtagagtattatgttttcggtgagaaatgtcacttcctacaaattgtaatttaaaatgtcaccccctccccatgttttaaagcagcagcagatggtcaagctcggggcaagcacggagaagcagcagaagaggagggcagagaagcaggggggacagccacagcagaggaggagggcagaggagaagcagcagaagaaaaaaattgttaaatttgtattgaattctcatcaaaaaaaaacattaattttgaaaaatgaaaagaaaaataaatacttgggggggggtaacttttccattgcaaaaataatgaacagaaccaagaacccaacccactgtaccaacgcatatgttaaccaaattgaacaaaaaagaacctaaaatttatataatataagtttaccaagagccaattattagaggtgtaaaaaagtcttggtctcgcgtctcgaaagtctcaaataccgagaccgagaatgaaaacccgaggagactcgagaccgagaccaaaaaaaccagagacttttctcaagtcgagactcgagaccgagagtcttgaacagcaatattaattacattcacttatttaaccaatggagctgaccagagtcgtaaaaaacagatagcgttgtcagggcgactttaataatgttgttgttgcacagcacacggcaaagcacaacagcccaaagcaaacataaaacacaatgccgaagaaaaattatcgtttaatttcaaattaaaataggcgaggacaatcaatattgctgacgacagcataaactaactactactaacaaaatcacaaacaaaaatgacattaaatttaaacaacaaaatgccaaacatattttaaatcaacaatgatatcacatcctcgccctctaagaagcgatgtcctcagcgctttgggctcattttccatcggttttgcgtcctttcacttcgtcggtgctactcattgagcctttactttttcaaattcgtccacactttgacttttgcttcgacactgcaccggcgaacaaaactaacgtagcaacaattgaatttaaaaacaattcggaattttcggtcgggttttcctcattctttcctccttttacataacatgacgacgacgaaatgtgcggtcgattggacactttcaatttagttccagcttccgtgttcgttcgttgtgccggtggttgattagacaacttaaaatcattcggtttcttctcgccttctgaatttttcgaaaatcggcgcctttttcacaaaattttgatgttgtggcggattttgtggacagtcgaaatgcttcggtccaaagtaaattcaacaattgcgagatatatgcccagctttgttgcagttgtagcaaactatcggcttcgtccttggcattaggaaatttcgcggctgaaaagtcgttttctgcctaaaattcggccggcgctcatttccagactcggccgacttagtggccttttgcactacctctgctcgaactgcgagagcgacgaaactgtcgaagctcatgcctggacggagagctatttccaatccaaccgaaatttcctgatttcccatcgcacgaattaagtgctttatcgcaaaatcgctgacaaagctcggcggcaaacctgggtaagcgcgttcaacaatcccataaagtcgttccgcaaattcgtccaacgcttccgctcttcgcttcactccttcccacaattcattgaatgcctggatttcggtacaatcccattcgctcaaaatatcttccattccgcggcaaaattcgttgaaattttccgggcagtgtttcatggcggcgtcaaaagcacgctctgcttttccactgattttgctttccaacgctgaaatgcggcgactttccggcaattcttctgttgccgacgaaaattttttgaagaatttttgtattttgttcggtccttcgttccattcagctcagggagtcgttccattgtgagcacaaattccaacgtgccaacatgctgtccttgtttttgctgctgttccatacaa

SEQ ID NO: 7658 - DNA, 881 bp, Heterodera glycines
gggggggggtgatggaggagggcatggaagcagatgtgatgaagggggggtgacagatgagaatgggggcagatgttaaaaatgggagtgggggggggggcttttcatcatatgcttacagacattccatcaaactgacatttcgcctacacacccccaaattgacaaattgccaaaaaatttatttaaaacaaattacaaaaaatgtttttttttcttatgaaccccggggtctttaataatttcatctgttccccatttcatattcaaccatgcacaacagcgtccaattcttgtattggcacatccaacacgcctacagatgaagacgcggccaccagaccccggcaaattgggatggggagggcgggacttgtgtaggcatactctaccccttggtagagtattatgttttcggtgagaaatatcacttcctacaaattgtaatttaaaatgtcaccccctccccatgttttaaagcagcagcagatggtcaagctcggggcaagcacggagaagcagcagcagcagggtttggaggagcagcaacgggagaggggggtcgggaagcagcagcatgctcgccgtcgtcctcggctttttgttgtactgcttgaacttgttggcagtttttttgcggtttgctggtgtcggcccccactactcaccgtcaacatcatcagtgcttaactctgcccaaaaaatgattatataaaagttgaaagggattgccgacgagaaaggaaaatttttcaaacatacaaaactgtttggatttaattaccccaagttgggagcttttttctatatgcttaatgaatgtcgtggcgcaaatgccgattcgtatattataaaattattaaacaatgtatttgaaattt

SEQ ID NO: 7659 - DNA, 2612 bp, Heterodera glycines
  unsure (1)..(2612): unsure at all n locations
agaagactttatttttttcttacaattntgggaaaaaatcatgtgaaatcaaatgattggaaaatgcttatcagcagagtggttccgcaagccaaaaaagaattgccggaatgcggaattttcggtgccaaaaagtcggttacgtcactggcaaatacctataaattttaggacctaagtaaatttttctccgaaatttttgttccatccttttcaatgtttgggccattctctgttggaagcaaatgcacaaattggcgtttaattagccgaaaaatgttgtgtgttccccccccccccaaagtgcaggtgcccaaattaattttcgcgcacaattcctcccccccccgcccgaggggccacaattgtgccaattcaaatgccccggaaatccattacggtgtggagggaggggggggggaattggcaacggcacatgcccctggggggaggggaaaatttggaacaaattaattattatgaaaataaacaaacattttcttaaaaattagcattttagctttgctatttattttatgttttgtttcgggtcatttaaatgatttttgaatttattaattttatttttcattttttgtattcgttattttaattccttttaaaattttttgagtattttcactttttctagataaatttcggtgtttatccaattccccgctcacttaattgtaattaattttgtatatttatttgcaatttatttgttgcaatttccaaaatgacatgaaaagtgatgatgcaaaaagtgccgatgccgtcgctcggatggcatttcgaattccgtcgcctttcgccgtcgccgcgttgcaaaagtcgccgaagcaccagcaggtggactcctcgacggagctgaactcgtccagacagaccaacgcgcgttgcgtgtgtttgcattcagtgttgaaggcgacggacgacgaactgtcggaggagggagtggggccaccaacggacgaatcgaacatctgaaaagatcagggggagtgaatttcatcgagaatagaaaaggaaaaaagccgagatagagaaatgagaggggacgagacaccccaagaaaaagccgagacagagaaatgagaggggacgagacaccccaagaaaaagccgagacagagaaatgagagaagccgagacagagaaatgagagaagccgagacagagaaatgagacgaattcgaatttctcgactcgagaatctcgtacatcccttatcaaatttggcctaacaaaaagcattgtcccgccgaccaatgcttttcgcaattccttccgccgccgtttcgctttccccgtgccattcgatgctcacccgttcgtagcatcctctgatggtggcgtatgaaaggacgcccgaattgttcagcgtctgctgccatttgaagcaagcgccctgacattcgatggcacttttttcccgaattacccacgtgtccgagtcgcacatcgaatcgaacagacgcggctcgcgcacgcgccccgggggtccgcggctgcgcgtgaggaaattctggggacaaaaagcggaggagtaatgagaaggacggctaacaatggtgcggcttttcgaaattttttttccatttaattaatttgaaaggtttaaaacagagaaaagcggcaattaaggacaaagggacggtaattaccgttttcatgtgctaacataagtcaaaaggctagcaaatgagcaccaagaaccagaacctatcaagcatagttttagtatttatatttgtctttttcttttaaatattatttttaaacaataaattcaaaacattaatatacaaacatatttaaaaatgatttctgggattgcccacgggcggttaggggggcttatatacattaattaattagcttcaaagttcgagtttttgaagcctcaaaatacccccccccccggctaaactcacttctttcatattgtccgatgcgcaactgtagcagcgatctgaggtgaaaatccctttctttgcctttcccttaaaaagtttcactgacttttggccgggacaaactgtgcgaatgtcgcagaaagtgagaaaagtgcggagagaatgaaaatcataggaatattaagcgaatggaactgttccaagtgttgcgtttttgaaggacacatttcgtcgtcccccaaaaggcactttcagaagaagaaaattttagtgagaagagagataatgggatttggaacagccaaaattaaataataaattgcattttaacatttcccgattataaaatatgtagaccaaatatttttggagagaagaataaaaatggtatttaatgctctcattctgcgaattttttctggtcacgggcctatacatatttgtggtcttattaaatgaatattttatacctaaaacctttaaattttttaaatttcccctactgacgtaataaattaattatagaaattttgatgaattcggtccaaaaccgacacccccccccccgaccggcgggggaaaagtggttgctattctgaacaactgacaaaaaaaactgaagggaaggggggggggggggggggccgcctccttccccctgggggaaaacgggaaaaaaaaaataaaaag

SEQ ID NO: 7660 - DNA, 4537 bp, Heterodera glycines
cccccccccccgaccggcgggggaaaagtggttgctattctgaacaactgacaacaaaaaactgagggggaaggggggggggggtggtcgtctccatccactgggtaaacgggagaaaagagtaaaaggacagaggcgggagggaaggaacgattgatggagaaataagtgatgagaaagtggggcgggggaggggggccaaacactgcggcagctaacgcaagcaaaacggaggagatttgcacctcccccgcctttgtttaccatcgtatcagtccattcactctctcattccttagagccaagggaaagagtcgccggaggggaaagggacggaaagaaaacgaagggacgacgatcaatgtgttttgtgccttcggcggatcgccttccattgtatagaaagcgtctctgctgctcgattgtagaacttaagcgatacgaacgacggcaatactctccaaaaaattgataatgcatttatagaaattccatcaaacaccctttggtcgaaaattatagtcggtaatcatgtaaatttcggcaattgatcaattccacgggacggtcgttcgcggtcagcagacccgctcaaaaagcaaggcaattccctggccacctccgatgcacgcggagccaatggcatagcgagcattgcgacgcctaaacaaaatgggaaaaataagttgaaaaacacaaattattttgggcgaaaacggagaatttaaaaaataaataaaaaaaataataataaaggtgctatttacttgagctcgtgtgtcaaatgggccgtgattcgagcgccagacgcgccgagggggtggccaagcgcaatggcaccgccatgaacattcagacgatccgattccaagcccaattccttctgaaacgaattttaaaaccattgaaaagataaaatataaaaatttacaaatgttttaaagctaaatgtatgaaataagatgtatttttaatttgacctgaacggcgagcacttgcggagcaaaagcctcgttgacctgaaaatggtttataaaaatctattacaacttttctaccccctcaacctcgacaatgtccactttgtccaacgcaatgcccgtctttttgcatagtcctcggattgcctccaccggcccaatgcccataattgtggggtcacagccgaccgcgtgccaccccaacaaacgcaccaacgggtccaaatggtacttggacacactttcctcgtccgccacaacgacagcagccgcaccgtcgcaaacgccctaaaaaccgaaagattacgactttctatactaggcaccgaaggccactttactgaaaattacaataataatgaaaatatcaaataataaccgaccgacgcattgcccgcgttgacgaggccgtccttcttgaagacgggcttcagcttggccatttgctcggcggtgctttcccgcgggtgttcgtccacatcgaacagtttctcctcgccgcgtttgccctgcaatttgaccggcacaatttcggacttgaaatagccggcattgtttgctgaaatgaaaggacaaatattttaagcttcaaaagaatcggaaatatcaggcaaaatacgaatgagtttgaagaaattgacgtaagtcaaatgcttaccgagtctccagcggttttgcgaccgaatggcataagcgtcggcctcctctcgtgtcacattgtatttggcacccaaattctctgcagtgattcccatcggcatgttcgcgtgcgcgtcggtaagtccttgccaaagcacgtcttcgaactgaaatcgatattgaattgaaaaaacccttccccaaagctggacctcaatcttggcaccgagctgtgtgccgaagcgagcgccgcgcactgcgaacggcgcctgactcatcgactcagttccacccgccaaaacaacctaaaaacgaaaaacaaagtaacagcccacgtctccacaaaattttttgtttttattttgccaacctttgagtcacccgcgaggatttgctgaaaaacaaagcgaaaataacttttttccatttggtcgctcctacttggcctccctgcgcaatcgcctcgaagcccgagccgcaaagcctgttaacagtaacggcagggacatggacgggaacgccaactcggaggccgatgtgacgggccaaataagccgcgtccttcgacgattggatgacattgcctgaaggtaatagttaagccatagtcagctgatgttagagtaaaaaatggaaccgaaaataacgtgatcgatgtgctcagccgcgattgaggacgatttaagcgccgcagcggccgcaatttcgcccaaatcggtggctgtgtgatttttcagtgagccgccaaaggcaccgaaagcgcagcgctttgcactcacaatgaaaattccttgaatttgttgcaaaataaaaatttctcagttttgtggataaaaacctgctttagtggccatagcggcgattttttcaagttgcaaaagaaatttgtagtaattgaattacctaaatatttattgttttcacttaaaaataaagaaaaaatgagtaataattagggaagtaataataggtactaagtgcttgtttcgacagtgtgatatttcgaccaattctaaatccttgaattcgaacaaaaagtcgaaaattcaagcttttcgattttcgaattctcgatctaaaaatactctaaatgaaaattttttaaagcaatgatgactttcactttattttcgtgcacttgaacaaagtttgaaccaaaatatgaaatttcgaacatttgattttttggctttttgttcgaattagggttaggggttcggaattgaccaaaaatcaggccggattcgtactcagcgccccaaaggagccctagaaacatgtttttagaattttcagaaaagtttcaaaaaaaatttttggggaccagtaaaacatatgattgcctttgatttcgacagcaaatgaattccacaataattattgatttcgattatccaaaatccaataaaaggttttatgtacaatttaaattcctatctatcgaatacataataaataccaatttattatcttattatcgacagaagtgagtgaggtcattaaccagcagaggttgacgcgttacgcgataaataacgagatttggataagagcgccgatgctgcccccccccctgccccccccccctttttagaaaaaatttcaaaacatgctacagctagggatatgcggatttttaaccttagcattgtgaatatgaacatgagaggccaaaattgaaacggtgtgttcaagatagaagtttcaaccccaattaaaaactcgtttttcgttcgtacatattaggccgtacattcttaggggtggaactttcgcattttgcgccaaaaagcgaaatgcgaaacgccaaaaaatgcgaaaggcgaaatgcgaaacctaggcccatccctggttcacacgaccataaaaaaaagacacgaccataaaattttggcaactttaatgcaacataactttttcaagaagcatccaaattaaacattcttagtatcattcgatagccctaagcgtttagcatgcaaaatctcaaaaaaaaattttgggtttcaaaaaagttatggccaaaaatacttataaaaccggattttggttaaaaatcggcttaaatgtaaggaaaacagaaaagtaattaatagggctggcaaaaatatgcacatgcatatttttttcctggactgtgggaggcctgaaacgcacgaaaaccatgtttttagcttgttttgaagcttctaggatgactttccatatgcatattttgcatatttgtgcatatttcgcgatttatgtgcatatttgcatatttgtgcatattttggcatttcgtgcatattttatgtgcatattttggcgtttttccaaaaaacctctaatagatcggcccccaacagacaaattgacctttttgacctcaaaaaccggaaaattttccaaaaaaataatttttttagcaaaattttcacgaaaaatattaaataaataaattttctcaaaaaatggttaatttatgtcaaaaataagcaaaattttgcttttcaggttgattttcgctaaaatgagtaaattttaagctgtatcgtgtttttttctcctaaaatgctttttaataccacatttagccatttttgaagattttactttatgtttaacaaatttgaagaaattttgagaaattacaccctcaattggaaaattttatgtgcatatttcacgatttttggtgcatattttatgcgcatattttgcgattttatgtgcatatttttgcaaaccctagttattaatgcttaaataaaaactcctaaaccgaatttttagaccaaatgcgaaaaattgaattttcggcgctatactaaaagtgggcctttttgaaacaaaaggggggacccttttgttttgcaaaatttttttaagataaaaaaccatgataattttttatcccggggttttaaaggtcgcta

SEQ ID NO: 7661 - DNA, 1936 bp, Heterodera glycines
atttgatttgatttgattctctcattttatggaaaacaaaataaaggtgctaattaccgcgcactgtacgcttttttagtataaaaatgcccttgtttcttcttttccccctcattccataactctcaatcgccgccccattttttccggtcattttgttcctgcaaatgtcttcaacaggaattctgtacgtttatatgtacatattttccttttttctgatttttatcttttgctcaatttttgacaagcagaattgggagataaaaatttgtaaacaaattttgaaagtttagcttaatcgtcctaaaaaagttcaagaaatgctaaaaaaaattccctttggattccctcattttgatgcttttcccttcccttcccattcattcattcattttccaattcattttcagttggtgtgccgtgacttttgtgttggtcggttgtgccaccattctttggttcttttttgaccatttcaaaaaacgatggcgccctcacaaaaaagaaatgttaaataaattaaacagaaaattttgaaaaatttccaatttttcagctttatctgcagcgattgttggcttttggtgttcgattttcttgcgccttctcagcttggcctcgaaattgcactgattagccgccgctttgacatttacgtggatgaacacttcaagacgcgcaaatggacgttgggcgaaattcgaatttgctacaaaattgaagaaaatggcaccaagcaaatgcatattcacgatgccgatgcaaatccattgccaatcccgcaaaatccgttgccgaacaaaatcatcggattccgaggcattaagatcgtgtaagaaaccgatcatccagattgttttgatttaggacactgactaacattttcagctacatcgatcaaaatgtcgtcgcatttctccgccgttttcaccgttttttctccatttgttcaacggaattgggcattatcacgtgcaatgatcacattttggaatttgttttgctcaacatttggccaatgctgcacgactccattcgtgcgatgtattttaacaccatcacttttcgttgtttgcgtcaattggccccggcactgctcagcgattctccatcacttcgctttgtctctttcaatgatgccattctccctgttcttccgcctgatgaaagtgccaatgcgacggatggccaagcggtggcaaaatggctgttcacgccccattcggatggtatgcccaagtggttcagctgctctgttaattcacttgatcaatggtcttcgacactggaacagttcaaaacggtggatcattcccccctatttaattgggttttttgtcccttttttaggcattttccaatgcttcttcttcagttacttttcgcattaactttctgctgtcttctccgattgactctgcagttgtgccatttgatctgatcaacgaagtgactgtggagaaattgacactgcaacaagaagacgaagatgtttggctcacgcgttgtccaattggatgggatgagatgaaatggggaaatgtgcaggatgaattattgaatgacgatccactgaatgcaattctatttttgatcagagaggacagattcgacgacgggtgaacgattttaaaaattcaaattgaattgattttaatgatgcaaaaatgcggttaataaacattgaacagtatatgatagatacaaaaaaaacaaaataattaggatgttagttggttgactcataaaatgccattggccccataaaaattgaatgctcttaaagtgtaattaaatcatcatcgttttttcaggcttctcgacgcagcttcccaagggccgagtgatcactgatcaacagcagaaatgaatgaattaattattaattgatgcgattatgatgacccaaatgatatgttggcactgtgccatt

SEQ ID NO: 7662 - DNA, 1931 bp, Heterodera glycines
caactgctggccaagctttgaccaaatggttacacactccgagcaaagatggacaaccgaagcgattgcatcgcaataatttgttggtccacagaatctcgaatcggtcaacaacttcaaagaggtgtgtttggtcagattctcataaaatttggctaatacttataaatggtattccctttttcgaaaaatattttaaatgagtcaatatttcaaagagatggccactttttcattaaacgactgactaattggttgatttttttggtattttaggcaacattttcaaacttattttttctttataaatcttcaaaatatgtaaaaaaaaatgaaaatgtgtacaaaaatatttgccgaaattttggattttttttgcggatttccaaaaatttccttaaaaaatactcaaaatatgtaaaaaaatgaaaatatatatgaaaaaaatccaaaatatgtacaaatatgtaagaaaatcccgaaatatgtaaaaatatttaaataaaagtcccaacttttgttcacaaacacaaaaaagaaagtgcttttcctactattaaaagcatggagaatccaggaaaaaatatgtatttacacaaaattggcagccctatttatgggtatataaagaggccaaaaagactttttgaatgcataatatcacaaaatgaatcgacggtaagaaaaattttttaattacaaattttcatttacccatacatttttaacgcatttcagttggatttgtggcgacgtttggatggacattctcccatcgtttgaccatgcccaacttggcctcaaaatggcattgctttccgaccgtttcgatgttttggtggacgcgcatttcgacagaaaaagcgaattgacaatttggaaagcaatcgaaattcgcaaggacaaaggacgaaatgcaaacgaaaatggaccaacaccgaaatttgttgtacggatcggtgacaatgacatttctttggaagaattgcctattggaccgtggggtgacaatgttatgaagtttccggttgtacttgtccatggcaattttgtgcaattttcgatgccgaatcgtccgttgcacaacaaaattcgttttcattacctttatatcgagtaatttgaaccttttgatataccacttacctattaaagcattttaatatttcttcagctacattgactactctgtgctcgcatttctccgttccaacaagccaatttgggacagaatgggcaccaaattgacattgtggccatacagaaccgagaaagatcagtcaatttgggatgtttttgttcgcgaaatttggccaatttttgcgccaaacattcgtcatttgggctttcacgatggcgattatttggacaaattgcgtagtcacacttcaccaacaattctcactgatcttgatcaattgaatgcaattgattccggttttctattcccagaaggaattgctgattttgatgtgctgaatccaactgctgcccaagcgttgaccaaatggttgcacactccgagcaaaaatggtcaaccgaagaatttgtattactttaattctccacggaatctcggatgggtcaacagcttcaaagaggtcgtctcgccagaattttcattaatttgtttttgttttaccaatttttgtgtttaggcattccgtcgtgccaccacttctatcagttacaaaattcgatttaatttatatttggaaccaatgccaattgaaccatttgaattggtgaacaaacggacgaaagaaaagctgacacctgacgaaggagatcgacgaattcgacgtaaatgtgtgtaattggctgttgaacggtgcccattggggagacggcgacggtgccagcaattaaatggaaagacagcgtaaatccgagtgccaatttgaaaaatgtcatttttgatctggggagtt

SEQ ID NO: 7663 - DNA, 1511 bp, Heterodera glycines
  unsure (1)..(1511): unsure at all n locations
aatgggtcaacaacttcanagaggtgtctcgccatgttntcgtcaaattgtttttttaccaatttttgtgtntagaaatttctccgtgccaccacttcagtcagttacaaaattaaacttttcatttatatgacgccaacaatgccaactgaacaatttgaattggtgaatggacggaccaatgagaagctgacactgaaacagagcaaggaatgcaatttggttatttggctgttgcaacggtacccaattggggagacgtcgacggcgccagttaaatgggaagacagcgtaaatccgagtgccaatttgaacagtatcagatttgatctgtggagtttcgataaatccattgggtgagcagcagcaatagcatttgaattttatcgaaaaataaaatatttaattaattttaggccattgtcgccaccaacggaagaagaaaaagcggatcaaatcaatgaaaatgtcgtctgattaagtgtacggaaatgaataattgaataattctatttgagaaatgatcgatctcaatttgttgtgcttattttctctcagaaatgcttttttaattgtttcgttccaattatataaaaatatgcttttttgttgagcaatttattaataattagggtttgtaatcgagaccggataagagggtcggtcgaacggtttcggttaaaaaaccgaaccgaaaaaaaccgaagaaaaattttcggtttcggtttttttgaatttttttatcttttcccaaaaaaaaacaataaaccatttttatcaatagaaaaagcgaaagatcacctctgagtaaaattgtagagctattgaaactctattgaatggtgtactacagggatggagttccgaggcactaaaaattttcggaagtcggaagtcgggattccgaggccccaaaaattttcggaagtcggaatttttcaaaaaaaatatataataaattttttaaaaaatatttaataggctaaatttttaaatttttaaccatgtaaaaggtaatttcaaactgtttttagtttatttctatattttttaaaaagatcaaaatattttaagtaattttacattattttggattttttttttgggaaagttacacccttttttgcaacagccaattacacacatttacgtcgaattcgtcgatctccttcgtcagtgtcagcttttctttcgtccgtttgtcatgtttgggtctcggttttaaagtctcgggattttatagaggcaagaaaagaacaaataccaagcattcataaaaaaattacaatgagaaaacacgaaattcaactttgttttccgagtgtatttgcgaattattttttccaatagccttaggtaaaaattaaaaaaaaacaattcttagactttaagcttatcaattggtaccactaaattctcacttgaaaaagaagcaaataaatttacataaattttgtatattcgaatgaaaaaaaaaaataaaaaattgctatttctgctcaccaaataca

SEQ ID NO: 7664 - DNA, 1488 bp, Heterodera glycines
cattgcatcgaattgcttgcatacaaatcaaaaatgacttcaagaagtgccaaaagaagtttgaagaaaagtgatggcttgtccggaaaagagtccgtctcaaaagcacagcaaattgagcaattttttggcattgacgaggcaaaatgtgaaactgccgaggtaagaaattatcagcaaaaagtgagaattttgaaaatttcaaattttcgactttgttcgaattcgtgctttttttatggtcgtgtgaactgcaatagagccaaaaattgcccgaccgacatcggaattatccgtaaattacattcacactttgccattttcagcgaacgtcgaagtcgccgagtgccaagcgaagccgaagctcaacaaacacggcagtgcaattgctgaaaaagatggcgaagcacaaaaaggaattgaacagcagcaaagaaacgcgacgagaagaggacgagagggaaatggagaacattccggacacattggacgaactgaacagtcgggggacggaggacgaaaggggcaaagggtgcgaactttggcaaagtgccgaaaaagacaaattaaaattagacaaagcaaaaaatgacagaataaacacaaccaactttaggtgttctagaaaagtttcatttctcttcaaattctgcctttattttcggcagccaaaatccgaacttttacattcaaaaaatgcatttgtgctaccaatcccggaaaatgccacttgaatttggggattacaaattcatttttctgaattgtcagaatggatttctgctcttcatcgaccattctgttctttaagaactgaaagtgtgcagacggtgaacgaattggacgaattgctcgactcggagacggccaaacgcattcaatcggaaagcgaagtgaccatccgattttgctgtccgctgctcgccaatgtcggctccgttgggcaatgtctgtgttttgttttactttttcccattttattttttgtttttctttgtcagtgttttccatcgacgacttttcccccctcaaaactctctcgtcgtcttccaatctttccgtccctccctttctctgtccgttcgttttccttttcctctctcgccctcactcgcgccttcgctgcactctcttcgaccgctttcgccaaagggccgtcgccgccggcggagcgatcgccgtcccttacgacacttttgtgttcgccgtttgctacgcatttcaggcattttttggccaaaaagatggccatttgtcaattttattcttatttaggtctctcccattgctttgcatttttccgatgtgtcttcggacgtttcatttgagcagcaattggacaaattcgctgctcttttcgtctcctcaaaagttcgatgtgcccagcggaggcggtgccttttctatgcgaatgttagcaaaactttattttttgctaacgtcccaggggggggggggggggggacatcatcctattcaatttttcag

SEQ ID NO: 7665 - DNA, 3113 bp, Heterodera glycines
aaaaaaaaggtcgtcgcccgaggggaggtaccccaccccaagctgaaatcctgggaccgtccctgtaacgtccctttccctttttcagactgaacttttgctgaatgtatggcactttctccgctttgaccatttgtcggatttgcaagtcgtcgccctttgccgcgctttggcccgcctttttttggacatcggcgcccgcgaatttcgtgcccaactcagtcacgcatttcaaatggtaaccaaagagagaggcggacggaccgttaatattaggcgccatcaactaagcaccaaaatacaaaactgtccagctgaatgctctttttgccgaattggcattggtccgtaattttggatttttaaaattttatgataaataaacttatgatgtaaatttaaaacatttttggtcattaaacttatccaagtttaattccccccatcgagggggaggggttgtctaaatttttagattccttagttttttcatccatcccccccccctcagattttccgccattttacatccgttcatcgtcgctctgtcctctcccattttctcacttcttccttcttttcttccgccgaccattccgtccacgcggccttcgtcctttcccaaatgttcagccaattcgaccaaagccttcgtttgttggccatccaaagtgttctcaaatcgatcattttggagaatgatgcaaaagagcgctcaaaggtgggaatagggaaggaaagtgtgcaatgattaaatgccatggcaaaaaaggcaaacggagtcaaaaaattctgacgaaaatactgaaaatataaaaatgtttgggttcttgtcgatatgaaaagcgcaaaattgaacaaatgggaagcataagtccaaaaaagtccaaattacttcattttttgttgggttttttgcgtcaaaattttgtcgtacatttaaaaataaaattgattcgcaaaatgttgcttaaaatagcacagtttcaccaaattaatagtattttaaactgtcttttcagctccctccgtcgattccctcctccatcactttgggcgatgcgttcgatggtttgtccgaggccatttcggtggtgcgccgccgttgggcgactgaggacgaactcacaacggaccatctatcggtaacttcattttaatgacctagtaattttagtctaaattctaaaatcgagacttacaattagtgaacacctcgataatctgtaaaaatttccccagtgtcacatgcattggtcattccctgggccactttttgtcggccaaatgccatccaattaattgtactgtttgttgtccctcatttcagtcctcctcctccctcactgtgttgtatttgttgtgcaaccgttggttggattctctcacggcggacgagcgactgctcatcgaccgcagcgaaagtgaagcgtcgctggaaaaggcgctgcaaaacattcgacaggcaaacgaacaattggtcagtggtggcgaatagcaattggtcatcaccaaatgagcaatgcattcaaacaaattgtcagcaatttttattggtacctaataatcaaatcgatggacattcaattggagacgattttcagtactttcaattgaatttttcgtaaaatcatgctatgtaaatcatagaactataaggccttccaatttttttcgggaactttaattcattttttgtccgttttcccggctttaacgatgctttcaactctcaacagaatcggcggaacatcaacgataaaatgatccacacgtgggcccagtccgaacatcgcatccgcgccgcattgctccgtcgacagaagggccaactgcggatgagtcaagcggtgggaaacacagcgaaaagcaaagagagcagtagcagcaaaaggcaaacttttgttggatcatcctcagaagacgacggagattaaaaaatttattttcatttgatttcaatttgttagaaaatcgttttcacccatcacaatcactcccagactgaattctaattctgatttcgttttcacaattctcattaacttgatcacttaatattttcctgctccaatttaaccgtgctttgctattatattccgaaaaaagtatttattggttttgaagtcaaagaataaagataccgaacgaaaatcagcgacacagactgtcgaaaataagaaacatttcgtaaatttggtcgaataatatagggagggaagaaatcatcaaaaaaacgcacactcacagatgaacacaaaaaacagcaatttgagcaaaaaaaatcataagggtttaagtaaggggagagaagaggaggaggaagtgagaatcggaagagaaagaaaaaagaggataggaggacggagagaccgtaattgagaagcgattttagagatatgagcacttttaacaggcaaaactgtgaaatttgaatggaattttgactcgaaaaatgattttgggtttttgtaaaaaaataagcgaaatagcgattctgaagaggaggagagattggaagaatgacattgaaacagaatgagaaagaaaataagaagagatgcagcaaccggagaaaaaatgtaagagaaagagggggaggaagagggagtttgaatgatcagacaaagaacgacatgacaagagaggagagaaatgatcagggggaggcgagagtgatttgggaaagcacaaacagaatcacatgcacacaaaacaaagaccaaatgggatgaaaaaaacaatgataattagataagagagagacaacagcaaagagccaaagcaacgaaagaatggggggggagagaagtgacacaaaaatagcacaactgacaacgagtgatgggatgagaaagagagaggaagggagagagcgcacacaaagtcaacccaaaacacagagagagtttaacagtgggaacgagagaaaacaacaaaacattgcgttaactaaataattgacagggatttcgacgctttaaatgggggggggggagagacaacgaacggcgagcgggaaaagtggcaaattttgagttaattcagacgcattgtcaaagcaaaaagtgaattctaaggaagttaaaataaaataaaaaatgaaaagaatg

SEQ ID NO: 7666 - DNA, 1495 bp, Heterodera glycines
  unsure (1)..(1495): unsure at all n locations
ggaccggcgttccgagcgacgcttttctataaaaatcttttacgaacggctaacatctcgctagctccttcaccaatcggggttaaccgaatccaaattcagtgacaactccattaaaaatcacacgaaaacgtagctctcgaaaagtcgtgaatgtataaaatagtaatgtagtaaaaatgattatttcattagcgaaagtcgtgaaaaataatagatggtcaagagtaatattctggggatctgacatgcttaatttaccgttttcagaaagttggacaaacctatttgacttttagctttcttttggttgagtaagcagatagcgtttcagttgtaaatttgacgtgatttacgtgggaatgttagaatttatgttacttaattatgcattttcttttgtgaccgcgttccggcgacgctttctataaaaatcttttagaatgctaacattcgcagctacttaccaatgggttaactgaatccaaattcagtgacaactcattaaaaatcacatgaaaacgtagctttgaaaagtcgtgaatgtataaaatagtaatgtagtaaaaattgattatttcattagcgaaagtcgtaaaaaataatagatggtcaagagtaatattctggggatctgacatgcttaatttaccgttttcagaaagttggacaaacctatttgacttttagctttcttttggttgagtaagcagatagcgtttcagttgtaaatttgacgtgatttacgtgggaatgttagaatttatgttacttaattatgcattttcttttgtgaccgcgttccggcgacgctttctataaaaatcttttagaatgctaacattcacagctacttaccaatgggttaactgaatccaaattcagtgacaactcattaaaaatcacatgaaaacgtagctttgaaaagtcgtgaatgtataaaatagtaatgtagtaaaaattgattatttcattagcgaaagtcgtaaaaaataatagatggtcaagagtaatattctggggatctgacatgcttaatttaccgttttcagaaagttggacaaacctatttgacttttagctttcttttggttgagtaagcagatagcgtttcagttgtaaatttgacgtgatttacgtgggaatgttagaatttatgttacttaattatgcatttttcttttgtgaccgcgttccggcgacgctttctataaaaatcttttagaatgctaacattcgcagctacttaccaatgggttaactgaatccaaattcagtgacaactcattaaaaatcacatgaaaacgtagctttgaaaagtcgtgaatgtataaaatagtaatgtagtaaaaattgattatttcattagcgaaagttgtaaaaaataatagatggtcaagagtaatanttctggggatctgacatgcttaatttaccgttttcagaaagttggacaaacctatttgacttttagctttcttttggttgagtaagc

SEQ ID NO: 7667 - DNA, 1582 bp, Heterodera glycines
ttagaatttatgttacttaattatgcattttcttttgtgaccacgttcctgcaacgctttctataaaaatcttttataatgctaacattcgcagctacttaccaatggggttaactgaatccaaattcagtgacaactcattaaaaatcacatgaaaacgtagctttgaaaagtcgtgaatgtataaaatagtaatgtagtaaaaattgattatttcattagcgaaagtcgtaaaaaataatagatggtcaagagtaatattctggggatctgacatgcttaatttaccgttttcagaaagttggacaaacctatttgacttttagctttcttttggttgagtaagcagatagcgttcagttgtaaatttgacgtgatttacgtgggaatgttagaatttatgttacttaattatgcattttcttttgtgatcaagagtaatattctggggatcggacacgcttaatttaccgttttcagaaagttgcacaaacctatttgacttttagctttcttttggttgagtaagcagatagcgtttcagttgtaaatttgacgtgatttacgtgggaatgttagaatttatgttacttaattatgcattttcttttgtgaccgcgttccggcgacgctttctataaaaatcttttagaatgctaacattcgcagctacttaccaatgggttaactgaatccaaattcagtgacaactcattaaaaatcacatgaaaacgtagctttgaaaagtcgtgaatgtataaaatagtaatgtagtaaaaattgattatttcattagcgaaagtcgtaaaaaataatagatggtcaagagtaatattctggggatctgacatgcttaatttaccgttttcagaaagttggacaaacctatttgacttttagctttcttttggttgagtaagcagatagcgtttcagttgtaaatttgacgtgatttacgtgggaatgttagaatttatgttacttaattatgcattttcttttgtgaccgcgttccggcgacgctttctataaaaatcttttagaatgctaacattcgcagctacttaccaatgggttaactgaatccaaattcagtgacaactcattaaaaatcacatgaaaacgtagctttgaaaagtcgtgaatgtataaaatagtaatgtagtaaaaattgattatttcattagcgaaagtcgtaaaaaataatagatggtcaagagtaatattctggggatctgacatgcttaatttaccgttttcagaaagttggacaaacctatttgacttttagctttcttttggttgagtaagcagatagcgtttcagttgtaaatttgacgtgatttacgtgggaatcttagaatttatgttacttaattatgcattttcttttgtgaccgcgttccggcgacgctttctataaaaatcttttagaatgctaacattcgcagctacttaccaatgggttaactgaatccaaattcagtgacaactcattaaaaatcacatgaaaacgtagctttgaaaagtcgtgaatgtataaaaggggaatgtagtaaaaattgattatttcattagcgaa

SEQ ID NO: 7668 - DNA, 4029 bp, Heterodera glycines
  unsure (1)..(4029): unsure at all n locations
gcccgccgggcccgggctttttcaaaatttgtgggattttgattaataaaataaaaaatggtagtcttatatttcagcttgtgattaggccaagccaagaacatttttgccattcacaatgctttttttttttttgcggtgcgctattcaaacagttttgaggaatgcgatttgttaacggattttgccgaaaaataaccaaatttggcacttttttactttagacaccccgaaaaatactgaaaattttattaaagtgctcataattttgtgattttaagccaatttcttaagagaaattttatagatttttacatacattttaatcaattttatcaaaaattgctatttatgcgaaatttttatttaggtggatttgtgatctttttaatgcaaatttttaaaaaatcccgaagttctaacttcaaaattttgagctaaagacatttcgccaaataattattagatttttcaaaatttgtggcagtttcactggtgaaatttaaacccgttttagcccggtcaaaaaaggtccattttaccgggcggcccggtcccggtggtttgtcaaaaaaaacgggaccgggacaaggccgcccggtaaaagcccgccggacacccggacccgttcggactctagttaatataatcttcaaattatgttcggtgtaaattttgaagtgagtaccgaaatttttcaaaattccaggttcttgatttttgacgaaattattagtttttttttgtggtttcgcttaaaatatgattcaaataaagtgagcagaaaattattatatattatcattattatttttgataataatttctattaatattattaaggtccgctggatttcgcaaaatgatttctatggtaagcaatcaatactgttcggcaaaacattttcaaaccccctttaattaaagttaatcaggcccaaaaattatttttttccaaatttatgttgaatattacatacagtatgcgacattccggattttggtcatattcggaagtctttaagtttaataaaatattgaaaataaaaaataatagtcttaagtagtaattaaattaattttttttttattaggtgttgggtttgacagtatggaaagtgatctggacaaaaacaatgtgtgccaattccaaacaacatttccattacatgattatctcaacaaaattaatcgggatttggaagttgagcaaaaatgtaagatttgtgaaaattaaaaaaaatattttataacgaaatttatataagtgtatttatatttctataaaaaatggttatttattctgtttttgtttgacctaacgtaaatccatttttaattgattattaaaatacctcctaacttaattatttatatacacaattttcggcaattaaattcgattaatttccaaatttattgaaaactgaaatgaaaatcttaataataaaattataattatctttatcttttgcacaaagtcaaacagttttttaataaactctttcttttaaaaacaattttattaaattaaataaatatcaaaaaaaataattaaataaattcatatgtaataataataataataattattattttttagttaaatcagagcgccagcttaaacgttttattaactttgccaaaacaaggagttctccaccaataaattctgatgtgcatccaatttccaaaatttcaatttcgatgaaaaattttccaattggcccgtatgaattattcgattttcagaacaagtcggaaagtgtaatgattgaaggtaaaaatatataatgtttcgtgtcccgacatttgcgcctttgtccaaaatcgggttcaaaataaagtttttttcaatccctgatcgcataaacagctttaaataagcgattgaaagtgattgtatccgatcatttgatcttcaaaaatttttaaaaaaatagtaaaatttttcaaacaacaaattattgaacataatgaaccaaaagaccgtgttttcttaattttattgctaattaggcgctatcagagtttgaaaaaactcaactttgagtccgattttggacataggcgcaaatgtcggggctgcaaatgtcggggctcctaatgtttagatgaaaaaatgtttttattctcatttgcaaaaatggaaaaaaaattctccgagatttttgaaaaagagccttggataaaaaagaatatatgctgtttctccattttatctgcatgaaaacgccgcccataaataataattccaacatttttatttaaatcgaattcaaaaaattaatataaaaaataaataaaataaatatattttcagctgtgcaacaagacgcaaatgaaactgatcaatcatcgggcattgcaaatatgattgagataattgatcctttgaaatgcagcgagctttgtggggttgccgatgaactttttattgaaaaagatgaacatcaaagctttcgtgtaagtaacaaatgtcacattggcgcgggtacttttggcgacttaaaatttaaagtgtcattaccaattgattagggtaattaaatttcatttaattatttgttcgatttgatggaataagtgttttctttcgcctggaaaatttaaaaagtttaattaagaaatttaaaaaaacattcattttagcgggggagtacgaaaaagaattaaatgaaagtaaaattaattcgaaatttaatattaaaattagctatatataattaaaactcattttgcacgataaaaaataatgataaaatgctttaaaatttaaaaataaaaaaacattataatttattaactagcggggtgtgtgcatgcgagggtggcgcttgggaaagcgctgcgcgcttcttgagcttcgctacctaggcgcgttttagtctgttagggtctttgcgtcagccgacatgcacttggtttcctccaataattggagttgacacatcgcataatgcaatggaaaccggaagtgccctaacgttgcacatcatggccctcctccctcccttagtccaggcgttggcacgttattgggttgagcgctaaatggcaattcacctgtaggccctaaagagggctgaccggtccatgtcccggatccaagcttctcaccattttcgcacccaacatagtgcagatgggaatgggattggcatctctccaaaaaccatgtgcccaactgctctggactaagccatttattgtaacttgagcatattagtagctacaatattcagcactttggctcggccttgggcatcaatttcccggttgggagcatgaacacggacattgtttccgtctgttgcccgagagaaggccgtatacaattgaccgtgggaaaatacttccctttccagatcaatgccgacagtgcggattgtttggccctgacctttttgaatggtcatagcgaatgcaggctttattgggaactgcaaacgctcatattttatgccgccaggcgatttgtcttcatagacatttcgtgttctttcaagaaagaatctcacttggccgccaatagcattgctattgataacacgaccaatgaggcgatcatcgccaagttcttccagaactatgcgtgtgccattgatcagtccttccttatcacttttattgataagaaggacgacgacgcatccgactttaagccggagactgtgcgggggcatgcccgagtctgtgcgccggttcaacgcagccacttcggactcgatctcatcgatgtccagtgggcggtcgtcaaggggcttatccgtggacaagtattcccgcacttgacctggcacattcgccatcatgatctcgttgacttcgtcgcacgtgtcaatggtgcggagcgagaatcaaacgattgagcagctccttgtcattgccaaggagttgttggaagttaggatagacatagtctatcagctcttccttgctcttaacgaggaactgcggaggaaatcagaagtgcttctccggttttctcgagccngatttngcgcacatttgcaagtacgcttgctg

SEQ ID NO: 7669 - DNA, 3456 bp, Heterodera glycines
ggaaaaaaattcctagcatatggtgaaacaggcacaaaatgctttaaaaattacctaaattggcttagaatcattttattatttttaaaattatttttgatatctcattttttgaaaaaaaaaaatagattttttagggataccttttcaaaaaaatttttaaatttttcacaaaaaattttctataatcggtcgaacggtttcggttaaaaaccgaaaaaaaccgaaatcaaaaaaaccgaagaaaaattttcggcttatttcgattttttttttgaatttgtttatttttttcccaaaaaagcaataaactatttctattaatagaaaaaacgaaaaatctcctccgagtaaaattgtagggctattgcaacctctattgaacggtgtactataggttgtgagaatgatttaaaaaggcagccaaaaaacatgtgtttgctccttgattctaaaaaccccaagattagttttggcgaactggtgcctttttggcgttttttccgaaaaattccattaaaaattcaagaaatcgggaaaataaacccctaagaaatgctctaaaaaaattttagaaaatataccattaagaattgaaaaattttctcaaaaattgttcgccaaaatttcatttttttttcttgataaaaattttaggtttataaacttccttattgaaaaacattataaaatattaatattcatttaaatgatcaaaattccggcggtgccgataggcgccgccgtgggaaaattttaagaatttttaatgaattttgttaaaaaatggccaactgatttttcataaaagtcggttgattgtttcggtttttcataaaagtcggtcgattgtttcggttttttgattatttcggtcaaacggtttcggttaaaaaccgaaaaaaaccgaaaaactcaaaaatttctcggtcggtttttttcggtcaaaaaccgaaaatcgaaaaataccgaaaaaaccgaaaaaaaaccgaccggtccgatctctactataaattctcaaaaatcctcaaaatatgcaaaaaaaaaaatgaaaatatttacgaaaaagtccaaaatatgcataaaaatatgtacatatcagggatgggccaaattgaaaataaaaagcgaaatgcgaaaagcgaaatttgcgaaactgaaaaatgcgaaatgaaaaaaaagcgaaatgcgaaaagctaaaatatgcgaaagcgaaattttttctacaactttttaatagttaaaatcataaagcaaaaatcatttttaaaaattttattccaaatttaaaaatcaataaaacgcttttttgaggcgcgctttttccaaaaaaactttcgggaaaatttttcaaaatttgattaaaatttgttgacagattttcactaaaaaatgatcaaattttgtgatttttatcattttctaatgagaaataagagttttggggcgccgctgagaatagtttttcatcaaattaccaaattttgcgattttgagccattttctaagaaaaaataggagttttggggcgcggcggtgccgataggcgccgccggggaaaaaattggaaattttgatcatttataaacaggttttcactgaaaattagccaatttatatgtaaaattttgaaaaattttatgggaatttaatccaattcttaggggtgtaaaagtcgcgtttcgcgccaaaaagcgaaatgcgaaacgccaaaaaatgcgaataatgcgaaaggcgaaatgcgaaaagcgaaacctaggcacatccctggtacatatgtgggtggctggacatttcgacaatgaccgtttcgccaatttaaatataataaaatgaatataaaaaataataaattaattaaaaaaatatattgatgaaatttaaagagaaaaatttaattaggtagttatattttttaaatttaatgaatgcattatctatcgcctattatgtatgattattaatagtgaagaaagaagacaaaatgagacggacctataaccagtttttaggcgtttttgagggtgctaataacggatcttaactcgggtttgcccaattccgaactccggacccgaattcgaacaaaaaaaattgagtttttttaatcaagaatagttttttcagggtaaaagcttctaattcattatcaactatttaggtgtaaaacaatgtttcaatttttaattaaataaaaaataagcaatttgcgccgaaaattgacaaactaaagccattctcataatgctattttgaaaaaaaacgaaaaaaaaacttttttatattgatcccaaatccgcaccgtccatgtaattttgcagaaatttgaattttatttaaaaaatatatttaattttattgtcgaaacggtcattggcgaaaagtccgggagcccatatgtaatatgtagaaaaatccgaaaatatgtaaaaaaaagtccaacttttgtttgcaaacacaaaaaaaaagtgttttcctactaattaggctatggagaatccaggaaaaaatatgtatttacataaaaaaacaatgtctattaaaaaaaattttgtttttctctgtttgtgttgcttttggcactgtaccaccaaaagggagggaggaatcagaacgggccaactccgtcccgccaactccgtcccagccaagttttgagcggcataactttttatattgttgcccgaatgcaacaatcttgatatcattcgaatgctcttcaccggctctattagcctacaaataattacagataatatcgaactgtaaaaaaaaaagatagaaataaaaacttagaaaattttgcctttttttgcggttttcttgtgagaatgcttaaagttgtggggggggggggaaatacgtcatgcacaatttgcaaaatgtgtgctgatgaaaatgctcttttgctgtgtcccgtccggttgaaaatgccttttctaattacaaaattggatccccccccccttttttttgtttaattattattattttacataaaattggactggacacacaaattgggcccccctcccctcctcccccttttttttgttcccggaccgggtcgattgggcgccgaccagttggcaagcccgtagccaggaaaaattttcggggggggggggaaagggaggggtccggtccgaagacctttttttttttttttttttgcaaatttatccaataattttttttccctgctgggtaacaactggactttttcactaaaaatgaccaaattttggccgttttaaggcaaaaaacttgtaaaaatagtggaaaatgtaggtccggcggtgccgataggcgccgccggaaaaaatttttggaaatttgagtgctatttgttacgaaaattgtctataaaatttttaaattttcgtttgggggggggaattcgaaaaaattttccattatttgctggaaaatttttaaaaattttcatttcggggg

SEQ ID NO: 7670 - DNA, 1766 bp, Heterodera glycines
gcagtgttatttttaaagaaaatattcattattttttttatttttttcctttgactctaatttcatcactaatttttcacttcagacccccgttcttaccagtgcttgtttttcccggttcccggttgccctaccgggaccgggacctgagcttttcaaaattcgggaaccgggaccgggacctcggatgaccgggaattcccggcccggtcccggtcccgtggcactctaatttagacctattgaatgatattaaattcattcagttcggtcaactatgaaaggagttgtgcctcaaaaagcagggtgacgcccaactggtcggcgcccaactggtcggcgcccaactggtcggcgcccaatcgaccccacccccccctttttttgttccttccgtttcgtcattcccccccccccccctctgtgtcaagaatttcatttttttaaatttattggaaacaaaataattaaattttcaaaaatttcttgggcaaggcgctgatttaaaaagagaggtactgactgatgtgaatgtgtatcgaaagttagcatttttttcatttttatttttttcattttatcggcaatttaaatttaagcgcaaaggccctaataaaaaagagggtataaatttaatttttaatgaaaaatgatttttagggttttggttttttgattcttacatatttctcatttgaagaattttttaaattaatgtctcatcatttaaaaaaaatatgatgcaatttttagtgaaattttcactcttaaaaatagtcgatccatttaatgaaagaattaattttaaaaaaaatattgaattcaaattttaattaaatataataattcaaaattggatatttattattttaaagttttattttttaatatgtatgtaataagtaattttttttattattataataattttttcaaatacatatttatgttttcatttaacttttaaaatgattaaatttatttatttttcattgtttttcaacacttattttaataaataaatatttaattactttttttcaaatttatttatttccttctcctcccccattttcctctttttgctcccttcgcaacgcttttgctcgtccattggaaaaagtcatttcctttcaaatgcttttttgccatcgccaatttcgcgcacttaatcccttaattttgaagcttcaaagctcaaatttgatctttgacgcaattaatccccaattttttgcacttttttttggctcggccaaaatttgtgaggggccaaaaccgagagacaaacaaaaaaaaatgtccaggacaaaacactcgagattcgagaaagtttatgctcgaattaatgtgcgtctgtcacttttcaaaattccgagcccttagttttcgaaaattttccccggagactaagccgtgctgtttttccgggaaattccggaatttcgaagggaaaatggcaactttgccccccccccccgtcctcctgaatttttgtgtttgtctgaaaatctgatcggccgtctgttgatcgagaatcaggagccctatgggcccttttttcttaaaaatcaatgcatgtgagcttaaaaaacaggacacttagaattgttgctgatgctgcatcgagaattttgacctggaaaacggcccggcgacttttttttaatccaaagcccgagtcaccgacaaaaaaatcccggctttttgcccccccccagggggggctattttttgagttcgggaaactgttgggtggtggaggg

SEQ ID NO: 7671 - DNA, 4298 bp, Heterodera glycines
acacatttaaaaggacgaaagtttggggaaaacaacagactccctcaaaataaacactaaaagtaacattatgacaaatcgaatcaattcaatattcaattgaaaattgaaaatcggaaaaaattagcacaaacttagagatttatttgatcaatcacacaattcacaaaagtatttaatttgcgaaacatacttataaaaaaggcattgaataattaaaggaaaaaatttcatgccaattatgaaatcattttccgtttgatatgcaatgaatgccaaatttgtctggcaatgccatcggcaccctcccccctccctccccatcccttttcctccccctctcatcatccatcatctccgttctctctttataatccatcatttcccccactcactcattcgctgtcattcgttcggcatttctccccccccgccccaaatgaaatgcttcttcaaattggcctcctccccattttgtcctatgcttttcattattttcattatttggttgtagtaccacttccgtgccccatatttcgtccgcttcttctccgatgcggaagccttcgctgaaatgcgccgatgtgccttctcccacccaaagccgcgcttccgccgacggcacttacggccatccgtcaacgctgcgccaattgccgccggcaccgcccacacaaatgcggcgcaagtcgcttctgaaatgctcgctggcaccgccaagtacttccgtgccgcctgctgccgtcgctgcgcccccgaaacagtcgcagtcgccgcgcatgcgacgctttgcggaacgactggcagtcattcaaatttcgctggacccgcccagtccgcccgaatttgcgctgcaatcgccgcccgacgaaccgccgccgtctttccatcccttttggctgtctccggcctacgaaagtcacttccggcccattgaagattcgctgttgcttcaggtggtaatgatgccgtcatttgactttggaaaggcgcgtttgccgccccacaggtgccaaaagtgaacgattgcgaagatgcccccgacccttttcgccaatgttcgccgccgccccgtcgctgctcattcgcgtcaacgctcagcgaatcgtcgtccatctccctcaacacttcctaccaatcgcttctcttttcgccttccggcattgatcagacgccacacctcgcccagcgatgtccgtacggacactcgcggcgacggtcgaggtaattaaacggagggaagaccctaattgagccaatttaaacggctgatcgataattaattcggggtccggacaatctgtcagtgataatccctcagtggtcaatccgtcagtgaaggacaatccgtcagtaatggacaatccgtcagtggacaatccgtcactgtataatccgtcagtggacaattcatcagcaaatttttcttgaataatgatcaaaatcttgcgaaaatgattgataaatttaataaatataattttttatatattcttaaacatttctagttactttatatttcaattaatttaccatcttgagaaattaccatttaattctttaaaaaatgatcatttcataattgtttttaaataacacaaatcattaattcagatttttagcaacttaaattaattttcacattatttaaataaatctgggtgttttaaaaataaatttgcttatggattagttactgacgggattgtccactgacggattttccacttactgacggattattcactgatggaatgaccactgacggattgtccgggagccaattaattccaataccaaggtcaagcactcaatgttccgaaggggaggcggacactccgccgttgccgacgaatgaagcggaatttgtatatgggatgacgcggaacagcggcggaggcgacgcggcggggggcggcagcgtttgtaggcatcggatgggttcgcaatcacgcccgaggcgatcgcacagcaccgtggtaaataaaacaaaaacaaacagagcatgagagtgaacaaacagattttaattggcattggcaaagtgcaacacattcgaagggtcattaacgtaatgataggctaattaccgtaattcggctttgtggtcaattagcagtcgattggtcatttacaaaacgttcaaccgtatttgatatcactgcactattctcattgtgttatgacattacagctgctctctccccatttgtgcatccttccaaattgttttgtttgcccaccccccgggggatggctctgtttatcccccctccctctttttttttgcttttccgcctccgttggtcaaacccatggccaaatttactacccggaaaaaacaaggtgaacaaataaataataaatgaatattgcgccttgtttggccttcatagcaatggaaaataagaaaattttgtccgtaacaaaaagaaattgcgccgaaatgtgcgaattccgtcccatccatcggaggcggggattagtttttcacctcacatcgtagcagaacaaaacagagcacagagcagtctctccccccccccccccccattcattcgtcgttcgttcgtccgtccatttggactttcgcccgacttttgcgttggttggcggggcaatgaatgaatgcaatgattgatcggtcggtgtttgggcgcaccgccccattaaataatgtacggaaagcaaagcaaaataaaattacaaatttccttttctttgtttggccctgaccattttcccacttttttttcttccttcggccaaaaaatgcgaatgatttcgttgaaaatgccacttttacgtcacctctctttcatttgctccgtttttgccattctgcataaattgacggattttttgattggtcggagaggcggcgccactttttgccatttcaaataaatgtccgctaaaagactcttcgcaaatccccaaaaaatgatgtcccctggccaatgccaatactttccatttgccaaaatcccctgcagcgaaatgtcacttttttttataaaaacgccccagggaattgggagggaaaagcttaaaaatttatagaattttaacccatcacaccaaaaaatgagcctttcttttcctttcttaatatccatgccaaaatcccttctctgccgggcacaaaaacaaccaaaagggaggacaacgaagtgccatttaatgagagcgtttttctgaaaatccccggggaaaattaaacgaaatgaaaacaattacatggttttgagtgcttagtcccaattataataagctcatttttgttggattagtccatgaaatggccttttattttctcttttcccccggcattttcggcccatcggctgtaaaaatcaaagacataaaaccgtaataattttaaataattttaaataaattatcagcggcagaaaaagggccattggaattgataatgtcccaataaaagggaacttttctttgggaagttgcagcagattaattggctttttgaccaaattaacgggcggaaaaagcatgtgacacgacaattgcagcagaacgacgccccattttaatgcattttccaaaatgattttttatttccgacgaattcatttgaattcatttccctacccccagggcaggccaaatgatgaacacaatcattcgatattaaagaggaaaatcaaatgaaaaagcaaataaaaaattcaaaagcatttatttccccgttttattttattttgcacattctctgctgaatttaagttccaatgattaattaattgacaattaaatccaaaaggtgtgacaaaagccccccccccattcattcccatggacattaattaattgggcaccacaatgaatgccatttgaacgataaacggacggacgaatgaatggcattggcatcgacgcgtgccaataaataaatcgcccgccgcagaacaatggtttgtctgccgattgtgagaaaggctttcttccgtcgctgctcctccggcttgcaaccataacaacgcgcatttgcccaattttggtccattaatcgttttaattttaacccattcgtccgtcggcttttaagcctttcctccatttccatcctttttgggaatgccccaaatggaattaacccacgcaatggcgccccgacttcaccgattgattccctcatcctcctccgatcgccaagttgggcccgtgcccgtaacacaaccaccacaaatggccattttgccctccggtgttccgtccgcttctccccaccccgtctttctgtgtaggaaaatgaaaccaccgctaacatc

SEQ ID NO: 7672 - DNA, 1015 bp, Heterodera glycines
gtattttgccaatgcttttccctttgctctctgttttcaactgtcttcatctttttgcccccatcctaaatcactgcttcctttttccgtcggtcgatcgatcgcccccctccgatcattcccctgctgtgaatcccttttcgatcacttcccccaacactcacatccatcccaacaaaatgatttatggccacggcgaaacgaaaagaaaggaatgaaagaggaaaagcaaaatccgttcgaaagcaaaaagagcccaaagagagaaaaaggggggggagaagagaatatgagaaattttctgttcatgtgacttttattctcggaaagggaaacttttttttagaagcaaaagaatttgttgtatcattaaagttaattatcccattttaattacctcactttttgcctttcccttcccttttttgccaaaatgcaacaagattcattgataataagctattcattccagctggctctttttctctttaagcacaatgcgtaattgctaattatgcacggcttctccccccccccgcccctctgcgcctctgtcctcctctctggcctttttattcaattgatttccatttctctacattgtccaactcttcctatctcatctctctccctcccctctttcttttcttttctctcctctctctctctctcctctcattactttttcagttctctctcacttcctcccctcctttccttctcttctctcttccaaccctttgttcttttcattttgtctatgcttttttgctctttttgccttcggcaaaatttttccgttaagtcattggcacattaaatggctgtgccctgaagaacctaaagaaaatacgaaaattcgaccatgggaatttgttcggtttaattgcgaattttacatttttaaatggtcatttaggaaaggaaaacagattgataagcaaacagcagaaattattacggggatatgtttgtctgagaattggattttacacgcaaaataaattaattttca

SEQ ID NO: 7673 - DNA, 1884 bp, Heterodera glycines
  unsure (1)..(1884): unsure at all n locations
gatcatttgctatacaatgaaatcatcattctcatagaattcgccgaattcggtagaaanaataatcgtttatggcgaataaggcaaaaaaaaaaaaggtttttatgaccatttggtaaacaataaaatatcattattatagaattcgccgaatttggtagaaaaaaccattttatggcgcagaagaaccaaaaaatcgtttttatgatcatttgctatacaatgaaatcatcattatcgtagaataaataaaaatttatggagaaaaagagccaaaaaacatttttatgatcatttgctatcaaaagttcttataaacacttataaaataattgaaaaaaatatcgattttataattaaaatttattttattattattttattaatcgtcatcttttagaatacatttattacaatgtttttttgagtaactgagaaatttcagcttatttttcactttttcgcattcaacccccatttaaattgactattaataaattaaaaaaattgtgacatagttcaccagttccttttttaagtggcatttacaaaagaatattattataattcattttttggcattttttggattatgcattaatttacgatcttttttttttttttacaaccatttattcaataatttcgtgcttttatttcatttctagcaacgtattgcgcgctaattacataataattatgttgccttggtttactttcattatttcatttttattggctttataaatccataattatgtattcttatgatttttttttagcctttgtacataacaaattgtgaccattataaagttatttttattgcgcattaataacttcattcatttattgccttttttgttgcgcattttcactttgttttcatggctttacatatatttcaataatcatagtaatttaacctttcattcaggcctttgaaccaccaaatttatttataatcgcggtcactaaccattcggccacgaataacccaacccgttattgcattaatttcatataaaaggttttattttctcctaacaaaaaaaataaaagggaaaaagccaatatttgttccattcatgttgacctttttcaaaaatttaacaaatttcaagtgaccaaaaaatgcgcatacatattcgtaatacaaaaaaaaatgccaaacaaggtaaaattttaacaaatttcaaccgactcttcaatttaaaatcgaattgaaaaaatatgcgcatacattttgtaatacaaaaataaacaatgaaacaatgaaattgcgaattaataaaaaaatgtattgatcatatttattggtccatttcacgatgacttttttcaaaaaatataacaaatttcttgtcgactcctattataaaatcaaattgccagaaatgtgtgcgtacatattcgtaatgcaaaaaatgccaaacaatgaaacaacaataaatgaattttaaattaaagaaattgcgaattaatcaattagttttgggatgaccattttttcaagaaaatgttaacaaatttcaaccgactcattcatttaaaatagaaatgctaaaaaaatgtgcgcatacatattgtaatacaaaaaaacataatgccaaacaaaaaacaacaataaatgaatttttaaattatttaaaagataatttttaattactgtaatcagaaaaaatgatatgatataaaatatttgtgaaataaacttattaagcaatgttttaaaaaaacaaaataatgatttaaaaaatacaaaattgtttgataatatgaataataaatattttttgacatatttaaattagagaaaaaattacagaaattcttcgcacaaatttatagcagcaatctccctcccccctactccccccgggg

SEQ ID NO: 7674 - DNA, 2949 bp, Heterodera glycines
ccttatacatattggacaacgctttcgacgtcggaaccattgctttgcacatttgaagtgaagccaatggtcacaaggtgtaactgtacagttcatcgatgcttgcacaaaaacaccttggcatattgcacatttgtcccccctaagttccgaatccacttcaagtctcggcaaatgactttgaatgacatcaaggggatacccttctccaagttcaaatagaggggtagggggaggctcgtactccacgtttgaagtggacttaagcgcagaaaaaatgtgttacaaaataagaaataaaaataaaaaacttataatggatggtaacgaaaattaaacatttatttcagttttttaaacaaatcctaaatttttttccatttaaaaaaattattcaaaaaattccattaatatttttaaaatataacatttttaaaaaatttgaaaccatccattataaatattaaaatttttttaattatttacaaccggctcatctccccctgttgtcgttcgtcctcgactttgtcctctccccccacggcgcgtagtgttgcgcttaaaaatatcgaaaaacattttttttcagtgaaatgcaaagtttcacacacttgtgttgttcgccgcgtggcacttgctgaggcactgctgggacctggtgcaccatcaccaccactggccgcactcgtagcggggtgcgcatcctttttttggaaattattattattattattattattattatataattgaatttacaatatcctcataaataaaaatttcgtctgccattggctgggggttgagttgataattttgtgcgttttgcagctgatggtaaacgggctgttgttgttgttgttgactttgaagccaagcagtgatttgttgttgttgttgttgttggtgttgcacagctacttcttgttgctgctgctgcgtaggatggtgttgcactgttcccggttgtatttgttgcggctgctgttgttgttgttgttgttgttgattggtcgaatccaatgcaaaggcttggtgtagttgttgatgataaaattgccatggcggaatggtttgcgccccccatggcccaaattcagcatgttgttgatgttgtggttgttgctgctcatagtagttgtgatcatgcagatgaactaactgacttgctgcaacaggcaaaggatggggcaacggtacaggcaaagtatggggcggcggtacaggcaaaggatggggcagcggtacaggcaaaggatggcgcggtggtacaggcaaaggataaggcggcggttctgccagatactgagaagggtattgaggccattgcatcagcattggccgggttggcaaagggattgggggacgccaagacggcctttggtgccgcgaaaaacggctctgagggtaatagggacgaaattttgggcgatccgaccaataccaaggcatttggccgaatttacccaaaagaaaaataaggaatttttggtttgagcgtccaatttaacaagaaaaaagccatcaatcactacctctttttttggtgaaaaagggccttacatttgccgaaaaaatgttccaaaaagccaacaaataagcctggattggcctgctaatggagggagagggcaaaaattcacgtgaatgcaatcgttagcaaaaatgattattaatcgttatgctaacgataaacaatttttttttggggaggggggggggataagcaccaaatgatgaagctgaaaaatcaacaaaacgaaaaacccaaaaaaagcaactttggagaagctgaagaagagaaaatgcaacaatggcgtgatcagtgactgagggaaaagtgcgagagaaaaaaaaagcatcaaaggcagtggacgagaagcagcaaaggcaatggatgagaagcagcaaaggcaatggacgagaagcacctggggcggcaggcagcaaaggcaggtgaaagaggaagtaacaaaaggtaacgaaagaggaagaagcaggggggggggcagctagagtgggaagcagcaaaggtggctggggcagctgagaaggacagagcaaaggcagaagacaaaaggcagctgagagaggagaagcaaaggcagctagctaagagatgattagcaaaaagggaggagggcttggccaaaagcagctaagaggggaagaagaaaggggggggcagctgagaaggacagagcaaacgcaggagacaaaaggcagctgagagaggaggagcaaaagcagctaagagataaagtgcaaaaagggaggagggcttggccaaaagcagctaagaggggaagaagaacgggagccgcaaaagaagcagagggggggggggatgaagaggaaaaaaagggaggagggtggggagagcagctaagaggggaagaagcaagtagagagagtgcagagaaaatatacaaaaggaaaattgaggacattttacaccttttctctgcacggttttacaacacatcataaattaggtgtctacggatggcacagaacaccgggttgcaggccaacaggtttgcgggcgtccggcacgcccaccccattacaggctttggacaacgcctaaaccttttggattggccggtaaaagtcgattgacttgatcggccaaaaaatcgataatttatgtatgaatattatctactccgatgcgcccagatttatggggagaccgaatccttcgggagtagcttccctatagcctgtactttaattctgcgttggatttttgctccccataaatgtttgagtaccccaaacggacacttgaaaaaatcgatttttttgtttcataaatatttttttcagaaagtgctctaaagcgcaccaaattttatttacaacttaagtttagcactctgatgctttagtatcaaaaaggaagatggagaaaaaattttttaaaaaatttttccattatatttt

SEQ ID NO: 7675 - DNA, 1595 bp, Heterodera glycines
  unsure (1)..(1595): unsure at all n locations
ccaaggcaatgcagtagttgagcgatcttttaggacctttcaatatacttgcgaaatatatttcaagtgaagaaccagattttgatgaatttcttgaatgtgccaatttctgctataacacatcaattcactcttccacaaaggagacccccttctttttggtctttgggcgagacccgatattttgcattgagcaaattctgaatcccaacaccgaacccgaaaacaccagtgaagttgacaatgtcaagcagaaattagttaagtctcttagaaaagcttgggaatccgctgcggcggtcattaaagaagctcagttacggtcaaaagtacaatatgacaagttagtacgaaatcaaaccgttcaaataggagatagggtcctattacgcaattacgcaggtaaagtcaaaacatccaagaaatttcaattaccctggaagggactttatcttgtcattgagattaatggtgtccttatcacaatcgtcagctgcacatctcctcaaacaaacccaagaattgtacacattaatcaaattaaaaagtattttgagtactcaggacccccttgcaccacgaaaaatcttcaaaaagatgaagaacaagcactaaaggaattagaatcaagagaacagaccaatgtacctggctattctcatgattcctatcaaaatatctctgataacacagtattaatagaaaacgcacctgcactcacccctaatccctcaccctcttcacagtccaataatcaggtaaaagaaaaagaactaaatagaaatctttgctcaaaacataatctccgtgaaaatcccaggaaaaagaagcattttggtaacttttctgaggactaatcacctgggatagccaaattcaatcatttttcttttcttttaatcatactgtattttaagtatgtggaccggtctcgagaagtcgtttcagcttgaaaatgccaacagaaattggacaggctttcgtaatttttaaatttgttagacaataagtcccgcgggactgtttattgcttatctctcttttatcagttctgaggaactcatcaatcattatctaataaatattataatcatactctcgaaactgatcacttatctcagtcctgtgtcagctcagatactatttttatggttaaaaaaaaaagtgaacatatttttctaattaatcggttcttttactaagcacaaatgtcatacgctgcggcgttcgctaattttgatctgggagatatgaagaagatttcgctaactgatggccattgcctaatggcatttcaaggatcgaacgatccatttagtaacttcttcttttcgccgttcgtttatgagggggaaagatactcctgtgttgagcaggcgtttgtcatgaagaaagttcgcacattcgaactccatggcgtggcggcggagttaatgcgatttatccacaaggacgacccaacaccaaacctccccgcggtggccagacggtcacccgcgtgaatttaaatggttcggacgcgaagccgaagagagagccactccccgcacannaagaaaatggtcggaaacaacacaagaagtttcatcgccttc

SEQ ID NO: 7676 - DNA, 2628 bp, Heterodera glycines
  unsure (1)..(2628): unsure at all n locations
taaatagaaatctttgcttaaaacataatctccgtgaaaatcccaggaaaaagaagcattttggtaacttttctgaggactaatcacctgggatagccaaattcaatcatttttcttttcttttaatcatactgtattttaagtatgtggaccggtctcgagaagtcgtttcagcttgaaaatgccaacagaatttggacaggctttcgtaatttttaaatttgttaaacaataagtcccgcgggactgtttattgcttatctctcttttatcagttctgaggaactcatcaatcattatctaataaatattataatcatactcttgaaactgatcacttatctcagtcctgtgtcagctcagatactatttttatggttaaaaaaaaagtgaacatatttttctaattaatcgtttcttttactaagcacaaatgtcatacgctgcggcgttcgttaattttgatctgggagatatgaagaagatttcgctaactgatggccattgcctaatggcatttcaaggatcgaacgatccatttagtaacttcttcttttcgccgttcgtttatgagggggaaagatactcctgtgtggagcaggcgtttgtcatgaagaaagttcgcacattcgaactccatggcgtggcggcggagttaatgcgatttatccacaaggacgacccaacaccaaactccccgcggtggccagacggtcacccgcgtgaattaaaatggttcggacgcgaagccgaagagagagccactcccgccacaaaaagaaaatggtcggaaaacacacaaagaagtttcatcgccttccttgtggagcagaagtttcgccaaaatcggcacttggcagctcttttgctggcaacaaacgacatgtggattgcggaagcgtgtaaagatcgaaagtgggccgttggatactacaaagacgacccattcctgtgcaactacacaccagaaaatggcgcatttgggcgaaattggatgggcaatatcctcatgagcttgaggatgcgaatgctaaatgagcaacaaagtgttgctggtccttctaggcaaattggtaaatgggaggactcaatagcttataattaagaaaactctgaggagttaatataattttgaaactttggtctttatcttatctcttgtcacagaaccaccgtctgctcctgtctatctcatagcacaagagcttgccaatggactgataggagctaaaattgattttgacaacagctttccgcactttgttctgctcccaaatcgtttattgtcaagtggtcttggtctgggtgacttctttactcctggtaaattggaagccgacaacagatttaccatcctggcttcaaacgtcacggagatgacaaaggagaggaaactttggattaatccaaattcctcaattttggcggtccaagcgaccgtaattgacatcaaaagtaaatatctaagtctaagattctgaaaatttatatatattttaccatagaaatgtggcaatctgaacaaatcactgagattggcacaattgtcgaaatcaatgaacgctttacacccaccgaggtcattccaaaatatgtgatgactacttcgggatcagcgtcttgcccaacaaaggtcatacgacgtcaagcaaattttccgcttgaacacttcagaagagatcatcaagtcaatgttgttctcaaatgtgttcaactttcctccggaattaaaattcacccttcctttattttgcccggaaattcacctttccgatggcaccctgacatcattcgtcccaatggttcatttgttatttctcgcatttatatttgatattttaaaataagctctgcggagctactctacatatatattcacacaaatttgtctaagctctgcggagctgattaaattaaataaacacaaaaaacaaaaacacaacaagtgagaaatgataattaaagggaaaagttcaatacataaatttaaaaaaaaaaaaataataataatattaaaataaaataaatgaatggagtattggtatatgaatcccgtgggatttaagtttttggatcagggacgatccttagatatgaaggggaggtatagtcatacagtcacaccgggctatatcaaaaatctaaattttagtagattggaaataaaataaaataattattaaatttatataattttaaaagttaaaaatttcgtcagattttctcttggcttataatttgaaaagcaatgccaatttaattcaaatccaatgaatcagaatttcaaaaaaaaaattaattaaaaaaaaaaaaaaaacgcggatttattttggttcattggcagagcttctgtggattggttgaaggaatgagttcattcccatcgaggctcggcattttccatttttattttgagtaactaaacaaatatttaaattattttattttattttcagttttggcttaaaatcaaaacaaatttctcatcgtaaaacaaatgaaaagaaagaaaaagtctgaggacttcattcaaatttggaaattatttaaattttaacgaccagggacggtcttttggagggccggaggtgtaaggccgggaccggaaatgncctttacccttccccc

SEQ ID NO: 7677 - DNA, 1222 bp, Heterodera glycines
atgctgcgcggagcattccaacttccctttgctgcgtgaagacaatccgcgtgcttttagcgaccggtaaatctaaaagtgccaacaagttcccacggcgtgaccagaaaatgcgtcagtcgaaaagtcaaaattttagaaattagagtattttcttactaataaggttaaaacccggaaacatactgaaagccatcaatccttcaataaggaatcttttatatcagttcggccccacggttcggccccagcatgcttttccactataacttttttctatatcatccaaatccaatattgttggtatgatttaaagctcatcacatgctttattagccttacaaaaagcgaaaagattttcaagcatggaaaaaattttattaagaaaaaacttcaagatttcaactttttcgcaattttcatgtataacttttttgataattgtctaatcgcgaagcaataatatcttagtaaaagcttctaaacatgtcaagcgttcgagtgatatcaaaaatattggatttgaatgacaaggaaaaaagttatagaaagttatagtggaaaaacatgctggggccgaaccgtgggggccgaactgacgtagaccgtatattctcagggctcgtaagtgttcttttttctaagatttgtccttttttggagggccggatcttagaaagctaaaatgtccttttttctaagattgtcctttattttgaggcgtcaccaaactttttaaattttttgtgcttaatgatttatttcgctgataaaaattgtaccaaaattcctaattttaaaaaatttttcctggcggcgcctatcggcaccgccggacccccccccccccccccacccacccacgtcctctaagtttttataaaaacccccccgcaaaaaagagcatatggggtgaaatgaaaaatatggcggcggaaaaaaaatattcaattctttttacgctaattaaatgttcagacgaaaataaattttgatcttacttgccgataaatgtattaaatgttcatttccaatcaaactattggatatgatcggtggatgtgtaagtactttgaatgacacttttgaaaatattatttttcaatataaaagcgttgtaattgtgcaagtgcgtttattttaaaccaataatgctttttaactgattctacatggaaaaatgtcatttttcaaaaaatcttatttttggggtcaaaatctt

SEQ ID NO: 7678 - DNA, 2443 bp, Heterodera glycines
  unsure (1)..(2443): unsure at all n locations
tggagcctaacaacagccgaaaaaacatgtttttcgtgcgtttcagaccatagagagctcagaaagtgggcccaagttgtgagtatcttttaatctttccgtcacaccgaaataaaatcattttcataagtgaattttgtccctttctcttttctgggttacgtttcatttgccttttttgtattttttattttgatcagccataactcgcttcattcccaactaaagtgaacaaatttggtatctaaaataagaatttgaaaagagaaatctttttctaagcgaatgctaagcaatttaagccatatgaaaaaagttgtgagagtttcaaatttttatcacgttataactcaagtcctaaactgctgatttcaaccaaaatgcgaaaactaatcattttctattgattctaagtgttcaaagtgattttgtagcctataaaccaaaattgttagaattagcgaatttgatgtttttcatgtgttagagacattaaaatagtacgccaaaatgagaggaaaagaaatgcaaaattttcatcattccttaactttaaaataggatagaaaattattataactttatagaacattctatgcagaatttttttctctatcgatatgcaaaatttaaagaaaatctgtaaggcgaaaaaaaagttgtatagagcgaagtaaatgttgttttttacataattaaaccgaggagatagtacgccaaagtgagagaaattacaaagaaaaagacgagatagtactaggcttttctctgctcagtggcgctgcccgtcatttcgtcccgcgtcgtttcgtcccgcgtcgtttcgtcccccaagccaaaattagtcgtttcgtccccaaattaaattctatttttaaaaggcattacattccgagttattagtgcctattttggcagtttttagagactaaaatccggtccataattaatgaattaataaaatactttattaattgagcaaataacataacataattgaaaaaacatagatcaaacaaattctaaggggcattcatcgaatcttccgtattttcatagtccttcaattttcctgcatatccttcgacctgcagaccaagagccgtcataacatcgtgaatttcggcatcattgtcgtatgtggcgtccgctaaaattcacatgatgactgcgtcttgcagaacgtagcgtttgtgcacgaagtttcgagccgatcttgttgcgtcaacttgtttgtcgatgcttcagttgacttcagaaatgaaatcggaaagggctgggtgatgacaaagacccttctaaaattgagtttttttgtgttttgttagtaaaaaaaatactgagaaatgaagatgggttgcttcgaggccattgttggtcctagcgagggcagaagccgcatgcgagtggaccggtagttttgaaacttctcctaatgtaataaacaaaaaccaaatagggattgatgggtgttgctatttctgtggaaaatcgtcttcggattatatgttggcatgctcttcatcaataccaatcgatgaatgcccattagaacaacaatattgcaagcgaaagtttgagcaaaatatcgattttaattggctttcggggttttaaacaattttcaagttacacaagtcgaacccagcatgcgttgttttgcatatactgctttcatgagcttgattaatgaagagaagaatgagggaattgaatggattagagacgaactgaagaagtactgtcggcttgtgccattttttagtgctgactgctattatttggtagcggatacaatgctggctgctattgtgagtaaaatctttgttatgttgaaattttagtaaatagggcgagaaactttcacttgataaacttaaaccgactgtcatctgtcaacaatatggtttgtgtagcgaagaacaaggtaactccacagccaaattgttacaagcaagcctgggcccactgtcggcaccgcgttctaattgcaaatacggtcttatgtcgtgattgccaaggtcaccaagctagccttgtaaaatatgcccaagcgccaaaaggattaattatattagatatttttaataaaaaaagttgaattttaagtggagatgcaattactgtagaacggcagggggtgccgaaatatccagccgaatgtctgttcggatcggttcgttctttgacgggacacatttatcgcttanacaagtgcttcgtgtgacttattggtggctcaacatcccaacagcaatatggaaactgtgatgcgagaaaatgaatatctngtggctcggacggcaaaggggggcttagccatggacaattgtatgtggctctttcgagagcaagagcttggaataggttgagaatagattagatgatggcaattagagagaaggtgaagatgtcgtgtacagagagttattagataacagtg

SEQ ID NO: 7679 - DNA, 2489 bp, Heterodera glycines
  unsure (1)..(2489): unsure at all n locations
ctgactttggatatgagtaattcgagtattagtcgagatcaagnngctggcaagaattgaaagacacagattgttttatttgtgatgaagcgcctatgataaataagcgcgcaatgagaactttggatgagaaattgaaagagataatgaataatggaattgcatttggtggcaaagtcatgctttggacgggagactttcgtcaaacccttccaattcagaaacatgccacgagagctgagatggtcaatgcaactataaagagaagtgagtattggagattagctaaaagatacagattgacaaagaatatgagagctcttgcaacagagcaagaatttgcgaaagatttgttagagattggaagtggaaaatggaataatgagaatgatgagataattttgccagagatttgtataagcattggtgatttagcagaagagatttttggaaattgtattgtttctgagaattggaatgaaatggccaaaagtgccattttagcaccgaagaatgttgatgttagtgaaataaataatagagttttggaaatgttgcctggagaagaagttgtgtacacgagtatagacttggctcaagacgagaatagacaaagagcagatgaatatttggatgagtatttgaatgctttaaacccttcggggtttccacggcataagttgagacttaagaagaatgctattgttttgttaatgcggaatttgaatatcgaaatgggcctttgtaatggtgcgagaatgaacgttgagcaaatgcaaccgaatttgattgtgtgtaagattttgactggagacaaggcaggtcagactgtgtacattcctcggatcacgctttgctgttctgaagagtacccttttgatttgcatagtcaccaattcccgttggtgttagcttttgcaatgacaattaataaggcccaaggtcaaacccttgagcaagttggaattgatctgaggaaagatgtgtttagccatggacaattgtatgtggctctttcgagagcaagagcttggaataagttgagaattagattagatgatggcaatttagagagaaaggtgaagaatgtcgtgtacagagagttattagataacagtgattagataatgtgttagactagcattggatttagatttagtatagtattagaattgattttgtatagacaaatctgttgttctttgggttgctcaagacagtacgaacacaattcaaagtaagtcattctttttaatttcatactttatcctttctccaaaaataattgttcataacacattcgtactacctagcgggggatgcgccgaaggcgctgaccccgctagttttcttaaaaaattcatctcaaaaatttgtattgattttcttgacaatttaaaacaacttttttggcagtttttagcaactataaattatccctattcatcacttatataaatgagtacagaaatagattttccacgaggaggaacctcaaaagttttacaactcggattgcataataggtaatgaattggatctttcaacaaataattccttaattatgcaattttagaaaaggagcgaagagaatttctccttttagcagcgcaacagctaaggtccgttggcgtcgccattcacaaattttcatagctttagaaaaaaacgaagattgagggagatgacatcgttccttatgctggggtttttcgccaaaaattcacacgtgaaatcctcacacaaaatttgcgtggattggccatcattaaatttgtaactaataaatctcattttcttgtattgttttgttttttttttttttgctatttaggtcggtgaagttgagcttactcttgaatgtgccgaaggaattctcttaaaattgcctgctactcagatcagcagaattttttcgaagaatttggcgaataccgaggcaacattggacgagctgttcaccatgggccaagcattggcttttcgccctcttggaacaaaagaacggggtcggagggagttgcacattcgaagaggagcgatttgttaaaatatgcaaaatttaggcagaaaatcggtgccgactgtcactgtctgtccaaacgaggtcaacagtcatttgattccttctttgctaattgccaattccgtcttaaatggagccgttattagcactgaagagaaaggtgcgaaaaaatttgtgcctacatttagttttatttgttgtttttttaggtgccgtaatcgatttgggcttttcaacaagttctgtcaatgggttcgttcatagcgatgatctcccgccccatctctcactggacaaattacatgttggccaagtggcacttttccgagtgaaagagaagccgactccgttcacccgtgtgatcaaacttttcggctttaccgaaatgggctggctcatcggcgaaaaaggccaagatgttttagaattcacagcttttgattcccggttcaatccgttgaag

SEQ ID NO: 7680 - DNA, 256 bp, Heterodera glycines
ttgtgggggggctgagggcccccgtacgaggccgcgaagcggccgagccctccccaactgttcaacatcccaaggcacacaaaaagttaaaaatgctaaagaaatttgctgaggttgagtcccggtgattggaatgttggtgggttgagtcccagtgattgaaatgcagaagaattgagtcccagtgattgaatgctggagggttgagtcctgttgattggaatgttggtggattgagtccccagtgattgaaatg

SEQ ID NO: 7681 - DNA, 636 bp, Heterodera glycines
tttcatgcgcacgtttcttcagcgatgtcgtaagtgtttgaactttgatattttcggctccagacggacaagtgtgcatgccgattgcctaaaatttacatatctaacattaataattaaatatttaaacctccaaaacattgtcattcatatcagtgtgcaaacgacatttgcatttgatgtcctgggtccgaaaaattcacatttccaaaacttgacgtcaccccgtttgtttaatttttcgaagacatacagaaaaccatcgtgtaacaatttttttcttccacgctttgttagaatttgagtagccataatcgttgattggcagtgaacccaccctggcaccgaaacggctccgaaacggcgggcaccgaaacggcggcaccgaatcgtaccctaccgatattaagcataaaaaacgaattttccacttggtttgagctagccttcggaccccgtgtgcgggggtggcttttcggctctaatgcactttatgagtccaatcgacctttatgagtccaatcaattgacaatccccgggtttttatacaataactttgttcatgttagaacaaaccctatctttttggtatcattctaaagcacaaaatctaaacaaagctaaaatatataaaa

SEQ ID NO: 7682 - DNA, 3737 bp, Heterodera glycines
ttaaatttttaaccatgtaaaaggtaatttcaaactgttttttagtttatttctatattttttaaaaagatcaaaatattttaagtaattttacattattttggattttttttttgggaaagttacaccctttttttgcggcgcgctttatccaaagagaatttgagaaactgtggagaaggaagggtccggcggtgccgatatgcgccgccgggaaaaattttgtaatttttaatgtaaattgttaacaaattttgtccaaaaaatggaaaatttagcgattttgagcaaattttcaagaaaattaagtttttttttgagtccggcggtgccgataggtgccgtcggaaaaaaaattgaaaatttctatgcaatttattaacataaattgtacaaaaattgctaattttttgaaaaaaaactcaaaaaaattccgaaaaattccgacttttcatcaaaaatttcggaagtcggaattccgaggccccaaaaattttcggaagtcggaagtcggaattccgaccccaaaaatgtcggaagtcggaactcggaagtcggaattccgtgccatccctgttgtactacactgtgttgcattagaatagggacaccctattttttgggagtttgaccgcttcccatgaaccaatcgatctgaaattttaactgtacgtagcaattctgaaaatattaagattctaacaataagacgacgaaatgacgacggaaaaaaatactcagattttcgtattttttcacccgcaaaaattttgtgtttaatgccttttttatggcataaaacgaatacaaaatgcttaaaagatgtctgtacgttatcttagcgttgattgctgtcagtttgattcgttgggcaaatgttagaggcgatttaagccttttggcccttaatttctcctgaaaacttagaaaattcaacataactctccccaaaagacatatttctgtacgcaaaataaacagaaatgtgaaaaaagatttgttctttcttatttagcttgttttatcagtttcgttttagtagttgttgagatttttcttagttttccaaagtgtccctattctaatgcaacaccccaattttggaaaaaaattcgtaaaatttttttccgacatcctttcgtattctcatttttagaatcttaatattttcagaattgctccgtacagttaaaatttcagatcgattggttcatgggaagcggtcaaactcccaaaaaatagggtgtccttattctaatgcaacacagtgtagagcgcgccgtcatgttccaacttaactttgtttcgttttgttttaatttgttgctgctggttcatattgtaataatttaaagtcttaataaatttatcaaattcacttaattataaaataaattaaaactcgaaagaaaataaaagtcgaacaaattttggtaaaatatagtgtgtgtctgtgtgtgtgtgggggtaatgaattctcttttatatgcaaccacgcgaaaacggccacgcgaaaacgaccccgaccgttcgatgtatcgcctcgattcaattcttttttggtataattgcacagatattgtctaaaaatgaccaaatttaaggattataaattatgccagaatagtcaatttttatgggtgtttttgtctaaatccagggtttctatttcaaaattttcaaaataagaataaaggccaaaaaataagattttagggtcaaaaatacggccaggacgttttcgcgtggccgttaaaagtttgacctttttttcggtgattaacaaattgaaactcgtttggacccaagtaattgcttcgattaatcaccaaacagccgttagtttcttaaaaatatgaaaatttgcattataacattttttaatgagacaaattcttagtgttctgattcgggtttttcactccaatgaatcgacgtcgtacactttcctttttaagtcgtacctttttgtagcattttatgttaaagatatcactgaaagaaacaggtcagacacaccgccagcagaagggagcgggcgatcacgtaaaatgaatttatgcgacaccgatcgctgctctcctttgcctccaccgattttgatagatttttacttacaatcgctcaccactgactgtcttctccttttgacctatcccaatccccatttaagtcgttcaatcgatgtggttggtgatccaaggctacaagtgcttatgtatttagtttatcatctatatcaattggtgcccattccccgttgccactcatccaatccaaccatcttcccctcttcatccctccctctctcctttccttcgttccccctccacttcattcaaatccttccctcttcccccagtttctccttccttagcttgcatctacccttcctctcttttttctctcctcttccttcctttctctcttcacttccctttctcttctctcccttctctctttccctcccttcctcctcaccttcccttcttctcttcctctctcccttttctctttattccctcccttcccctccctctccctcttttccctccctctctccttcccctcctctcttcatccctccctccctcctctcccttcctctctttttcatcccctcttccttcctctctttttcctcggaacaggacaaaacacagtcgccgaaacactgtcgatacataacacagccggtaataaatttttaaaaattttttcaaatagaaatttttcaagaaaaaagtcagaaaaattttccttagaaaattcgatgaaaaaaaaattttcgaaaattttccagcgattttttcaaaatttactgatgaattactaagttttttcaaaaaaatttcaaaaaaaccccgactgtgtttcggccggttgtgttttggggtgtaccgttttttcctcccctctcccttcctccctttttccctctcttcctcctcaccctcccttcttcctctcgtcttctctcctttttctctttcttcactctcttcctccctccccccattcctccccatttccctttctgctttcctcttcttcctctcctcccgccccgcctctctcatatccggttcaactgttaacttgttccattgccatcactctgtgtcatcttcacaacgacacataaaatgattaagctgaaaggaaaagcttttgttcctgcgccgaatactgtggtggcatatccacccacattcttataaatacagagaagaatccctttggcgactgaccatccatccgctggacatgaactcgttcttcgcgcggtccatcccatcctcggctcgtcataacttctgaagagcggaaaggttcgcactggtgggaatgcctgggaaaccagaattgttgctgttggaagggaggggaccgagcacagtcgtcgttcatccgcgcccatctcccgccacgacgccatttccgaacgacgactttgtcgacaaaagctcatcggcggagcagcgccataaaaatttgcgagttgcccccagcactttcacttgccatccaataaaaacgagattgaagccgtgccgaggcctttcctccccaagtgttttcaaagcaaccgcagcgccttcaccgtcttcacaactcttctgtttccgagtcggccaaccaatgagtgacgagacaattttaaacgcaacggacagcgattggcccttcagcaaaagcgaaactcggaactcaacggttgctgtgctgccccaaaa

SEQ ID NO: 7683 - DNA, 3395 bp, Heterodera glycines
agggagcggaagagggtttaataatagtaaaacttatatttgtatatattgtacaaaaaaaactcccatacgcattttcaaattctgttcccatgccagcgtcaaaatgaagtaaatgacgagcaaatgtgtcacatttgaatgtagctagaaaaatgattatgattagaaaagtgaaagcttttttgaaattttgaaatacaatcgacacagaaatgtccaagggaattttgggggtcacactgatcaaaaatttgacattcattttatacagttttttccgctaaatgcaaaagcacagcattaatgcgacaattcgcgatggacgaaggacaattccgtgctgagacgatgcgaaaaaaactcagtgattgattggtcattttccggaagccgatcgcacccttttcggggcaccaaaagtgcctgatccggaatccggaccggcccggttaagaagaattatttgttcagtttttcaagggctatctcccaggtcgggttcggttcttgatccattcacttggagcctgtcatggctcgagcacttctgccggaggaccctcagcctcgcccccgaccctgtcgatggccaacccatgctaagcgtgcccgtaccagcggcttttttgtacagctcgatgagctctacaaaaggtgtcaatggcatcaggttatgtttactacaaatgtagaaaattgacgagaagtgatgcgaaaaattgaaaaattaaaaaaaaattgaaaatgacttgcgtcccgccgtacattagggttaaccggacggcgccgtgattttgtgaattgaattatttaatttatttattttttttcgcatcgacctagcaccggacaattcatttttggccaatttcgttttttgtgtctaaaagcgaaaatcgaggttgaatcgatgaatttttggcaatggtaaagaatattggtcccggaaaattttttaaaataatttttgagaaaattattttcaggggtaatccgaggtgcttagcatgaatctggccttctttaggctcaatttcgaacccgaactcggactcgaacatttttaaggaggacttgggcactttctctcttgctcattctcgatcaaacataaaaagttccgaccgattgtacgaataaggttacgggcttaatatcgatacgggctaaaaacaaccgtttctatcgaaaatcgggctatcaaaagggaaaaagcaaaattcaaagttaaaatatactttataaaagcattaaaaaattgggagctcagccgcttcatcgaccaaaggaaacgaccttttgttgttcacagaaggatcggacatttagttcagtgaattgtgctccatcctccaatggaaggccattaaagccgaccattcgacgcgtatttttgtgcccgcgtccctccataattatcaattaattgataattttgcctccaggcaccacgaggaacaagcggatcaagagggtccaagctttgtcttgaggtcatttgttctatttcacagtgattgatgactgtcccttcatccaatccctctgcaaacggtcgcacttcgctctctgcacgaatctcacggacgacacccaactcgtactaggccaactcgtactgccccaactcgtactgttttttgacaaataaatgggtcataacttttgtcaaagtcgaccaaattaaatattcgtggaaccatacaatagcccttaatgttctctatctatccaccaagactcacaaaacgtgattaaggtctgatcaaaaggtattgatattagaatgctattgtatgatataatgtacaataaatgctcgaaaatttggaatacaatttacaaagaatctatgtattatgcttgccagtgaaatgaagcaatatgtgatctcgaggcaccgatttgtcaagttaagatcaatggtagtataatgtaaatcgagaatgacatcagtaaaaataaaaaatttagctaaaaaaggagtcaacaataacatgataaaaatgagcaatttaaagaattattaaaagaaattcggaagaccaccttttctgcacaattgaatgtagaaaaattttataacataaatgttttaatagtttcttcttcttaactgataataaattttaaaaaatcatgatttaatccaatgcgctttttctttaaaaatgaaatgtaaaaatcttaaaaataaactaaattgctcaattaaattaattttaaaatagaaaaattctttatttaaacaagaatcaagtaaaaggcatttaatttatttaaaatcaaaaattttggtaatcacttttataatttgtttataatttggagatttaatacttattgaaattcattcgatcaaccgaaatccactaaaaaagattagtccgttgttagaaaatatgagtatattttttaaaattttattatcattttaatgcttaaatttgcatttaaaaaaataatccataagtatttaattacattttttatggtttaaatatttttcatataaatttttttatattttacttttattttctattcaatttataactattttggaaatgtttaaaatgtagtttattttattatgatgatattcattaaatttattcatttaaattaacttttattcttatggcaataaaaattattgttatttaaaattttaaaaattattgtttttcaacactgaacaaaattataaaaatttaatttgtttagaacaaaattattttgtcatgaattattaagttatggagaattttttgaaaacttaaattgctttttattgatgtaaactaaattatattacttttaatttatttaaaaacttaaaattttcaaaaaaataataaaaaataatattacctaagtcaataaatgattcaaaatgaaaattttaaaatactataaataaaataatttatcaacaaaaaataaaataaactaatacacttaattattaactctgcatgttaataagatacaaataaatacaaaacataagattgcataaattcatattttaacagtattataaaaattaaattgagatagatatgtaaactataatttatttaattttccttattttaacattaaagttctaattactaataataaaaaaatgcaaaattgattttagagtaaaaaaataaagaaaaatatttcattagtaaacaaattgattttttagaataggattactatctatttataatatagattataatatagttaaaagactaaacaaaattatattgcttaataatatttaaataaatttaaatttacaaataatatagaagaatatattaagtgcaaatcttcttcacatagacatgtaaggtataacaacataaaagcttgattcatttcttttctaa

SEQ ID NO: 7684 - DNA, 1859 bp, Heterodera glycines
cctgacccccccccccccacattccccagttttttggaaaaagcacaccgcgaaaaaaactattttgggattttcacctcaaaaaaacaagcagatattctgatcataaattaatcttaacaatttttagattggattttttaaatttaaaaattttttaaattaaaaaaaaattttgaaaattacggattacgtattacggattacgccaaattacggccttttttgacccccgtcatgacggattacggatggccgtaactgaaaaaatcgccgtaatgacggattacggatggccgtaactgaaaatcagttacgtccagccctgaatacgacgcaatggaaacggcgatggaacggcagccgatgagttaagagaaagtgccgtcattatcattgtgattattatgatattatattgtgatatattttgcgcaacatatcaaatcgagatttaaacaacatttttttatttgtgaattttgtagatttatagattaaatattaatcgaaaagctgattaaccaagcagataagcagcagcagcaatagttatgagaatagcaaattagggtatttaaataagtgattaattcttgaaaaatttctattttaataaataaaaaatattctataattaattttatttttttatcaaaatattaatccatcaatttttaagcttttaataaaacattatattttgttaatttgatttgataaaagtttttatgaattatgaattatgattataattatttttattgaatatttttaatttaaaaaaaataattgaatttaaatatttaataaaattaattgagataaatagacgatggaacggcggcagccaatgagttaagaaaagtgccgtcattatctttttaattttttatgctccacattttatgtaacgtgaattttgtatacaaaaaacaataaatgaaaaaataactaagccaatgacgaaaacaaaaatttagatttttcaaaaaagaaaagtgatgacttttttgttttgttttgtttttcatatcacttgtgacggcgccgccggggaaaatttggtggtttaatcccttgctcaatctgcgcttttgagaaaatttaaaacaatttggtttttataaatttgttaaaacttaccgcggtcaaaacgtcataaagatgaagcattaatccatcccaattaaccacagttcggtaaaatgtgataacggcaatgtcccattgctgaaatgtatacatattattgttaatgatgctaaatgaaccaattccgtaggaattccaattagtaataaattaagaataggccacgcttacaacttgcggtaactgacaaaacacaaatccacagctaaagcgtcgtccaatttgatcagttctctcctgcgtgaagggcgcccggaaaatgcgtcagtggaaaatgcgtcagtagaaaatgcgtcagtgaaaattttattgtcataaaaacaagttccttgcgttttcgggggcacttaccacgaatctggtatccatttcggccaattctgaaccccggacgcgaattcgaacaaaaagttgcaagtctaaattttcgaattaagctttttttgttcaaaaacggcataaatgatctcctattgcaggattgatgtatttcagtttttaaaccgatttgaagaaaaacactaatttcgaaaattttgactttcgattttttattcgagtttgggtccggggttcgcaattgagaatgattttcttatagaagtttacttctatattacaatactaatgccatagaattttattttaaaatatttgcatcactgacgcattttctactgccgcatactccactgatgtatttt

SEQ ID NO: 7685 - DNA, 703 bp, Heterodera glycines
atttttgccatttatttccatattttgagatttttgccattttatgtccatattttgcgatttttggtccatattttatggccaatatttcgcgattttatatccatatttttggactccctagtcatattcaacttccacggaaaagttttcctaacccgctagaaattttttttcgaatttactcagattttcgtatttttcacacgcaaaaattttgtgtttaatgacttttttctagcataaagtgaatagaaaatgcttataggatgtctgtacgttattttagtgctgattgcagttagtttgattcggtttgtcaaatgttagagaagatttaagccttttagcctttaatttctcctgaaaacttagaaaattcaacataactctgcctaaaagacatatttctgtccgcaaaataaacagaaatgtgaaaaaatatttattctttcttatttagctaattttatctgtttatttttggtagttgttgagatttttctcagtttagcaaagtgtctctattctaatgcaacacccctttttcggaaaaaaaattcgtaaatttttttccgtcatcatttcgtcttgtcacttgcagaatcttaatattttcagaattgctacgtacagttaaaatttcagatcgtttggttcatggaaagtgatcaaactcataaaaatagggtgtctttattct

SEQ ID NO: 7686 - DNA, 2401 bp, Heterodera glycines
ccctatcggcaccgccggaccataatttactcgattcctccttatttttttaaattttgactccaaaatggcaaaaattagtcttttttggctaaaaatagttacaattcctgtttttgctctccggcgctgaattttttaaaataatctaaacaaattttgaccaaaaaaattcttcggattccccccccccccgaaatttttttctgactattaaaatgttgaaataattatatacatacataaatccaagcagaaggaatgaaaaggaagaaaatagtatttcgtcggcaaagaaagaggagaagtgggagagaaagtgcactgtttgctccctctttcttctctccttttcaactcatcattaatttctctcttccttttccacttgttcccagccaatcccttcctttttcgagactgtacttctcaggatcatttctgtagtacggtttcccggtgggagttccaccttgctcgccaaagcacccgcgatgacgaaacgcggcgtcgtcccctgagcgtgaagctcgccgggggcgtcgctggaaagcatttttggtgatcgcacggcgttgaggaccgtcggctggccccccttggggggtcggccgcgggggcgacgctctctgagcggttttaaatgccggtaaaaaagcggatttacaaagtgatggaaagaaagcgaagcaatgattggggggtaataaaaagagatccattcgaaggggaatacctaactcacgagaattggttcttagaacgaagcaaataatggggggggggggacttttgcgcacattcaaacaaatattttattcacttttctctttttcattttctttttggatatgattctgcaacatttttttctgatccattatctgtctgctgttttcccttcattgtttttcccaatatttcgtttttcatccggaaaatatccccgaaaagagcatttggccctccccgcgtacaatcgtaaaataaaagtgtctgtcggcgacgaattcgatttttggccgtgtgaccagcgccgtccgtgtcatcatcaccacggcggtggccgcggccgcttcacttccctcctcattgttctgaaaatttgagtcttttttcctcttataaaaatttattccccgataatttttaaatttctccagccgtccccaacaaattttgtcggggaatttcctccccgagggtcggggcttaaccctaaatttttgggagggggggggagcgatgaataatcaattatcttcatatttgtatggaattttattaatgaattaatagtaaattagtgaaaattaattttgattaattagcattgagttttgatgatcaatgatcggctgttaatattattaattaattcattctttgaagcattccagtgaacagaaatttgttgccagcagatgtcaatgccactaagaaggggcggttagcaatgaaaagtgccggctcgggttcaattgggccactcgcttcagcttctccgattatcgcagtggcaattcaaaaaaaaactttccaaaatattctcgaagaaattcgataccaatttccactataaaagagattatttatctatgtttttttgtgccttagattgatgatagttttaaagtacatggcatttgaaaatgtattttaaatggttttttggttttaacttttggatttaatttttgttaagcttgcatatgaaattaagcaccggagggagtccaaaaatcgaaggccaaggcgggtaattggtaaaagttttcaatcagcaataacagcagctcggctaggcctcattgctcgctgtattgcccgagcgcaaggcaaaagaaccgagagaaagggagagggaacaggctaatggaataggctatttatgatgggttgaaaaagagagagaaagatagagaaaaacgcatcattctctccctccttttgaactctctttccctgtgttatttctcttcgtctattttttctttgcccttctcttccttcgcgcctcattctcttcctccattctttagaaaagtgagaaaaagaaaaaaaataaactcaagagacagatgagggaaaagaagacatagaaaaggaggaataaaagagaaaataaatgaatgtttcctctcttcccttcctcagtttagacccatcataattttgtttttatattcacaaatgtttgcccatttcggctgcgtcactgaccctcaaaggggggtcgttgtgctcaagggtaaaaccttaaatttttggactgcaccatctcttgggaaggtgcaaaaaatttaggacttaaaattatagtttggatagaaagaaagacctttttgaaaacttttcacgtctttgaaagaatggcaattcgttaaaacaaatgcagtca

SEQ ID NO: 7687 - DNA, 2876 bp, Heterodera glycines
tttttttcagttcacttttaaaattttgtgtgtttaccaattcaaaaaagtcggaaaatccgaaagaagcaaataaagaaatggaaaaagcgatgtgataatttgaatatgatttttatagtaatcttattgctttttcgttttcagcttcatctctgccgacggttggctcagtgttcaatttgttgccgccctctcagcttggactcggaattgcactgatcagcccccgatttgactatttcgttgacgaacatttcaaaacgcgcaaatggaattggacaaaatgaaaattcgaagcaaaattggacagaatggcgcaaaagaaatggaaattgtcaatttcaatggaaaagcattgccaatccctcaaaatccgttgccgaacaaagtcatcggattcaaaagcatttcgatcgagtaaaaattgaatttgtaaatgatttgtgcccatcaatcacactttgttttgtttttcagcttcatcgaccaaaatgtgctcatttttctccgccattttcaccgttttttctccgtttgtacaacgaaattttttcctgaatttccacccgatgacagtgccaatgcgtcggatggccaaagggctgttctcgcctcgtcccgacaatatgtcaaaggtgctgtgcattgagaaattagctgaggaacaatggtcgaaaaccgtcgaacaaatcaaagcggtgattatttgatttgtccaatttaattcgttttttaaatatttgtattttttagttattttccatcgctcttctcctgtcaatttcgtcatttgcgttgattttccatctttctcttcattttcttccgttgtgccatttgaactgaccaaccaattgactggggagaaattggactgtccaaagatgaagaagatgaagcagaagatgaaattggtgtgtgctcatgcgttgtcaaattggagcagacgatgagggaaaaatgggataaatgagacggaagaagcgattaatggacaaataaacaaaatcggggtttcgataggagactacggatttgacaaaagatgaacttttaaaaagcctcactcaatgctaatttctcttcttgcttctgctgaagtcttctcgacgcctcttcccccgggccgagtggtgatcagaagcagcaaaaatgaatttgttgattgatgcaattatttaacctttattatgtcggactttgctatttgtgtgtttttattagggttataaattgtatggatttacatatttttctgcgtatatgctataaggggctcaaaataaaatttcaacgttaaaatttttcatttggtgaagatttttagtccatataaatccatatttttggggttttcgggaataaatccatagttcgccatttttgcgtttttagttcatatctcggccatttataaaaagaatgaatggaatattgagaggggaaagggcatttttatactaaaatgcatattagcgcagcaccccaaattcgacatgggaaaagtcggagttggagtttgtcggatggcaaaaccttttaaggccattatttactctcaaaaaacattttttatgtgtcaaatttttgcatattttttttctcacattgaacaaataaaaaaaagcgaagttcagtttttttcaactattttcaacaataatttttcttctgttatttcttcaaattttctcaccatttttctctttttttcaaatttaacagaattccatttttcgtcctctttttttgccatgacttccaacaaaaataattctctgttgctctttcttctcctcatcgtcgctttgcttttcaacaatggcttctgtcatcagcaacaaaacgacaacaataacaacaacaacagcagcagcaggtgctgtgattttgatgaacagcaattttttgaatccaaaaatttaaaagcccacccaccatttagaaaaacgaaaattaaacactaaattctacggcatggatatggttgggacgcgaccgcaattcgtttatcgcggcggcttttacgcgcgtcgcatcattttttggtccggcacttgtccagagatatgcatcattttggaatcggaatccaacattttatggggtagcatatttgcaataccctacattttcccatttttatgaatatttccgaacatttgtcggtgtttgaataggaccaccttaattttcaaatttgctcatgataaatacttaattttcccctcatttttcagtgagattgagccaattcgtagtgaattcgacaacaagtcttctttgtgcgttttgcgctttttttttttggttttattcatcgcacatcctaaaacggataaatggcctctttctcaattaaatacatttctcatggcatcattcgatgaccgcgcaaattgattttcaaaaaaaaataatttgaattttaagttatgaattggaaattgcaaaaaaattttcggcaatagtgccgatggtagccccattgggtccggggttagcaattgggtcataatggatatcagaatcggatcctcctaccctgaaaacccctaaaatgactttatctcgagaaaaaaaattgaaattttttttgaaaaaggggggggggaggactaccatcggcactattactaaattttctgtttttggcacaataactccaaccaccaaatacactcatatacagcaattttctccattcattattttcagggcagcttttctgggcgtcaatgttctgatcattttgatttgctattgtgtcatctgctgtgttccgattttcatcatttgctcctgtgtgatgtcaaataatgcgcgcgagagacgattccttcgtcaaatgtcttcccacaggcgtggtggag

SEQ ID NO: 7688 - DNA, 1474 bp, Heterodera glycines
ctgcacaaaattcaatttgcggatcctgttgcaggattggaattcaaaaatgtttgcaggaccggatccggccggattaatcctgcaaatcctgcaaatcctgttttttccaaaaaatgcaggattgcggactgggatcctgcaaaatcctgcgcaggatccggtcctgcgccgggctctaatatttaataaattcaaaattatttaccataggtgcaatccgaacaaaggatccacagaatcccggtaaatgggcatttccgggcttaaatgattgacagggcttgggccactcgggttcaaattgcccattttaaattggtatatttagtttttgagaatttttaatataattttaaattttttcaaaatttcaaaaatgccgcaatcccgagcgggatcccgcaaattttaaatgctggatttgcggggttaattccgctggatccgttcccgcaaaaaatttgaattctaattacacagcgggatccgcaaatttgaaatttccagtctctaattacgaacatgctttcttccaattaattaattttccaaaatgacttcattcataataaactactaaaacaaaaggaaatgaatggtgagaaaactgtacaaatatttgtaaataatgaaatattggaaattgaacagctgacttttgcggtaattacgttaattagcgtcacttttaattgccaattgggcgcatataaaaaggcattaattaatccctgtcaatcatcaaattaattagcaaacatttaaaacaatttcatcaaaatgttgctaaaccctacacttttgcttgtgcttccgttcctttttgtgtcctccgatgctttttggatgtttccgttcggcggcggtggccaaaagccggcacaatggcaaatgctaaaatggccatggtatttgccggccgatgccaacagttcgtcgacttcgttgtcctccacgtccacttcatcgacttcaacttcaacctccttcagcagctcgtcctcctcgagttcgaccagttcgtcctcctcaacctcatcttccacagactcaacgccgtcttcaacaagttcgccttccactttttcttcatctaccacaactgttgctccaatatggctttttaagcttggtcttttcctttcgatcacattggtttagtcaataaaattgaatctgtccaaaagtgcttttcggcattatgtttgccgcgggacaagaaaattacttacaagggaacctcgcaaacagtgactcggaaaatacatatgggttatatacctttggatagagcagggtcgacttctattgtgaatttttaatattacgggctgatagcaagaaataaaaaagtatggggcctcaaaaatcgaaattttggccaaagagcccatttccagctttgtcaactttctattaattccccaacctttaaaattgactgctatttgcttattttcacaaaagaaaa

SEQ ID NO: 7689 - DNA, 5272 bp, Heterodera glycines
tgtccttatttgtaagatttgtccaagtcttatttttttggatttaaagagaaatttagattttaaatgataatttttgaaggaaatgttttttgaagcgaatgtatgcaaaatcttaacaatattcagttaaatattcaaatttttctctcggcggtacacttccatctagagctcggcctggaactgtatccaggcctggatttttcctggatccaggtccaagtctaggccatttttcggcaacctgggtttttcctagacctagattttcgccggcccctaaaaattcttattcttttaaaaaattggctcaaaatcgtgcaattttgtcatgtctttaattttgaccctaaaatcttattttgaccagcgatgtacttatttcgggaaattttcaagggtaaccctggttaaaatgccctttactttcattggcatttaccaaatttattattaaaaattaataaatttaattagtctggcactatacatcagaagaaagaaatacctaatagagcatttaattaaacttaccactggaatgtgctaaataacaggtgaaaagtcgaaaaagtgccaattagacattggcctcagttgaaaaatgaatttgaagtgtaggaaatctcaagagcatttaattaattgttggtttgggttttcatttctttgcatttttattaaattctctcattgaattttgccacttttttgataagataatattcttattaaattaactaatatatgaataacaacggtaattcatcattttcgtccgttaatgaatttttagagtccgaccaaatttacgtgtacaccgtttgggattaatgaataatataactaaataatttaattaaaaatgtcactcactggtgggactgtaattgcgttagcctacaaaggcggagttgcgatggccactgaccgtacagtttttgcatccggtgttcatcgttttcaggtctttgcctttgtagtaattatgtctttaaaatattttaatttcggcataaaggcaacattaatctttttttagacttaaaaaaatgtatggtatcttttctttagtgaaaataagcaaatggcagtcaattttaaaggttggagaattaatagaaagttgacaaagctggaaatgggctctttggccaaaatttcgatttttgaggccttataacttcttgtattcttgctatatgcccgtaatattaaaaattcagaatagaagtcgaccattctctatccaatggtatataacacatattcattttccgagtcacagttcgcgaggttcccttgttagctgccggggctcatttggcccctctctcatggatcttttcaaataacggcgttataaccgccggccaatgctttccattttttccaaatatggtccattagtaattttgcgaaatgcttattagcaaaacatggattcacctatttttgattttcttctttcagatatgcgttcgctggccgcgttaatccaacaattggtcagtgctctgaacacactgaacacagtcatgcaacaacagcagcagagataattaattaattggaagaaagcaaaaacattgtggagagaaagaagagataccgtatattctctaattaaggccctgtctccattaatcccgctgtctccaattatgtccccctttctgaggatgatgttgaaaaataatcccccgtctctatttatccccccgggggataaatggaattattattttttaaaaatcttatttttaataaaaattaattttaattaattctaatttgaaattcatttaaatgtttaataaacatgaaaaaataatacagaaaaatcacttactttactcaagtccgaacataggtaacccagcccggtgctatgtcgttattagagctcggtattttgaaaaaagcctggacctggacctggattccatgttcgacctggacctggatttcctggacaaaaatccaggaaaatacaggtccaggaaaaatccaggcctggatccaggtccaggccgagctctagtcgttataaaaaagccgtcaaaaagggggcaatcattaataattggtgtcccgacgaaaaaaagtgttaaaaatttgtcggatattttttctgattgtgagcttaaaaaaatgcgctgatcacgaatcgaagctcagattttgaaaatctttgatttcaaatgtttttttaggtacttgtaaagtttacaccccataaaaattttcagaaattgttttcgggtcatttcttaggatgtattttcccgattttttggcatttttagtggaatttttcggtaaaaaacgccaaaaaaggcaccaaaacggcaaaatgccgaaaattgctaaactttaaaaaaaataatttaaaatcgaaaaaaatcaagtagttgacaaaaaatattagataaaaatcaatgattttcaaaatctgagctcagattcgtgatcagctcatttttaagcctagaaaaaatacccgacaaatttttaacatttttttcgtcgggacaccaattattaatattgccaaaaagggcgctaaaaatatgcatacatttaaaaattcataaaaaaatattttttgcttttattttgaagaaaggagctcaaaaaagcatttctgcattgaaattttcgattctgaagtcactatgcgtcattaaaaatcagactttgacgcttctcaccaaaataattaaaaaattttggcgttatgtcactattttattaactatttcgagatttttcatcactaaaagtcgcggccctagtcattaaaaatctgttgaaaaataatccccctgtctccattaaaggccctgtctccaattatgtccccctttctgaagaggttgaaaataatcccccgaggccttaattagagaatatacggtaatcggtgattttttgtgctgataactgagcactctaataatcaatataatagagaaaaatctgggctatcgaaaaacaccaagaatataaaatagctaagatggctaatttacgaaactatccagcacaaatttaaaattggaaagttcggctagcacatcttatcgtcccccccccccccactgacggctttttttttgctcgtttattttattttgactgtcccttgggcttcgtttgcatgtgtttaaacagcagatttaaacaatgggaaaatcgcttcagatttcttctgaggatttatctaaaattttaatgtgtcggccgcccattgaaaatatttctgcaggtcgtcgttattccaaagtgatttggcgaagtttaaaacgacagaggccgtcggccgtgtgttttgacatggactcgacactaattaaagtcaaaattaatgataataaaaattatgaaactaaaatatttattttattttaaactaatttttcaagaaaatactgctcaaaaaagcacttttacacttctcaggaagaaacattggatgcgtatagcagctttttcggcttggatttgggcggaagtgccatcactgaaaaagcaatgggcggacaaattggctttaggttaagccagttttcaaatataagaatacgcatatttaaaaaatatattaaatttatgttaaaatatttttggattttgttaagaaaagcactggcccttcgcttggaaatgctaaggccaacaaaagcccaatacgaacgatttttgaacgaattcaccccaacattaagcgatggagtaataaattaaatttctggtattttccattcagtgccccaattccaaattaaaaaatccatcaaaaggccgcgaaaatcataaaatagcatgcgcaactctctttgttcttcaaagtgaataaatagttccttcttcttacaggaatcatgctgcagaaatttcatttgaaaatttttggaaagagcaatgaaatttaggggaattttaaagaaaataaataaaaatggggatgatgaaagagtaaagtggaatggaaagtaaaattcttttgccattggccaataatttatgcagaagaaatgggcggagtaaaaattgtcaatttcttaatttattcattggggaaggaaaaatgctatttgcgcgcccttttggtggctttttttcatttgaaatggcgctacagaaagggaaagtacaaaattcctaaataaatccgcttacctattttttagttatactttaattaggttgaacagttggttactgtactccgtgggtacggtgtcgacctttacattgtcaccggcggattcgtggaggtcgctaaaagggtggcacagcgtctgaacatccccaacaaaaatgtatttgcaaatcgaattctgttcagtgctgacgggtgttatgagggctttgacaaaaggcaaaaattacataaaaaatgaaaagaaaaaaataataataatttagtcaattgacgagtcaatcgggcgcttcgccaattggaaaagcgggcgtttgccaacttttgaaggagcggtgagaatttggcaaatgccattttgggcaactgatttaaattttgggtcaaataaaatgctaatttgtcaagaaattcctacaaattgcttgtgatggtcggcgacggaggcactgacatggaggcacggcccccggccgatttgttcgtcggttatggcggaaatcaggtcattaaatttaaacgctcaacggcattcttggttggcaggtgcgcgagaaggttcggctgggctccgattggtttgtgcgtgattttcgaacccttaccgacgcaatcgaagagaaatgagacaaatttttattttatttggtgcacctcatttaatgtttctttatgcaatagtaacgaatattttgcaattttgcccgccttttttgttttttaaaaaataaataaaaccgaaaaataccgtttagaattattaaaattaataaacaaaatcataaagatttcatgcgttttttgtctccaattcttttattttttggccgcacttcttcaacgctttgtacgcctcgaatttgcttttgtggaatgccaaaactttttctgtcctttgcggttcaattttgttgccaaaatgcctctgcgaattgaccatttgggcggatgcttcttcgatggtgctgaatttgccggaagcaacagagccgacaattgcggagccgaaaatgggaaatcgtttcaaaatttaattcgataaagaaaaattaggcaaaaaagaaccgaggagaacggactcttcacagtgcggcacgaaga

SEQ ID NO: 7690 - DNA, 4683 bp, Heterodera glycines
aataacgtaataagcaatcagctacaaaccaccccggccatatatcctatgagaaaaattgagatcaggagtcttttcatcccgcgtggcacttctgacctttcacacaatgtttttacaagcattgttccgagacgtttaatcgtcgggtttgtttcaaccggtgcgtataccggaaatcctaaagagtcacccttcgtctttgaacatgcaaaatgggattcaaaaaattttaaatgaggccaaaaagattgacccggaaattacgaccgatgacgttaataaattcctagaaaagcagagaacatacacgattcacaagcccatcaggaaaaaattcccgagactaaagacggtaccgagcggcttccataccgattggcagtgcgatttgtgcatatttgaccagttgaaaaagcataacgacggttacaaatatctgttggtatgcatcgacgtgctgagtcgaatgatcttcagtgcaccggccaagtcaaagaagagtgaggacatggttgaggcttttgatcgggtgttcgaaaagtcgaaaattatcccgatgaaaatatatagtgacagcggactcgagtttcaggctggaaaaatgaaaaaatattttgaggaaaaatttattatcaaaaatgtgatgtatagtcctgacctttgggggccaagccagtatccgttacttttgaaaatgcccgttcgctctgggaaaaattatataaggagaaggaattcaaaatttcgaaaaagaaaaaatttaaaatcggtgatatcgttcgtattaccaaggaaaagggaaaattttcaaaggaataccgcccaaactttaccgaagaattgtttaaaatcgttgttgccaattcgacgacacccgattcatacaggattgaagatttggaaggaaatttaataaaaggcatattttataaccaagaattagtgaaaacggatggatgatttttacattgtactaccctcgaacacaccggggcaggagaacactacgtcaaaattcacagtacgtctccccgagactttggaattgggcacaaattggtcagtagctctctcatcaattatttacccctactcattcaccgctctcggtataaatggtcaagagtttattaaagtatgggaaaatgacagcagtgtccccattcaagtttatttaccggacatgaattttaaaaccgccgggggattaggaaataaaattaacgaggcattcacacatcattacaaaatcaaaaaacaacgtgggaagagagaagccaaggctgaagaaaccaaagactcaaaaattgatgtcgcaaagagggctgcagaacgcgccgggagagacgtagtaagacattttaatcagatcaacaatatctcgaattccatccaaacccaactaaacacactacgagaaacaaatcctcaaattttagaagagcctgatataaaaatttggtttgacaaaatggttgagatgggaaccgaaattcaaacatcccgaaatgaacttaaatcttttcaagaagaagtagataaagccaaaaacacaacattagagcatgtggaaaagaatgacatgaaagaagcaaagaaatcagccgacgtcgcaaagggaatcgccagacaggcaaagaccaaatatacatcaactctcgagggatataatgataaatcggaaaagggttttaacgggatggtggttagacttaacgaggcgctcggtgagcattttaaacgtaaggaaattgaaaataaagaagttttagaagctgaaaaagggccgcaaaaaagagagagattagccaatgaggatgttcaatttaactacgacagtattgatcaaaaatttattgtctatctttcctctgccgtcacccacatagatttgtcaaaacacctcgcatatgttctggggtttaagaacacaaggctatttcacgcggaagaggcgacttatatgccagatttgacgggaggcgtaaggcagctatacatttatgcaccaaatttaatcgaaaacacaattatcggcaaccagatggccccactcttaagaatagttaacgtcgtcgatgacccaggatcaattagtgaagttatatatagcaccgagtattttcatcgtctacagtcgaaaagaatttcagaaattacaattgaaattcacacaccgtttggcgaattcgttaaatttcactggggaagttgtattctcacattacattttaagaaaagtatattttaaaaatgacacacgtatttttcgatcccgagtcggtcgattggtcatcttttatcactcctcaacatgggaggggacagaaacaatattttgtcggaagcaagtatcaacggggattcggtttcctcggtaatgtggcacgtttcttgacccctattgcgaggaatattgcctcgagtgcaggacatgaggggcttgccgctgggcagagagttctgagtgacatcgcccagggtcgtgatttaagggatgccgtcagggaacattcaagacaggggttgactaaccttactgataagttacaacaatgtgggaaaggaaaaaggtctctgatcactaataagaaccggaaacaagtatatgatcagttaagtttcatctaaaggtataaatggaataaataatacaaatagttaaaaatgacaactctcaagaaaatcgacacggcgagtgaggacggtctcgaggggggcctttcacttttcgacatccctccgacgaacgttgcaattaataaatccagtattcgggaattgctgccactttcagcaataaatcaatctggaccgtatatctttagacttttttcagataatcagttttgtgacctcaataaaacttttctctatttgtcaacttcaatagagagaaaagacaaaagcaattggattccaattaccaaggacagtgaagctgatcaacacgtcggtgtcattcaaaattttgggcacagctttgtcaaaacattaaaggtgtcaatttcaggtgtcgaatcttatgattccggtatttactatgcggttagggcatatatgatgactgaattgggattttcagaagatgtcaaaaagggtctatgtgaagcgtcctgctattacgtagatgatgtcgaccagaatgattatacaaacagtggctttaaaaacagagcgtcacgttttgctgatggggccaaatgtgaaacaatggtgaaacttaattttgatctcggccgtcagcccaatcttttgcttaataactctgacgtgatttttagcatacatcgtaataccgatgattttctaattatggcaccgccatatgtttccggaaatgcagtcatagcgaacccgcacacatatcgtattaacatacacgatattagaatttatgtaaaaacagtagatgttacccagtcattaaataacgtaataagcaatcagctacaaaccaccccggccaaatatcctatgagaaaaattgagatcaggagtcttttcatcccgcgtggcacttctgacctttcacacaatgtttttacaagcattgttccgagacgtttaatcgtcgggtttgtttcaaccggtgcgtataccggaaatcctaaagagtcacccttcgtctttgaacatgcaaaaatacgctctatcggtgtcgaagcgaatggaaacatattccccgggtcaccctattctcttaattttgatagaaacaaatacattcgagcatttgttgacatgtatacgggactcgggatggacgatggtgaaagaacaatgtcgatcaatatacaaaaatttgtaaacggttggtgcttctttgttatcccgatgacctctactctagaggacacccccggttttgaattgattcgaaacggaacgaccagcatcaaggtgcaatttaatgagcctataaaggacggcgggtatgagatgatcgttctgggggaatttgattcgattttatctattaatgctaatcgtgtgctcagtagcgacggaagcatatgatgaattcttatgagattgaaatatttctatccaaacatccgacaacccgaaaatattttatcggtgtttttgcttccgacaagatgcctaaattgaaggacagacattttccgtactgttttgtggcgaataccgaccgtgcgggcacgataggtgaacattgggtcgcttattttgtaaattcgtcgtccgtaattgaatattttgattcatttggcgattatcccaatgaagatttaagttcatatcttaacttattcgaacgaatcctcattaacgatcgtatagtccaacatcaattctcagatgcatgtgggcaattttgcatatatttcttaacacaacgatgctccggaatcccttattgtaaggtcattgacggtctatataaggttcacccaaaggccgatttattagttaagaattttgtcagtaatgtttaatttaattgttctcctaacgatagtcggcaatctccatggagaaagagttactattctttctgatacacaactttttgacgacaagtatcttactatgacaaagagttcggtcaatgaaaggcagttcggattcgatcgctcgagattatgtacgataaataggaatccgatttcagggtggagcctatcaatccaaaatataaattcaatagaaaag

SEQ ID NO: 7691 - DNA, 1840 bp, Heterodera glycines
attcaagaatagggatttttagtgtcaaacatccaaagtagggattcctagggacggataaaggcgttaaaccgaaaattttcgcgaatgtgctttcgtactttacaagacgaatgtcgccaaaagcgacacaaatttcttggaaattttcatttattttttgatccgtttcgttgatcaatttctcccttcgctcgctcctcttttttatgactcatctctttttccctcttaatttttgttatgagtcatcatttttgagggaattttttccctttgcttgtgcacatttcttcacgggcctggccccgcccccatcgattgtgagggtataaaagcccggcccattctccattttcttcactgatcaatttttgattaagtcagccggacagttttctgtccaagcaatttgcattaaattgtaattgtgtaaatttgaataaagattaagaaaaggtcttagtcttatcattgtctgtaaaagggacattcaggagccctttaatacagaccattaagccattgacccccgttgggtcagaaaaggcttatcaaaggaaaggagaggaatttctcctttaatttgtccctttggactctgtgagtttctgccttctggacagaaattcattctgcataaaagactccccccttctgccgggaagtgcaaatttttgtggcgttttgcccacaccgaagaaaaaaataaatagaaaccaagaatccgacccttatatgacaaaaatctcttttttttgtactgtattttgtgtgaatgaactactgtagtaaattaggatgattttttgtgtattgttttggaatactgtagctcgttttgatgcccacctgatgctgttgaagaatcgcatacagttgcttgtccttggtgcagcactgtacaatatagccaagattgttgaacataaaaagaccagctaaagtgaaaaatgttttccttattaaaaaagaatgaatttgcaatggaaggatttcagatttattttaataagcctccgaaaaaaagtgtgagaaagcaaaattccgtcgtcaaaaagctcagaaatgtggaattttaaataaaattgttgacgattccgctgggaaatttatggaaattccttattttgtcgaaatttcctttaaaattttccaggcaaaatatgtacggttttgaattattaatttaaataattagtaaaatcattgagtttgattttaccaaggtaaggatcagaataggcaacacatttttgctgcaaatttttctgtaggcccatcagaatttggatgaacaattttgaggccgacgatgccatcgttggtgttgttgccgttgttgtggcatttgtttggtcattaatgccaccaaccaacaattgttgttgcatttgttcatcagcaattgcccgctggaaaatttggaccaacaatttctgatgctgtaccaacagcttgaggaagttgacggttccactgctcaccggatggacctgtgggcgattaaaatctttttgaaaatttaaaattttaccatcggaacaccggaatttgcgggttcgatttttgggactcaaataagaaattatttattttttgtatcaataaaattccgtgtaaaattttggaaaaaggggtgaaatttaaaatcttcaaaatcgcatccaaaaagtacatacaactatttttaaaaatttgcgagggtttggtcaaatagataagtgcaagtcattttcccctggtcaggtcgtttttcctccgcgtcgttccctcccccgccgaaaaataaaaaatacacaggaatttttcaaaaaaaatattaaaaagaacatatatt

SEQ ID NO: 7692 - DNA, 5233 bp, Heterodera glycines
  unsure (1)..(5233): unsure at all n locations
ctaatgatgtttaattgattgcatcntgggaaattaatcctaattaatcccagactctttaatatgaacttaagaaacttatttgtcaatttaatgaatttatttggtaaatttacacacattgccatcctcgggcacaaatcggccaccaatttgaccacttgacaagcgatcaatgtgcagtctgatcagttgaacgcatttgctgaagaggctggactgcagtgaattgtaaaggccgcgttggccaacattctgacaaaaactgacgacaattaaaacgatgcattttcgtcgtttagtaaattaaaaaattgtatggaaaaagaaattggctggcaactttaacaaaatgattcaacatgggttaaattaaaaatgattttcagtgttttgtattagtgcaggggactacattcgtaaaacaaaaaaaactgtcaccatgaacgtttcgtaatcttaaaaatttgttaactgtgttaggctgaaaaaaagtttaaaaatattttaaatgaaccggtaacccgaaagtcaaaatttttattattaacttttttgaaatctaattacatttcgaaaatttgatgacaaaattagcaaattcggatagatatgtaataggaaaaataggagagatatcatatatcacatagtgagaaattagccaagccaataaacgaaatcgacctctgacaaagcggcaaattgattggcatgacggacaagaaatttgatgagcggaagcaaagcagcgaaattgccttcgtatgcgtcaacaactttctgagttcacaaaaaaatgttagggataattaaaaatatttctaattaatttttatgtaaaaaagggtccgaataatgaaagatcaacggggagaaaaaaggatgacgattttgtaaaaaaagtcgattctctagtatgtatgaatcagtggtagatcagattgcggagttccgaagctatttaaaggaagagctattataaaaaaaattctacattttttttacttttttattaaaattttctaagtttttttttttaatttataactttgaaactttaaatgttattaagggttttctcgggagcagctagtccgcccccccccctattgattcacgcccgtatttttttttaattttgaaactaagaaatttttaaaaaaagcttaaaaacacgtgggaacgtaatgcacctgtttttaaaaaaatattattaatttgacttttttttcaattgtccacctgcgtttgggcaagcacacgcccaattgggtcgaacacaatttgacgcagcacttcaacttcaattttgacattttgaaacatggtggagcacaaattggtttctacctaaattaattataaaaattaataattaaaaaatttttaaaaatatttattcgatttaattcaaaatttttcatcttttttttcacttgaactaagatgagaatggtcgaacacatgaacaacaccacaacaattgcgttgtctctgtgcgcttggtcagctgtgtccgcaatgcgcgacgcgacttttttgagcgcactttaaaaaagaaataaatattcgaatttattttaaatttttatcaaaaaaagatatataatctatatttgcaagaaaaatatagatatgtttataatatattttttaattcccattttgaatacagttttttagtgcataaatagcctgaagggatactgttgttacagagatttccaaatatatagattatgtcaaagttaaaaactcctgcattttataggccctcctatttatttgttttatgagtcaataggttttttgtttccggaattcagatcccaaaaaagcccaagaacaaaaatcctaattaggcttcattaaaagtattttcaaaaagacacccccttttgcctaggttttttcataaaaatggattgccggcgaaaaatctttttatacatttaagtcaattatttacagatttaaaaaaatccagaatcccagtctcaaagttaaagtccaagaaagtcagcaataaactcataatcttattattttattcctctccattttttaatacagtaaagtttacaatatccggaatactgtagtagcaaattggtccttcttcactgcttcgcccttttcactatcatttttctctttttcttcaactatttcgtcacccgactgtttttgtctgccatcttttcccttctctccttttcgcattgtctctcttttatctggctgatcatttttctgatcaccgtcatcatttccttctttatccaattcctcaacaatattgcccaaatttttgcccctccatcgcattttcaccgccgctcgctgttggaccgtatttattggacggccgccataccgtaatgcatttgacaatttgttgccaccatttaatgagccattaattggaccaatttgatcgggcttttctcttcttttaagcaatttgataaagaaacttttactgtatagtggataagtgaaagaaacggttatcgatcgcaagaaaatccgatcaaaaagtatttggtcagccccagtcaattgatcgatcgattgattgatcccatatttagcaacactaagactttttatccgtagcctttttattttataggattatcaatcaactgacgcaactaatgtgattgatgctaagcgtaaccgtgaaaaatttaaaaaaaaaataattctaactttaccatattcccctcttaatttttccgattaagccggggttgattttttaattgatttaaagtattaaaataataaatattaatagtaatcccagtccaattttacgctttgatgaaggttgcttttggagagcgattgtttgcaccgatttgatcagcgattgttctcaggggtttctgaattttcaaaaaattatatataaatattaattatttttaatattattttacatcccgcctgaccatcatattttcggcacgatattgtgcatagaaatggagaaaattggtgcaaacggcatcatcatcgttgtccaacaaccaggaagccatcttcaaaaaagaaattgtgcctaatttattgggtcctctcatagaattaataagaattatttgcaccttttaaaaaataataacttttaagattcatagtttgtttgacatgtttaataaaatttaataactatcatatgtatctatttttcatagcgaatttattattttttgcagattttttcaatttttggctaattttaaaattaattttttcgggtccaaatttggcacagacttagaagcaaaagttaaattggacagcttcaagagaagtggaccactatgctcaataaaaaatgtaaaatacatcgataaataaataaaagttggcataattttttagtgggtgcaaattatgagacgacccaatatatgaaaaatatttaaaaaaagataaacgataattttgccttgtgaattcgttgagtgtctctgagtgtgacgaaggaggataagcggaaggaaggcatttcttgaaattttaaaaatggttacaataatccccattcattatatttattcctaccgtaatcatcgcccaaatactcgaacactttggtcgggtcgaccggcacgcaacttgtccggaccaaattgccgaactcagactcaatgttggcacaaccaatttcgtaaatttgtttctaaaatgcaagcacatcagctccctaagtcctagcaataaagcgaaaaaatgtgttcaaaaacaataaaattcccataaattatattttcaaatactgatttaatttttggaccctaacaatttttaatcctaaatttcaagtttcgaatcctcccacccatcgcgtttaagaaatactctaccgtatttattactctaccgtatttatatgttttctaccgtacaatgtgctcgtggtttctgtagactggatgggtggcaaaaaaggcgattgcctccttcaggttgcgcatcttttccaaatagtcgtcaatgttcaacagcacattgcccccgtcccgaatggtgttctccagcaccgtcgttttcccatggaattgaatggtcgcgtccacggtggacaacagttttcgaatgtctttgaaatttgaaaaatggcaaaggttcaaaaaatcattaaaaaatggctggccgaaaaatgggctcccggtaaattggacactatcgtataaaaataaataaataaaaaataaataaaacaaaattttggtttggctaaatgattttattttattctgcacatacttatgttttttataagcgtaataaaacggaaataaataatgtttttattaacataaaacttcagcaaaagaaaacaaccataacatccaaaagaaaaaagttttcttttggataggattcccatcttttgtgcaattttagcacattgaccaatcttcaccctttttcgtgcattttttttggcacattgatcaatcatcttgcatgttgaatgcttgattctaagtgccttaattattaatccatttaccctacccaaatttatttttcaactcaattcctgggtttattttaggatggtgtccagttttcccgtgtccagtttcctatttggagtccagaatccgaacaaaaggagaaaattaatttttctctcaagaatgtgatgcgagcgcccccagaaaaccccccgagtattactccgaaatgcataaaaacaactttttaatcttttttttatgggaccaataaaatacaggattacccttaatatccatgaatctcgattttttattatattcccgtctatttgaatcagttttggtcaataaatgtgaattttggtgactttcaatgaaaaaatcttcagcgagtcggatgggtcaccttttatgaaattacaacaatgaaatagcatcgttttgtaatccaagaataattaaaagaataacacggggacaaaacgacaaaagtgcccctctattcgtccatttccctgtgtgcttcttcttcaactgaacgaatatgcgcccgcgtggcgtctttccccaaaaaggtaaaaggttgtcccaatccgatgatcgcaatagacgtgttctaaatggaagttttcggggtcgctgattaagaatatggcactggcaccaattcgagaaagattccaaatccctaacgagaatttgaacaacaaaaagttgtaatttattttagaatttggtattggtct

SEQ ID NO: 7693 - DNA, 1289 bp, Heterodera glycines
cttttcaaatcagtcatatttacactggtcaggtgtctttttttgcctatatttcataacatattcccgttgtttttctgtcaaatctttttggccattttgaattgacgcaaaaaaaccacagatgcaattgtctgctctgcaaaaaaaaattgatgccattataatgtcattgttaccatttttagaaccaaaggccctttgccatgtcggacttgcgtcccgttcagctgccgaaattgaagcgacgatgcggcacattcggcaagtggatggggtggaaagggagattcggtggattagtgaacttgaacaatcagggcctaccgtatcattgcaaatttttgaaaatttcaatcaaacagagtttaaaggaatttttcaatgtatttgccatatctgaccaatttttcatcagaccgtaccatggtctgctgttcctggacgagtccatcccaaacccggactcgaaccccttcgtgcgccgtttcattgatgaatacgagccgagcagaaggttggccaactgtaacaaatttgaaagcattttgctccctacacaaattcataactcattttctgtctcctttttagcttcgaagagttggcccatctgagcggccttcccattgaccaagtgttgcaaatcgtccgccactatttgctgtgggcccgtgccatgctcatctacccaatttgcaccacaaatgtgtacgccaacgcaccgcaacagccgcacaatttcagaacgtacttcggaaccaattaattagccactattattatttataatcgaggataatttttgtcgaaatttgacccaataatctcggacatttttgttctcgaccattttgagaatttctcgagacgtttttaggtttttggtaaatttattacaaacatcaccaacatagaatattttattgatttcatttagtacagttttgacgccatttttagtttggaggcacagtttggtgaccgtttcggctccgattgctgtcccatggccgatgtgttggaggcgttttcgcccccgtgctcgcttggctcctttcttcaggacatgaccatctacgcgggacgtccctctctgcacatgtgtaattaaaacccgataattcgacatgtcgcaaaattattgctttttaaaactcattgcactcaaaaaattgtcaaatttcactgggggtttccactaattttccaatttcagctttaatggggtttctgctgcgcaaatcagtgctggtccactgcacaccttcttcttcctgctgcccctt

SEQ ID NO: 7694 - DNA, 1443 bp, Heterodera glycines
tttaaattttgaaatggaagtaaggttcaacaaattttatcgccaccaaataacaaaacaagccgcacaaagagagtgtggttcggggatgtcctcgggtcactcagaattcgccacgtgccaattgccgtcgctgcttcttcttcgactctttcttcactttgaccaatgcgccggccggcttcgcaacgacgtcctttttctcggtcagaatcacttcgatgtgacacggctaaatgaatgggaatgttaatggtaatgggatagtgcacaatcagtcagaaattaggaatgctttgaacaaaatttggcgaattttgaaatttcaagccgcaaaagttaaagtaatccaagacaatttggacatggatgatgggtttggaaaatccgctaaattgtgaaaaaatgtttccaactctgaagaaaacgcaccgaactcatgtacggattgatgcgcccgtgcgcgcggtaagtgcgccgacgcattttggcggccgcttgcacgacgatgtggtcaatgaccaaatggtcgacgtccaggcccttcacctcggcattactctccgcatttctgtgcaaaaatgacgatacaaaatgcaaacacttaacatttggtcaagtttgtttattatgaattttcttgtgggtaggctaggatatacggaaaccaaaatggaattccaaataaaatgtttttagggtcccaaacagaacggccttttacctgagaagttggagaaggaactcggcggactttttcggccaacgtccctgtgttgtgcctaacaataaacaaaagtgtaaaggaacatcattagtctaaagagctatgtcaaaacccatcccatcccggatttttaccactttaggcgtccaatcaatgaccatcctcagtttcattgactataattttttcttaattggtcaaagcatacattcttggtatcaaacaaaagcttagtctcgggaatttacaaacacaaagaaaaacagcaaatactgatttcacatattctaccggtaccgagaatgtaaagtttgaccctagttagaaagaagttatggcctaaggatagtcattgatcggacgcctaacgcgcaatacacccccccccccctacggtttaccccacgcttgcgcctgcgctttgcgtcccacgccgccgttgaagtggcggaacggcacaatctccttcttctcccgtacattctccagaaagcggatggcacgcttcaacggcatatgtttgatggcacgcgccgtctcatgtgtgttctaaaaacaatgaaaatgggcataaaagaaaacgaaactatacttgtctctacgctcattgtaaatataagaaccaaactccttgttccgtttatcataaatctcaattcgtggccatattctccaatggccaaaattttggctgctaatacaggagctacttaaaa

SEQ ID NO: 7695 - DNA, 3668 bp, Heterodera glycines
  unsure (1)..(3668): unsure at all n locations
aaaaattcccagttggtcccggttcccgatcccgaaaaaaaccgaggtcccggtcccggcttctcaggtcccggcaagtcccggtcccggttttgcccaaaattcccggtcccgctgctctctagtgcaaatttattaaaaaattttattccttataaattttatcggttgtttttgcaattgctaatcaaaaatttctcaagattttcggcaatgaaactcactgttgatccactcgcgcatccattcaaatttggatttaatttaggcataatcaaaaattttttcctaagagatattcaaatcggaaaatatttgaagaaaaatggcaaaatatgaaaaaaatctgaaaatatgtacaaaaaatggcaaaatatgcaaataaaagtcaagatttttatacgcaaagacaaaagagaaagtgttttcctactatttagagcatggagaagccaggaaaaaaatgaatttgcatattttttgcagccctgccaatcaattggttcgactcaccaatcattgcaatgccatccattaaaacatcagtagcattagcactacggttccgctttatttcaaaggatgtgcgatgtttggtgctcacgcttcgggccaaacttgaaccagttgaactgcccagtgaaagatttcggataaatgtgccggaaccggcgggaaagagaaaaagtgccaatgtcaatgataattgatcagatccttgaaaaggccaaggatgacctttcgaaagtccaaaaaagtggcgccgaatattaaaagtggtaaaaaggtgacattcaatttttcacataaatttttgcacgaaatccatttcaacatcgcacaatttgactaaaatagattttgtttttcaaaaagctcgagccagatcgatagccggatgtatacacccagcttaggccgggtccggcttcatcaacagctgaattaaccaaaatcggaattccacttgccaaaactaattgagttcattgagcagctcaaaaaacggtgccaaaaaaggatcctgggttagctaccaagccaaaactaattaaaaaaatgaaataaaaaaataggtaaaaagtcttttcggaattttttcatttttttcactgttcaaaaaacaaactgcaccgagcagaagagcttcgatgactcatggaccgagaagatttgcgattatttgaacctaagtacaaaatttttaaaattagctgattgacactggttaattattgtaaaacggatttaaaacttttcaatttctcaaaattcaaaaaaaatcattaaaaaattcgaaaaattaaaacggttcttatgtactaaaggctattttttcctgagctccccgtggcctgaaacgtacgaaaaacatgtttttttggngcgccggacttttcgacagaaggacctttcgacagcaaaggacatttcgacagaaatatttaaaatttgaggaggggacttttcgacagtagagtaattaaattcctaaattagaggtgtaaaatcgtaaaattttatcgaaaaagcaacaaaattaagccagatcagtattgagataaattatttttaaaatcaaaaattattaccaagagaataaatnagtaaattttggtgattcatttttgagaaaatttttcattcttcttagagttatatttttgaaaactttaggggccgattcttaagggtgtgttttctgaaatttttcattgtaaaaaatgtaaaaatcgtatccctagtaataatgatttaacaatacattttagtatgtaaataaatttagtaaaactggcaagcaatataattcattttaataagaattagttgtttttatgtttactgtcgaaaagtccattattttttgtgtttctgtcgaaaagtccgggagtcttcaaaagaattaattttattgtacattaaaacattttctcccaattaataccgtaaattacagtacctattcaaaagtattttctgtccggttgaaaaatcactgctggacttcctcattaaacaagcagatgagcatttataaattcacacatatcgttttattttaattgaacagaaaatctctcataaagagtaaaacagtgccttccccccccccccctttttcgtccattttccctttttcatccgtccaattcgtccagtgccaacttcggcccgcggcggcgtcgctgcggcggctcctcgtcgccgtcgcggcaatgatttgttgactctaaagcatcaataggaaattgattggtttaagcagcatttgggcagcaattgctcttccaaaatgggcaaattccacagatataataagttttgtcccggacagtccgtttgtaattacggcacatcaaaaaatgccgttgtttgcgcatttaatgatttgtccctgtcttgccactgcgccttccttgcccacaataacaattagacctgtttacctgttcctccatcgtctgtcattatagtcgccatttcgctgtttccgacgccgcctctgccgatggtcagcgggggcaactgccgggcaccggcgcgtggcaatgccatggggggcgaaagagggtggacgcccatctgccaaattgccacccattagtgccaataattgtcatcaatttcccatccactaatttgtgtactttttggcggctgttcaataaagtgatgnnggagagcatgattggcagcagcaaatggcaccgaatttgttgtagaattatttccactgttcctttcttttggagaaatggtggtcatggcatttgccaaagaattggcattgccactggaatttggtggcatggaattgggcatggcattgatgacattgtttgccattgtcgtcgttgaatttgttgccgctgctgcagcaccaactgatggcggcaccatcagactcttcgggctcactttgttgttggcgcttccgttgcctttggcaacaccatttggcgacaacggatggcacaatcgcaaacggcacaccgtcctgataaactttctttggatattattcaaatttttgattggtaaagtgtcaatgtttcggcctcgagccattaacactaccaaattaattaatgaattgcttaattactgtaattaattaataattgcgctagtgaatgaacggactgaccacagcaaatggccgatggcgaaccaccagagattgtagccgaaggaggccagcaatttgtacacgtccatttccttggaagaggacagttcggtgaccaaaaaggagtcgaaagagacggacagtcgcgacacaaagtcctaattaattgccttttaattggcctatttaatgggttttgttgccgtccacctctgtattttggtactcgggcggcaattcgcgctctttgctccgggcggggaatttctcgtggcggcaaactctcggcgaacccctggggcaaataattcgagatattttttttaaatcacggaaatatttgaaatttttaaaccccctaaatacagaaaatgataattaaagtgaaaaaatcaagtttttgcataagactaactaaaaaaactcgaaaattctttcccgagaaaagcaaattttaaaattttttcatttacgattaaattttttgtttttttcaccattttttgtccactntataaaaatttttttttaatat

SEQ ID NO: 7696 - DNA, 1922 bp, Heterodera glycines
  unsure (1)..(1922): unsure at all n locations
aatgagcggaaaaattttatttttaaaattatttgttatatagattcctatattgtaatcactttttaaaaataacacaccgaatgtattaagtaagctgttcctttgcagaaacaagggcccatcgtcgtggtgagcttgcccagcacaccctcagttgcgtcatttctccaagaaacttcagggtctttttggtgaaaaggcttggtcttatgccttaaatatagtaaaactttaatatgactcaaataggcgaaacatttaagcaaattttgaaaaagccgaaaaattattgtttttaattaaccacaaaaaagttaaaccagcaggctttttaaaaaatgaaattcatgggaaaagctttaaattaattccaagcgataaattttgtatttttcagaaaaattatcaacgatcccagataggacttatcatatgtagattttgaaaattagaattctaagctgcctatgaatttaaaaatgattggaacatacggagttcccaaaagtgtgtcgattatgtcaattgcttggcggaagccattgcgtgcagtctttaactggctgatgatttcttcgttgccctctgaacggacgagcttgattttgtcggcagcgtggatggcgtcgtattctgaatgtttaagttgtatgttaggtaaataatatttggaatcaaaaatatttaattattggacacttctcaaacaacaaatttgaggggcggtgttgactgccttccccccttccaaatatttgccattttcgtctgaaattagcgattgtcgttggtttcaatcacaataacaaacgacttattttgcgacagatttggctttagtcgttcgtaattgtgattggcccgggttaaaaatgttaaaatatatcttaatcaattaccctaattttcgcatttttctatttattttcaaaaaatttttagtcaacatctactaaaaagtgttaaatgaattcataaaaaaattacccgcggccccttaggcaccgcttctatcccagagcttagctgtgatgacccttacttacattgaaaaatcttactacacacacacacacaaaaaaaatattattttttattaacctttaattaaatcgacggggattaatttattttcagttgttggaacgccaattaatgccacagaaaaaataattggaaacatcagaaaatacagtgccatttttgaatactttatgaaaatgattgtgaacgtttcgagataaaatgaatggaaatgcacagccaaaaggtcatttataataatgggttttgtgaatgccaacgcataaaagggaggcacccaaaaggtcatacatccatttgtgcagagcaccataaaaatttaaatatcagatggaaaaggttatgtaatgagtaatatttttggggcaaaaaaaaggcaaatacaaaaattgttacacataaatttagattttttattttgtttcttaaaaattattttttaaagaattgatgaattatagaaattttggtttagtcatatgtttagactcactttttaatcctataatgttcataaaagcaaaaatgtaataaaaaagaattaaaaaaaaagatttaatttgaacaattggttaaatatttcaattttccctgctctttaatcaaaaaaaaaattatcttctggggatatgggtcaaaaattaatgaaaacaattattcaaaaatgggattgtgcgcgctgcactgacccgacggcagatggtacttcaggtagtgcatgcacatggtcatcgaacatttggacgactcgaccggcccgaccagcagcatcgacttgcccaccgagcggatctggtcgcacagaatgcgcgacacgggcaatttggaggcgcaaattgcgtcgatgatggtgtccatgggtcacnctggaaaaa

SEQ ID NO: 7697 - DNA, 5891 bp, Heterodera glycines
  unsure (1)..(5891): unsure at all n locations
cattttgttaaaaaatttatccccctatggagcggaagaacaggtcgcgcccctccaagaaattgaaatttaccaaaacctaagaatttttcaagacaccgaatttaaaaaaaaaaaaactttttaaaactcgaaaaagttgtgaatcccggagtttttaagaattttcctagtttaacaatttatgagaactgtttttttatttttcgagtttagattaaaattattacaattagaaaaaaaatttctagatttttggcgaaaaatttggtgtttcgggcagttagccgcaatttaaaacaaaaattaaaattaaatattgtaattaccaattgacgtggctgcaattgcaccgacagcagtgccttagagaaaaggaaaacaaaaattattattatcaaatgagtcacaaattgtttttaattatataaacagcaatttatttattttttgttttttgtttacccggctccgccgttgctcgacatattcgcattgcacaaatgtccaaaaattggcgcatttggccaagactgaaatttaaaaacgtatttttcgtttttttgaaataaaaaaatttttatatgtaattcaaaaaaaaatttttaaatgtctgatttcaaaaaaaaaattaaaccaatttttcagtttctgggatttaaaaaaaatgcggggagagggcaaatgaaattcacccctaacaaaatggcaccaccaacaccacctgaaccccgtggcattcaaaagggcccttcgccgggcggcgatcggctcgcagtcgcggcaacgcgtggaatggccgcctctggaacgagttctgtcaccaaaatgcaaaattaataaattaaagttgtttctgtttttttgctcacgtcggtgacccaatgccaatgtgccgttggcattggcccggcacagagtgcagaagacgcaaattggctttgaacagatcagcgaagaatctgtgaaggaaaattggaatagaaaaatttaagtcattcaggagatttaaatttaaatggaatggcactgaaaatctcaaattttttaagatttaattaaacaaagaaaaattcgaaataattttttgtataccaaacaaaaacgcaaacagttcgagtcttattgttaattaaacagttttataaagctttacaattgtaaaaaacaaaatattttcggacagaaaaacagacggagaggcgggtgaattgaattatttgcaagtctttcaaggacaatgactttcgcttccattcggcgcccgaaaaccggtttttaggccccatttttgttcgaaaaaatatcggccgaacattgacacgtttgtccgatgtcatagcgctatattttcatacccatttatacagtttaatactttttatatatgttcccacttcaacaattcgtctccgaattgggccgtgatccgtgggagatgttgcagttgtttttgccgcggttttctctgctcattgtccgccgcaacaccaccagtgtgctcattccgttgttgttgctgttgtactccttcgccctctccgacactttgttgccactttttccgtgccgccgaccattccgtgccgatgccctcccgctcgatgaccacaacgtccatgcgttgcacaatttcggcacggatggcctccgcaaggttggcggcggatgcagtggcgtcactggtggtgccaagcaggtcgtacacgacgccatcggcggtgccggtgggatccatgggcctattaaaaaattcggaaggccttttgacaaattttaacagtggaaatcaataactaatcaaaaaaatcttttgaaagactaaaaaatgtttaaaattactaaaatgcattacaaatttctgtaaaacctttaaaaaattagggaaaaatggcaaaaagaaagcgttttttgataaaaatgtaatccaaattttatttttttnttagaaatcggggaccggacgggtcgaaaaatctgtctaatcaaaaaccggaccatttctgattgattcgattcaagcaaataaattttcattggtcaatatctgtttttatgatcagtagaattggaattaaaatttcataaaatggttttatctttctgtataattgaaaagatttgagaatcagtagagagaaattatatatacaaattgatgataatttttgaatgaatgcctcttttgccaaaatctaagcgctttttgagaatatttaaataattattttataatttaacacaataaaattgtcaaaaatgaaattatgcttatttttatccgttttaattgcatttttaattgtgctaattgaaattggagcagaaaagaaaaaattggaacaatcatttgaagaaatatttggagaaaaatgggaagaaaaagaagaagaaaatttagaagaagaaaataaccaaaatgaaaatgatcagaaaaaacgagaaattattgagaaattttacaaaattaaagaaaaaattaaacaaaacgaaaaaatatataccagaaaagaatggaataaaattgaacagaaaatagggaaaaaattggggacaaatcgccaatacatttacaaatggatcaaagaattaaatcttcaaaaatataaatgccacaaatcaaaaacggatgaacaaaaaattgaaattattcaaaaatttaattcaatgaaaaatgagtataaacaaaaaggaagaaaatattcaaaaaaagaatggaagaaaaatttgcagaaatttataagaaaattggaattaacgaaagaagaattaacaaatggaagaaacaatttggaatgaaaggaaaaataacggaaaagaaaagatagaaaaaataaaaatttattggcaaatgaaaaatgaaaatccaaaatgagtgatggaaaaattgcaaaaatattgaaaattaatcgaaagaacattttcgaatggaagaaacattttagagaagaaaatgttcaagcataaaaatggatgaattgagtttttcaagaaccaatgacccaaaattcaattattttacagagaactctttttttatgtttgatgtataaactgttttaatgactgcaaatttaaattgtttacgtaggctcttttttttaattgattcattaaaaaaaaatttatgacacttgaaaattgacagtgccaaaatgtaccgaatttttcatgaaaaaaaataattttttttttgcgaggcagtacatcaccctttcgccgcccacctggtgttgttggtgttccgcacttgggccaacatgtgttggaagtccaacgggcggccgtccttcgcctccatgtacgccgggtcgaggccgtcgtcgccaaacgtgaactggaccacctcgttggtggaggtgcgcaccgtgttgccatagttgacagccaaatcctggcacaattgaagcgagtagaaataataatacgataggctaattgtaaatcatttttaatgttagaaaataattttttggggaaaaaaattttggtttaaaattcaagggttgaaggcctttgtaaaaaaaaattatatcaatttttaaattaatcaaaaattgctaaacaaatttttaattcccccgaaatttattatcccctccaaaaaagccataaaacaaatggagtagtaaaaaatacagtactttcaagcaataaaaaaatccgctcaacccaggggcagaaatttttgcgctcaaagtgcggcagggagcggttctgcgaatcaaaaattaaaaatttccaagaaaaaatttcccagcggcgccattggcaacgccgaactgtattgtaccattattttttgaaaattagaccccaaaatggcaaaatttgggcatggttgatgtcgtctgtttttaattaagatggaaggagacgatttaatttttgatccaatacaacggaactaccaaaaaccaaccgacctcaaatccgtcagaaggccgtttgccggagatggactgttggccgaccagggcgatcatctgcgcaatgttgatgaaggatcccttggaaccgcactgggccatcgtcaacggcgccttctttcgactaaaaaattgcgtaaaatttgggcagttttagacggcctttttcggaagttttatatgattttacaataattgggcctcgattaattgggtccttgggcctgttttttacggcacacccacctcaggtactgcttgcacgccttgcccgcctggtcacggatgctggacagctccttcaaaattttggactccaactcctccaccaggcccaagtccggcttgtccttctggcgctccaagcgcatgcttttgttcagatggtcacaaattttgtagccggtgttcagcagcacacttttctcttgcaacaggttgacattgggcttcacatcgccaatgcctgaagatggagaaaaaaaaacaaaattattctgggagtatggcaggcgtcgtggcaaaataagaatttttgggtgcactccaaaatttcccctgtaaattaaaaaaaatcgttaaaaaattccaatttttttttcaaaattttggcggtaaaattttgtcccggcgtaatttaggccagcaaaagtatcaattttcaacatctttttttggttagccgacttttgcggaccactatttcagggttgaactgtctaaaaaaacaaaaaataattatttccaaaaattgcgttacctaattatttttaattttgatttttccaacttgaacatcgcgcttaaagatgttctgatcaatagggctgtcatttatatgaaaatccatatatttttttcctggagtgttggaggcctgaaacgtataaaaaatgtttatagcttggtttcaagcttctaggatggatttctatatccatatttatccattttcgcgatttatttcatatattttggcatttatgcccatattttgcgattttataagcatatttttgacatccctactgatcaccttaagcaataaacatcgaaagtaataaaacaattttatttttaagaagttaagtttccattgataaatatagtatatagttgctcgttcttaatttcggattcatagttttataacagcaaattacggacaatgttagggaaaaggtagaactattttgagtttttttttaaatttaattgtttgtcatgcctgataaaaatttaagctctaggctaaccaaagcaatttttttttaatttttttttctttattacacagttcaactgagaatagcggccgaaaaagtcggtccgcaaatgtctcactacgcttttttttaacgacattttcaaaaaagtattctaagtttttttttgtaaaatttatgtctggaagggtggggatggaagtcaggctcaagctgaaaactgaccgattgagaagccccggttggaaaaatagacggcggaaatgcgtgccaaccgccacatcgcctcgatggcatggccctcgccccaatcgcacaacaaacggtagaaaattgaacatttgctttcagagccgagcaatgctttgtcaagcgaaccgcacagcaactgattatttcggatgatcacaaaggtgtcctgattgtgagtgataattgaaacaaagaaatttttaatttttaaagagtttttgcagaatcgttttaagtcgttggaaaaaattttaaaaaatcctttttctttagaaaataagaaactcatgaaaatatttacaaattgttaaaaaaactcgttagaaattgaaaaaatttttggttttccggcgaggtataatcccgctgcgaatttgaccacgccatttttcaaaaagtccgtaacacttatgggcaaaatttttaaaactcggttttgtaaatgtgttaaggacaggacgggaaaaattgtcaatttgcgatt

SEQ ID NO: 7698 - DNA, 1865 bp, Heterodera glycines
tttaacagattttcaatgaaaaatcattatttttaccaaaaaaaatcaattcttaccagtgcatttttactcccgttttcgggtaaaaatttccgggagcgggatcgggagttcaaaattttccgggacgggagtcccgaacgggaatcccgtaaaaatcccgctcccgttaaaaatcccgttcaccgaaaaaagcgggagtcgggagcgggactcccgtaaaatcccgcgggagtcccgatcccgccgggctctacttataaccaaaattattttttctctatcaatatgcaaaatttggtgcaaattgtatgagtagaaaaaaaagttataccgtatttgctctttttatataccatggtatattatttttcaaccttctcagaagggggtatataattggagactggcagactaatggagaccaggagattatttttcggttgatttatttagtggaaaattttttgaatatgttgaacatgtcgccaaaaaatgtcatctcgtcaaaaaaaaaattttttctattgaattttttgttaaagaacttctgaaaatgaccccaaaatggcaaaaatatgtaattttcttgcttccggtatgcataaaaaattggaatttttaatgaaaagttaagaaaatatggaatcgttttggtctttaaaaaaaaaaaaattgtgcgccagcactaagttgaaggggtgacccccctttagcccctggccaggaaggggtctcaaaaagttagactcgggcgggtgtgctttagcgaaatgttagctcaggcgctattgtatattattgtagagctcacctagtcacatttaaaaaaaaattttggacccctagctcaaagttaagtaggtcatttgtccgaaaaactggtcaaaaagggaatttttccgaatttttttagagttgcatctttttttgcgcccgtagcggcttttaagttgccgtgggtaatgggcgaggtggtttttggttagagcattttgaggcggttcttttaaaaaatttgagtccctagcccaaagttgagttggtcatttgtctaaaaatttggtcaaaaaagtcgacttttcgcagtgagtgggggattttgggggtaattgagtgcgtagagcttgatatttgtttttaaatgggttaaacaatgttttgacaggtctaacaatgtttgggagtagtggaacaaagtgtcgacaagtcggtcaaaatgtcgaaatttttaacgtgatcaaaatgaagttttttttgtaattttttatgttttgaggcatagaaacagccttctgggcttttttgcgcgagtttagggcaactgaaacggttaaagatggacgaaacgatcacgaagaagccggccaaataaattattaaaaaattctatttatcccccccccggcacataaatggagactgggagattatttttcaacctagttcaaagggggtatataattggagaccggcagattaatggagactggcatataaaaagagcaaatacggtaattccatgtaattttaatcagaaacgagcgaaatttcgggttcggtttcggcagttccgagaagttcgacccgattttgataaatttttaattctttcgggtttccggttgttggaaaaattcgcccgtttctgctgatcagagaacacaacaaacattaacatagctggcattgatgtagtgggagtcgtcgatgcccggcctcagttccaacaccacgcggttatggtctgaaaaaggccaaaacatttaatagataaaaattcgaattaaattttaataaagcaaaataaaaagggagggatttaaaaaaataatttgaattttttatgtaaattttgtgcaatt

SEQ ID NO: 7699 - DNA, 3088 bp, Heterodera glycines
aaatcgtttgttgctgttttcaggaaagcaaactgaaaggaccttcacttttttccgcaatgccattgcatgggaacttcaaagatattgtggcagaagtgaaatttacaaatcgcattgaaatggtgtggatttgcagcaacacgaaaaaaaagatgttggcttacaggtatttgttattaaaacccaaaaaatatttcccaaagccaagactttgttttctttttcaacggatatttagtatttaatgcttgagcagcttattcgaaattttaccattctttttaaatttttggaccccaaaccgggattcaaacattaagtccaaacctcaaattttcgaatttagcactttttgaattttacttttgttcgaattcgggtacagagatacgaaattggtcgaaatggattgtcatattcgtgatcaacgatccaaaaaccgtcctaaagtaaatatttttaaaagtacataatttaagcacatttattagcattaaaaagtggattgtatctgatgcctaaactacaaaagtatctatttttatgactgcctattttttttttttttttgttctctccgacgacatttattaacagcatttgtatgaaaaataaacgagggttactattttgagtcaattttttttagaagatgaaggggtttttgtccgccggcgttgccattagggctacccggggattttttatttttatttttaatgaatttgctaacaataaaaagtataatacatttttggaaagccttttttccttcgcacttaccttcctgtcgtcctatgcaattcttcgaaaatgttcctgcatatttttgttactactgttttcgtatttatttgctaaccaataatacaattttcagttacgaagttccattccaaaatgcatccaagctgatcatggacaaactcatgcggtggtaccacagcgaaaaccccgacaaacagttttcgcttgttccgcttccatttgaaaatgttggacggatgagagaagcgctgaacaaagagttggatgcgaactacgacggttgtcgggatttcgtaggtataaatattatcgttgtgctctttaattgaattatttataaatttgctaattgttatacccttttattagcaaaagggggtaaaatttgttaacctttttagcaattgcaatattttaaatgggtgcacaaaaaatcgctgaaaatttcttgagacatttttttcttaaaattttctttaaaaaactctaagatttaaaatttgctaattgtaagttttgaaacagctaataaattattgacatccttaaccaaaccatcgcgctggttgaactttcagcagaatttttggctctaaagtttgcacgaccataaaaaatttacgcaacccttaaataaaatgatctttttaacgctttaaaaaaaattgtggagggatcatgcaaaaaaaaaaaaccaaattgaaactttttgaaatttttacagactaatagataatcatagagctactgatattacaattagcatggacaattcaaaagcatttccctttctaatttaacgcattttttaggcggtgttcatttctccaaagtgaacacctccaaactgacagctgcgctgcactataccattctgatgccaagcagcaacaaacaattcaggtaaaaattggccggaccatgcaaaacagcaattttacaaatactcaacaaagtttactcaaaattttggggctatattcaactcggacaactatgaaaagatttatgcccaaaaaacaggtgttgcctgcccagttgggcatcgcccaattgtttccgtcgagggaccctttctcccccgagtatgatccccgccccccccccccttcaactatgttttatatgtgtgtgcaaaaatttcatctaaattattccatcataaagacacaccaaaatctttgttttcttatttctgaaatgagccagacccttggcttcgggaggcggggctgaattcaaaaatcgatttttggggtgtattttttgttttttttaatctcgaattaggatgggtgtgttttactggcttttatagtagtttttcgccaaaaatgagtatttttgccattttggactatgtttcaaaaatatggcaaaatatgatgtggtccggcagtgctaacaatgagacaccgccgggtttgttaagagttgcttaaaatattcaaaaagttacccaatttctcccatcggcggattgtttccaacgaaattttttttttaattccatatatttttcggacatggttgaaaactaatgatatttagagggtttaattaaaaactgattcatttcaaattgtccattgtttagttgggacatggaactcattaaccaattctggcgcgatgatagcgaaaagcagtttgaagactaccaaattcccgaatctccgccctattggtccagcggtttcctgtcgattcagtacgcaattgacaaggcgttcatcgaattggtccgttttaatatatatatttttgaaaatggacttattgttagtttgtcgtttttcacagtgtgcccaattaaaaaaatatatagagatttcacttttttacgtgcttttaaggccaaaggtgacgatgctttggcaaatgtttcgctccgtctccaccgtttgcccattccgtcgtacatgaacaagcaaatggccaccataacggtgcccctttttctgaccatgcttttgtttgtgttcgccttttccatgctgaaggacattgcggtggaaagggagtccggcatcatggtaaggatgtccaaatgggctgtactaaaaccttctgaaaatacaccgaaaagacaaaaaaaaaaattaatgaaacgaaatgtttttttgaaaattgtgcaaaagtttaaaaaaatttactttcaaaactatggcccaccacatttttaaaattcaaatacttttaaaacttttaatcacttgttttaaaagaaatattgtcagctcgttttaagtaacattatttactattttgatctcacttttctattttggctagttgcaagactgaaaactttttg

SEQ ID NO: 7700 - DNA, 3842 bp, Heterodera glycines
ttattctatggtacaatttttgcatttcaattaggacttttaatgaatcattatgggaatggcgagaaaattgttcaacaaattagaaaatcacagataaaaaataaaagaacaacataggtaattagaaaaaaaaagaaattttattttttcccatcttttaagaggataatgaggattttcaacaattgatcaatttgaaattttatttatttgttatttttttccatcttttaagaggataatgaggattttcaacaattgaccaatttctttgtcacttttaaagagggattttctttctttatttataataaatattcattttggtcattttttcttcattagaatatcgttttctacttaaaataataaaaaaattttctttttccagtacttagctgttaaaccatcaaaagaaaattttcagcaaaaaattacccataactttgttcaaactcaactaaaattttaattcatgatatcatatggtagccctaacaattctctattagcctgtaaaatttcaaagaattttgtcaatattgaataatttaatgccaacaattgggtatcgaatttaatttaagatgtatcactaaaaaccacggagcaggacaaaaaatcgtctgccgaaacgtcacggacgaatttttggaccataacttttttttctttctcaaccaaattaagcattcttgctattattcgtaagcatttgaaaaacgctattaaactgcaaattttcaataatttatattcatgcacaaaaaaatcagtgcaaaaaaaggttcaaaatactagctttttgagttccttctggccataacttttttgaaacttaaccaaaatttttgaaattttgcaataataaacacacagagctatcgaacaataccaacaatgcttaatttgattgacagtgaacaaagttatggttcaaaaagtcttccgacgacgtttcggcctttttcgatttttgaccgaaacggcattgtttttttttgcatattttattttacgtggtgcgaggcggcaggaagtcggaacagttggttgaacaccgtctcgatgatcacataattcaacggcacagtgtccttgcggtggtattgcagcagcgaatgggcacacaatttccagtccaaataattgttgtcgatgatccagtgcaggtcctcctcaaccagaaagcgttcaatggcgtttggaattggcaacacaacgtcctgaacaggaaagcggtgggaagggggcaattttaaaaaatcgtaaaatttaaaaaaaatgaaaattcaaagcaaaagggcgtggaaaccccgtaaaagccccaaaaatcaaatacgcattgttgccgagagcgcactctccaacgcctaatttgaaaaacttttttttaaaacctcaaaaaaaaaaattttttttttaaagaaaaaccgaaaaaaaggaaattttcgaagtatcctaaaattttaaattcaataacaaaaattttctggaatttggctattcatatgaaagtttttcaaacattgtgatgaaaagcgaacaagggaaattttttttcgaaaaatgagatttaaaaagtgaatttattagctttaaatactcaattccgaagctttttctccaaataaaaaatgttcttacgctttccatgacgtcatctttgccgaagagacggaaaacaatgtgcggcattggatgctttttgcttgtcatcaaaacgtgttggtctaacctgaattttttttttcaaaaatttaccttcaaatgatgggccattttttactcgggcaattgatgggcccccgaggcgacgagaacgtcctcaaaaaaggcataagtacgcaaaatgtgccgctccatccaatcgttttggcacaaattttggagctgggaccacagactgtccaggtagtcttcctgcttgggatagtcagtggcagaccaaattttcaacatctgaaaatgccaaaagcatcgaaaattagccaattttgaatttttacgaccaaaaaaatggcatgaaaaattttgaaatttcaattctcacatcaaagtgtggcttcgtccgcttgccaatgtagagtgaaatgcgcgccatgatgtcattcaatttggcgggcaatttggcgtacagttcagtgccaacccatggcaatgtgtgcaggacgaggtacacgaagaagttggacttaatctgaaaacggaaaaatgattctagaagaaaaataatgctattgggtgttaaagttaggttttttttcttccaatttttttgttgaaatttttcaagaccaaaaatactacattttcttccgtggccaagtcaacaaaattctccatgaatgaaacaatggattccggcgtcacaactcgcgcattgcaaagatcgcaaaggaaggtggccttaaattagtaaaaatgaaataatttattgtaaattttcaaaaaataattacgattcgaattgaaatgtcgtattctccgctggtgaatgtgtgatgaaattcgtccatgaatttcttcaacaatcgctcaccaaaatcggcggaccgaacattcagaagaccgacgagtgtggagaaaattgtgatcttctcgggcaaataagcggcactaaatttgaaaaaaaatttacaaaaaaaatttcttcacatactgatataggtaatctaatttcggagggtatagtttttttgtggaaagttgcaataagagtcagttagttatcttttaggccagttttgaaaaaaaatatattaaaatcaaagcgtgacggagacattttttaggataatttaagtcgatatttcggcttctatagtatataagtttaagttgggaattcttagttggtaaaaattggtgtcagtatgcgatcagcgtaacccccgaaaacccattagagcagattttctcgtcttttatggctaaaaattttacaaaccaaagcacccatctaattttctaaattcgtcaattttcatttacatcggcattttcgtttttttcaaacggaattcaaccatgtcacacagttagtctgacattcagttgaatgaatcatacaatagacatagactcgatttctaaataaaatcgacttccgagcgtttttcggtgcctcgactgatgcaaatgcaacaaacactgaccattcgtagagaatgtggatgatctgtccctcgtacgggtccaaattgtcctccaaaacgttggccaacgattcaattgccgactcaatggacgcaccgtgcaattggtcgtccaactttttgatcatgttcaccaattttggtcctatgtcttcgccggccggcattcgctttttcttcatttcaacaccgtccgcatcgatgtccatttctatgcaaaatttatgggaattttgatggaatttatttaggataaataccatccatcatagtttcgtcacccggatcccgacgcttttttggcatcgaatacataatgcaatgaatagataaaaagcaaaataggtatattttctgaaaattgaactttttaattgcaattaagagattctacttttttatgaatggtaagtttagagaaaatggaccaaataaaaatttttgttaaatggtctacatagtgataggattatacagagttgaaaaccggaatttcctgtttttcttttacaatttgaaatggacgttgtgtattagaaccaaaattaccggtctacctcagttcggccccgtatggttcggccccagccgattttttgactataacttttttctttgccaaccaaatccaatatagttaaatcattcgaaagtttaatatgcttagaagctttttctaag

SEQ ID NO: 7701 - DNA, 3591 bp, Heterodera glycines
  unsure (1)..(3591): unsure at all n locations
tccaggtccaggtcattttttggcaacctggatttttcctggacctggattttcctggatttttgtccaggaaatccaggtccaacatggaatccaggtccaggcttttttcaaaatatctagttctagtttgatggtgttggacggtttctattaaatttgcatcgtcacatgtttttctcatttttcgtgcctattttgtcttaaaaattttgctgtgctacccctaaaacagcagggaagtaccgaaaagattcattttttttctcatgccttagttattgagccactcaattttggcggttttcaacaaaatttaacgcttcagcgacacaaaaaaaaaatttttttttcaggggctaatgacataattaaattcccctaattcattgtcacagcgcttcaacagctcgccaacagtcagcaccaccgcgacttccccgtcccgtacacaagcggaatgttcggttattcgcgcgaaacaatccaacaaatgaactcggatgaggggctgaagaagctgcgaatttttgttgaaggcgaacaaaagccgtcaacattgaaaaattggatcaatttatttcgtgggaaaaaattatgaacaacgacgaacatattctatttcaatttctatgtagaagattaaaaaagagtaatacaatgatgtacaataataatttcttgtttctccatcaaatttagaatttttttggttttctgcgccgtataatataaatactaaatgtttggtaatactgccgatggtcccccccccccccattttttggtgaagttttttctgttctaaaaagccgtgaaaacacattttatgggttttaagggtcgctcgctgatcacgaattctgacattcattttaaccaatttcgaattccggattcgaacaaaaagactcaaaattgtttcttttgttcctaaattgataaaataagctaaatttagtcaaaaaccgtcacaacatcaaaaaaggtcattctatacagattcgaacataaaagtgaattttgatcgacttgtttgtttgaattcgggtccgggattcgaaattggtcattaagctatttaacactataaaaatacaaaatccgtaggaggggagggaaggacgacggaagaatgacgagggatggcggaggggggggggggatttggaagtgatcggatcggaaagaattaaaagaccggatggggcggggacggactcctttgggtgtccatgtgacagatagaatgaaaggggaggggggtaagcaaaagggatcattcttttcggcgttttttgtgcaatcattggcatttttattgcccatttcgatttgaatttgctccgtttttcctccccattcgcattttaaattatcttattcttctcctataagtgggatcaaaatacctatggcctatggctatattttcgagaaaatgaacttgaggaaacatacaaaatgtctgtcctttatttcgtcaaaagccatatgtacaaacacagttatgcaacaacaatttcaatcaatacatatgtcaacaatacaatacatgtgtatatcggggatggcagcatggacacaaaataatacatacaatacagtaatagtggtcatatgatcaattctgcacggtgacgcttcttggcgattcttctgctgctgctgctgctgcacggctcatcagttgaagtagctgtctcctccccctcctcctccgccgcctccagcgcccggtgccgcgttgcgcttgcccgtctcccagtcgtaggggaattcctggacgccggcgttgctgaggctgctgcgcaatgtcgcgatgatccagtcgtagtcgggcttgtcggtgtacttcatgtcgtcatgcaaaatttaatttgttagtttttaattttggaaaaacgaagtgcgcgggcggtgttgctggccctgaaaaaggaaagggaacaaaattatttttgtttttttcaaagcgcttcattcaaactcacgtcgtccctgatgttcgtttgattccggacgtccgatggtcgagttgctcgacttgatgttgcagtggaggtagccgactgtgtggagtcctctgagagcggcgtgcagagaatttgtgtattcattgttcaatgtgtgtaataaacctggttaataaatgtggcaaacattgaatacaggcaaccacaaaatgtacatttaagcatactagagaccagggttaccctttgtccttattttgagggtccaaatcttagaaattttaaatgtccttatttgtaagatttgtccttatttaagctctttgtccttattttcgtcttattttttggatttagggagaaatttagtttttaatggtaatttttgaaagaaatgttttttgaagcgaattaatatgcaaaatcttaacaagattcagttaatattcaaatttttctctcggcggtttcttattctctctaaaaaattggctcaaaatcgtaattttgtcattttttgaacaaaatcgttaagaattcgtattaaaaattacaaaaatttttccggcggcgcctattagagcaggggtgtatctgttcttatttctaagaaatgttctgatttggggtagtgccttattttcatttaaaagaggaaatttctgaaaaatttggctaattcctaacaaaattcattaaaattcttaaaattttcccccagcggcgcctatcggcaccgccggccccccaaaactcctatttttttcttaaaattagcccaagatcgcaaattttggtcattttttggacagaacttgttaaaaaattgcattaaattttcaaaaaatttccctgcggcgcctatcgacaccgccggactcttccctcacctatacccaaaaaatttaaaaaaataaaattgattttcggaaatgtataaatttctcatttctaagccggacttgcgcagaaaaatagttggcggtgagtaatgcttggttttgttgaataaaaatagcgggaatcccgtaaaatcgcgcagaagtctcggtcccgctggtcaattatcgggagcaggaaaaggatggacttcaattgttatttggataaaaatgcgcaatttgcgccaaaatttgaccgcttttaacttatggcactttgttaagaacattccatcaaattcaaagtactgctcaaaagcttaattttccattttgatgtaatcaaaccaagacacaatttgtaatcacatcaaatcagttttattgcacatggaaatgattacaacattggtgagcaaataattatgtgtacatattacaggcaattttgatcactggaatatgtatgtacaatgatgagcaattggtgatcaaatggggccactcacaaaatatgtacaatgatgagcaattggggatcaaatgggctccgccgctcacaaaaaaaaatatatatataagcacaatggtgagcaattggtgatcagaatggtgccgttcccgctgcgctcacttcttcttggacggcttcttcctctcttccgangtgctcttcctcttcttctgcggcgcttggctcttcttcttcttttcttcctccgangtgctcttcc

SEQ ID NO: 7702 - DNA, 2757 bp, Heterodera glycines
agtccgtttcatataattagctaaaaattttcagaaatttttcggacaacatcttctccaaaaaacacctcccgaagaaaacgaagaaattacaagtgagttggttgattatatatgtagtaattcatgcagtcctgatggagaaggagagtagatgagagagagagaagaggaaagaaataaagcgatggagagaaaagagagaggaagagcaaaaagagcaaacaaaaagaagagagagacagagggaggagagagagagaagagagttacaggcctgtaaccagaaaaaaacggtagctgcacccgaaggcctttttaaattgggatccggcggttccattaggcacggcctgggaagtagaaaagttagggcctaatttgttagaaaattaagtgaatattaaaaaattactcatttttctgaaaaattttagttttcattttagatgtggttacgggcctgctgacgattttaatttgtccatttatatatttgaggggggggggggggggggggagaaacattaaaaataaaaaaattatacatatttgtcctttttagtctacatttattcaacaatttaaaaaatgggttcattcggagcctgtggtcgacatggcctgcgacgtggccagcaaaaacgcaaagctccttagtggaagagtcttgcagaaaagtaatgggccgccaaaaacattatgtgacaatgtcttgtcatccgttccgattccgacggtcagtgcggttttaatcaaagaaagatttttatgagaccctcactcatcctgttggattgcaaattatccattaacaattttaatggttttgcgttgagttcacataggaataaaattttcggtcctaattatttagtggaaatgagcttgaataataacgcatttttgacatttaatcaatttctcaggaggtatggaatcaactcgtcgacgtcactttggactttggcataggttctgccgttaaacgcgtaaaacgacgcaaggaaaaggaggcaaataaattggcgcttaaaaacattaataaataaactgcccacatttgaaagatttattaattatttgatgaaatgtctttaggcccgggacgcccgctaaatgggatttttttgaccgggtagctcgagcctggttaatactcctaacaataaacccggggccggcattttcaaaattccggtctctagttgattaattattcagtgcaataaggaattaaccaaattaataatatcataaaagaatttgcacttattttgcattattatttattttatttttttaaatattttttgaattatttggtttttgtcgaacacataaattatttgtgggttaatcctaacaaaaagagatagaatttatttggcattatttttatttgctcaaaatttcagaaacttgttgacccgttggcctatgtcggaatgctcgcaaaacgcgcgcttggtagtgccttgaaaataagcgaaaccccaacaaagtgcggtggcagaccaagcgatggtctcttctgttcatcattttgggaagatttcttttcttcggttaagacggtcagtgcttttgttggttttacaaagcaataaatcgcatttttaaagtaatgctggtcgagacccaaaatttcctgagactcgagactgagatcagcagaaaaacatgactttaaaaaagtttaaattgtacacttgaaacccgattaaaacttaattaatttaaataattcttttttattgaaatttcaaacaaattttgccgttgcgaattttggttcaattacaatttatcaatcaatcgttattttaaaaataaataaaataagtggttgatcaagttaatttctcttgcctgggctatttttacaaaattaaaaaaggaggtttcgtcgtagagaattgagggaatgccaaaggtggaatagaaaaaaaaacaataaaatttggaagcctcttttttctcttcgcaaattcaatcggattttgtcctttaaaggctcccagacatttggaccggcggagtggacaattggacattaattactacagtgaaagaaatatttttttattggttttagcattgtaaatattttggattctaagaaaaatgaaaaaaaaattaatttcattgctagtcttttttaagagtaaaaaattaattcactgccgttatgtcctctgttcaattgtccgttactttccaaatgacttcctcttaatgtccattggccaaatgtccggtcacacctaaatgcccattttttgaatttttgggttgaagcccggcgccgggaactttaaaactttgaggaggagttcaatcgccaatcgcaaggcccttttctgacccccctcttgcacagctaagaaattagctaaaaattcgttgacatttaaaattactcaatttattaggaggcatggaatcaattcgtcgacttcgcagtggacaaaggcacaaattatgcaattaaatgtgcgatcgaaactacggaaaagaaggcaaatgaatttatgattaaaaacccctatttttgtttacaaatttcagaaggaatttttatggattattaaaatgcaaaaaattaattaagcaaattaatattataactttcagaaaaataagcccaaaaatgctaaaaaatcagctggcggcaattcccccaaagaaggaacatttccaaatgtaagtcgtgaatgaattgtattatgaattcttaatttttcatttccattc

SEQ ID NO: 7703 - DNA, 2820 bp, Heterodera glycines
tcatcatttgggaagatttcttttcttcggttaagacggtcagtgcttttgtggttttacaatgcaataaatcgcattttaaaagtaatgctggtcgagaccaaaattttcctgagactcgagactgagatcagcagaaaaacatgactttaaaaaagtttaaattgtacacttgaaacccgattaaaacttaattaatttaaataattcttttttattgaaatttcaaacaaattttgccgttgcgaattttggttcaattacatatttatcaatcaatcgtattttaaaaataaataaaataagtggttgatcaagttaatttctcttgcctgggctatttttacaaaattaaaaaaggagtttcgtcgtagagaattgagggaatgccaaaggtggaatagaaaaaaacaataaaatttggaagcctcttttttctcttcgcaaattcaatcggattttgtcctttaaaggctcccagacatttggagcggcggagtggacaattggacattaattactacagtgaaagaaatatttttttattggttttagcattgtaaatattttggattctaagaaaaatgaaaaaaaaaaaattaatttcattgctagtcttttttaagagtaaaaaattaattcactgccgttatgtcctctgttcaattgtccgttactttccaaatgacttcctcttaatgtccattggccaaatgtccggtcacacctaaatgcccattttttgaatttttgggttgaagcccggcgccgggaactttaaaactttgaggaggagttcaatcgccaatcgcaaggcccttttctgacccccctcttgcacagctaagaaatcaataataaaatagctaaaaatttgttgactttaaaattactcaatttattaggaggcatggaatcaatccgtcgacttcacagtggacaaaggcacaaattatgcaattaaatgtgccaaaaaatggagcgaaactacggaaaagaaggcaaatgaatttatgattaaaaaaccctatttttgtttacaaatttcagaaggaatttttatggattattaaaatgcaaaaaattaattaagcaaattaatattataactttcagaaaaataagcccaaaaatgctaaaaaatcagctggcggcaattcccccaaagaaggaacatttccaaatgtaagtcgtgaatgaattgtattatgaattcttaatttttcatttccattcaacggcaacacaccgtcgtcggcacatttggaccaatcagcagccgcggaagaagtgggacttcccccttttatcatatgagaaaataaaaaaataacaatgcggaatatggattcggttcttgcaattttgccataaacttttaaaaaaatcctctaaatttttattaaatttattttctttacaattgaagacaattaattgtgattttttgaattactttcgtttaatttttataattttttgggccagaaaaatgtgccaaaaaagggatgggggagaacatagtaaaatgaaagtgaatcgtcttaataaagaaaaaattattaaaatttcagaaaaaacctgaagacgcacattttcttcttcttccaccttctgattttggcgtcggcaaacatgacaatgaaagtgcaaagaaaaataagatggacaaagaaaggatggataacagggccaagacatttgccaaagaacagaagccgaaaaatacaaaaaaacgtgccaatgaatgggacgcggaaaaagcaaacaaagctaccaacaagctaatgaggaaaatggcagaggaaaaaacaaaaatggcaaatgcaatgctttaccctacgaaaggcaagaaggatgccatgtacaggtgaagagcggggggggagggggggaagcaaattgcaacatttggccatgaatttgtccggaatttcggattgcaaataatttgattcaaaatggcttactctatggtcaaatgaaaatttttcgaaaataaaatatgtgagacgtattatccaagtaactaatgcttcaaccatccttaaagattacttggggggcttgagacgaagttactcaaatcggctaatggcaacaccgaatcggcatcggctaacggcaacaccgaatcggcatcggctaacggcaacaccgaatcggcatcggctaacggcaacaccgaatcggcatcggctaacggcaacaccgaatcggcatcggctaacggcaacaccgaatcggcatcggctaatggtaacaccgggtcggcatcggctaacggcaacaccgggtcggcatcggctaacggcaacaccgagtcggcatcggctaacggcaacaccgagtcggcatcggctaacggcaacaccgagtcggcatcggctaacggcaacaccgagtcggcatcggctaacggcaacaccgagtcggcatcggctaacggcaaaaccgggtcggcatcggctaatggcaacaccgagtcggcatcggctaacggtaacaccgagtcggcatcggctaacggcaaaaccgagtcggcatcggctaacggcaacaccgagtcggcatcagctaacggtaacaccgagtcggcatcggctaacggcaaaaccgagtcggcatcggctaacggcaacaccgagtcggcatcggctaacggcaacaccgagtcggcatcggctaacggcaacaccgagtcggcatcggctagcggcaacaccgagtcggcatcagctaacggtaacaccgagtcggcatcggctaacggcaaaaccgagtcggcatcggctaacggcacaccgagtcggcatcggc

SEQ ID NO: 7704 - DNA, 2531 bp, Heterodera glycines
ttcgacacaatcttttcaatgggtttgatgtccaaatatgtctgcttcaatgccaattttacttcctccaattttggcgatgtgccagtttcaaatttttcaaacaccggtgacaggccatgtttacaactctcttggtgctgtttaatactttttcttggcatattgttacgactaaatgcagcatctaattgctcatacactttgcccgatttgctgatgattcgctccaattccatggtgtgctgcatagtgatttgttgtttttctataattttgaaaaaaacatattaccgtaatcctataatatagctctcccccctgaaataaagccccccccctttgaggggggttgtaaaatagagcccccggggctctattataggaaatacggtaattttttggggtgttagggcttttcgtcaaactgccaatgttacagaatttacaagaaaaattcaccgtaattctttcttaaattagcactttacgaaacgccaatgttggcagtttttacaaaactactcagcatgttttttgggtagttacgggtggtttgtggactaaaaatttcttatacaaaagataggaaaaccggaaaaattggctgaaaggcattttttcgaccgggtaccccagaagttccgaaaatcctaaattaatgggaacgtcgctgccgtaaaagcccactcgtaaccaaaaaaaaaattcctaggggggaggaaccctatgtctttttttaaatttaaataaacgtagcccataggatcgcccgggtaatttttttttttttttggctaatttaattttaaaaaaactgattaataaaattaataccaaatttcaaaaaatgcgaaacctttttgagaggcctcccctaaagaatggatgttattagcatttctcaattgttttgtcttttcatcaaattttgacggcgtatttgctctttttgtgtttggtttggaggtgcgtaattgctttgtcggtgcttttaataattttattacattcgccgcattgtatctgattagcatcattttttctgtaaagaccaatttgccaaataatgttttccggcggctctaaaagaaatgcactttttttaatttagatgagacgattttttaaaaaaattttcaatttctcatttcacgactttcgcaaacaaaaaatttttttgttcgaaggttggaatgggagggggacggaaaatcttgtccctataaagttttttttacaaaaattattgaccaggttttctgtaaatatactgggttaattcctagaaatttttctttcagaatttaccatggcttctcaaatttttttaactacaaaaattcaataagataaaatgggtcggggtcgttttcgcgtgggccgttttcgcgtggggcgagtttttgaactataacttttttctttgtcaaccaaatccaataatcttggtatcattcgatagccctaagtgttttctattagccaacaaaatttggaaaaatttcgttaaggttcaaaaaagttatggtcagaagagttcaacaaaccaaattttccaactttttttggctcgaactctttttatactgaacgaaattttttggaattttgcatgctaatagtgcatatgaagggctttcgaatgataccaagaatgttggatttggttggcaaagaaaaagttatagtccaaaaactccgccccacgcgaaaacggcctggcccgtagaatacatttccataaaaaaataaatttaaagtcatttaaaatggtgagggctgacaaataggcatttctgaaattagagtctttatagttttaatttatttttggtgtgttttccaaattcttttattaatctatcctaataatactcaaaattggctgttttggtgaaattttttaataagcctaaaattatcaagtgtataatattggtcctctttccgtactgccttaatttgcgaagttttagtggaatatgtcttcttttcagttgtgaagtggagtgatctccagcattttgctgctctgagtgcgacaacgagtgcccatgcaaaaggaaagaaataacatttgaaattcgatcaaatcattttgccttttctttttaatttcaattattttacgtttcccccccccccttcattttttttgttttgttttgctggcgtgcggaccgcctaattaccacccgctttagcaaaattaaaccatttttggacatcagcagcagggctccaaacaggggaccttttacctcaaacggtcctctttggggccttgagagagaagaacacaacaacaacaacaacatgtggtggtgtggccatgccgctcgtcaatgctttcccaaatccattacaactcactcactcctccccatcatattttcattttttgatcgccacttggcaatttttacacattcgttgtttctttttgttggttttttaatatatttatttattcgatttttttttggatatcgaggttattttatgcctcaatatttcgttaaatgtta

SEQ ID NO: 7705 - DNA, 2252 bp, Heterodera glycines
ggaattttttttgattttttttttcaaaaaattagcaatttttatacaattttctgttaataaattgccttgaaatttttaaaaatttcccggcggcgcctatcggcaccgccggacctaaaaatccttaattttcttgaaaatatgctagaaatcgctaaatttggccattttcgtggacaaatctgttaacaaatcgcattaaaaatcactaaaatttttccagcggcgcctatcggcaccaccggacccctccccctattacccaaattttctaattttctttggaaatgcgcgccgcaaaaaagggtgtaactgtcccaaaaaaaaaatcaaaaattgtataattacataaaaatattttgaaaatcattaaaaaaatttaaattaatatagaaatatactaaacagtttgatatcaccttttacatggttaagaattttaaaatttagcctattaaatatttaaaattttttttattatatttttgaaaaattccgacttccgagttccgacatttttgaggtcggaattccgacttccaagttccgaaattttttggtgcctcggaattccatccctgataagtacgcaaattagccgtagttttttttacgattctgccttgcaattggattaacggggccgctgatcacgaatctgacatcagatttgtcatatgactttatctaacctatgcttttcatcaagtctaagattttcatcaggtaattttttcacttttttaaaaattatattattgggtttttgaggtcaactggtcacgaatatgacatccatttcggccaattcctaaacccggaccagaattcgaacaaaaatcgaaagttcacgttttaacgcattttgaatttttcgtctaaaaggctatgatcttttattgcaggaatgatggctttcagtttgtttccgtgcattcaacctttttcaaaacataaatccaagtttcgtaaatttgaactttcgattttttgttcgaattcgggtccgggtttaggaattggtcgaaatggatgtcatattcgtaatcagcggccccgataaccaccgagtggaacgaaaaatcgtaaaaaaacaccgcctttttaatcgaaagattgcccatttatttgtatttttcatcgtttttcttttttcctggcattttctagggcttaaattatatgaacaaaaaagccctaaacatggactaaaatgcttaaaatggccaaatatggaccaaaatatgtactaaaagttgccaaattataagtttcaggtcctcgaaaatacaaaaaaaaaatgtatataatattcaatatttgcttaaaaatatatactaaactaccaaaaatggatttaaaatagagctgagcgggacgggactggtactgaaaaacacgtacaactgagtaccgaagtcccggttttttttgtgatttttcttagtgtttaaacattttttaattaaaaatttttccacaaatattaactttctcggggtcttggttttccgctcggttctcaaattaagaatggtgaagtaattttgaattaaaaaaatccaaaaatagcgatgaattaattctacctaaagaaataaatcattcacaaattcaaattctatttgatcaaaattatttttttttcgttttgattttcagtttttatgttcccttttcttgttaaaaagttttatttgttatttttggcggtgcaaattgatgccgagaaattaaaatttttgtcggattttcttaattagttttatccaaaaacttaattttgtgaaaatttttgagtaaaggcgcacttcacttttaaaaattcatcagcaatgtttcaaaatatcaattatttattttccaattccgggacacacgttttttgtgaaatttttgtttaaaatctaatgaaaaattgattatattgcttagatttaagtgaaaatttatagttgtcaaagatttgttaaagaaatgcctgttttcaaaagtttttttaatatataatacatattttcaataaaaaatattatattttacaaataaacgcttaacattcatttggcaaaaaataaatcattttgagtaaattgctacactttccttttaatttattttttccataaaataaattattttataaattattattttttgcaataattatatcttaaaaaatctgagtaaaaaattgatttccatcttaaatggaattacgtcgtgaatcacatattaatttttaaaat

SEQ ID NO: 7706 - DNA, 3954 bp, Heterodera glycines
cgaacaaagaatgtttatgaatgttatttcaccttttgattgtatcatcgctacagtaaagctccaactgtccaggcatgtcaattataaggtaaaaccctcggaacttttcgatgcgttcttgcaacctatcgcaaaaggaagttaagtcattgggaaaaaaagcaagaaacgaaaatgactgtcacttaccacgacaaatttgagaccaaagtttgcatgcaataacgcaacgcaccgttaggaccaagttgaaacttttccatcacgtcttcaattgtaattaattcccggatgtcgatatgagtatctaaattttgatacttaagctgtttagggtttcatgaggccattaaccgaatggcaatccatcatttgccgggtctaaattgatcacaatatgaggccgctttatcccgcggaaaatctgctgaagaccagaacaataagtgctcttgccagctcctggagccccaattaccaattgtccataaaaatcggccataattttcaaagataatttcaatacagattctaaaaatatgacttctttacagttatagcggtacacaacgcttgttaaaatgagagctgaagaaatttttcattaccaagcaagcggtcagggtcgttttcataccgccgttttcgtacgggggacattttcttacgagttcttgtacaagcgtcagattcaaatagaaaaacttaagaactaataaaaccaaaatttatcatttttcgtttcccattcataaaattttgtagaaaattcatctttataataataacaaaatccgggacaaactaggtcgcatctcatttttcggaaaataccagcgagaaaattgttaaggttttcgggattgacattggcattggcataattgtgatcattttgagggcaatattgttattgatatcgttatagcgttggacgagacgaagaatccgtgcgtcggcatcgcgatacttctttttctgtgcacccatcatgcaccaatttatcattatttagttttgttttaattacttgctgctggttcattttgtagttaataaaagcttaactgtcaaaacattaaaagtaattaaaaaaattaacaaattatttgaatgcaatttttttttgcatatccactcgtacgaaaacgtcctggcccgataaaagcatagttgaacaacacgttaattgcataaaaacttttgttttcgttaataaattattctttaaaattgatgcaattttgtacaaattcgcaaaaaagaaattaaaaattttatatatttttttactagaaaatattaaaaaaaaattgtttgccccaaaatgtctgtggttcggcaatttccgtcttcatttggacattcatttttataaacagctttaacaaaaattattttataatatttttcattaatttccatcaattaatcgatgggtagaattgcgtaatatttaatattatagaaaattgtcaaaattacacacgtaaatgcgcctcttcaaatcgagaaattggcaatataacatttttttaagttgcaattgattctttataataattaaatataaaaaataactattcaaattaaaaatctacaataataataataataataataaatgtataatttacatatgtcttaaagcataaaattatgcttaaaaactttttttttgaggggaaattcccaatatttcataccctcccctttcaaatatgtatctgtaaaatttttttaaatacattaaaaatttattataattataaataaattcataaaaaattttatgtgaatttatttaactgttttttaattaatatatatttatctagcttgatctgcctaattaaaaaatggtctcgaaaattcaaaacccccaaaaactttgtgagggaattcgaattgcgattttttgaaaagttcacctaaaaatctaagcttttacatattaaaaaaaaaaaaaattaatttatacacagaaatgaaaattcttattgcaatcggcaaaactattttccatatttaggtcctaaaatataccgtacccccgtcattattcggtgctaaaatgcattccaattttgcttttttcgttatttttgccaccatttttttgctgtttttgctcaacgagactttggcaggcggtacttcatccaaacacaaatcgagaaaatcaggtcaaataattcacattatgttgatcagcaattttccgtccgggattttctctgtttgaacggcacacactctattaaaggcaccaagaaaatttggctgattcatttttaattaagcaattaacactcaattttttaaatttttttaaatttcttgggctttcagcaggcggtgaaaagtcacgtcccctgactattttaaattttaaggagctaaacgggggttcgacgtgggaaaacaacgcgtaactttggcttcacattttaatcgttcaaaaaacggtaaaataaaaaataaattgaaaaaagagaaatagccaattaagaacgcagccaaatgaatcgccaaacgaatcacgggcagcagccatggcaaattgcaatgggtgggcatttattagagttagatattttgaaaaaagcctgacctgaattaatttgagataaaacatggtcactcgaaataacaaattcgaaaatattattcaagaaatccaggttttttgtgcctaacctggacctggccctggatttttttccatttttgacttggtcttgttgatttgttattttcataaaaccaatgctttttcacaaatttattccatttttattaatttttgttattgtttcagcctttttatttttcaaaaaacttctgaaacgatatttatcatttttatttttaatatataaaactttttatatatattaataaaccgggtcccttctaataattttcatttttgaaggtgtgcttcaaggtccgcatgatgtaattgtcaaagcaactaaggaaggtaaataagaaaaatgcaagccttaattaattaactaattaatgaattatgtgttgtcatcgcgatcatcatccgtatagattactgtaatttagcatatcaaggaccgaacttcggctcacagtcatcacagtggcaaacacaacatgatatctatgatcataaagacaatggatcaacaagaagggcaaaaggtcgaagaggcggcacctccaaaaactgtacaatacagtaggaagggacaattttcaaacgctttttcgattttgacggtcacggtaaagaaaaattttcgttttgaattgttgaaattgcgtaatgcacaaccgaatattttttcttcgctctgctgcaaccgaattcgccaaatcagacacacaattaggctaatcactttaattgagaaacaaaacaacaaattagaataaagctcggaacaacaaaataacaatccaaacaaacgtcagaggcgagaagacttatttttaagcacaatcaaaatatcaaaaatgcagaagatttttggagaccggagacgaataatcaaaaaatccaaagacgtaaaaatgggaagaaaattgagaaaacaaaacgccaaataaaataatttaaaatgagaacaaagtataattaatatttaacacattcccgcacaaagtcaaaaggcgtccctgccgattaaaaacattcttaggctgttggaaggaggcgattcgtccgggtgagctcactgccagcggtgccaacgagaaaagcgacgacctccagcaacagaagacatcaaaccacgtccaaatccacgatacggatgcatgcgcaactgctgaccggacacagggtggtcatctcgacccatccccgatcgagctgtgattgaacgcaatggtggacggtcacctggacccgagtccccacttcgattttgacggacaacatgaacggcggagcgaacggtgcggatgccc

SEQ ID NO: 7707 - DNA, 4239 bp, Heterodera glycines
  unsure (1)..(4239): unsure at all n locations
gttacattttttttcacanntcttttgtcatcacaaattcattcttggcccttctcgcacaagaccaacaattagggaagaggagcatttcatcgatgtgcacggggaggagggggtacaaaagattttttggtgggatcacttttactttcaaaagtccatcatagggtacgtcgtcgggtgctgtccaattcacattaaaattcctgctcactacaattttcgggactccaacggggtatggggtgtcttaagcgaaaggaaactaacaaaaaagcaagcagatttttaccataattaacaaagggtacaaactaatgatgtcgaacattgatatctcaatttcttcggtagtctttgcgtacaaacaaaatggcatcgttcttcccccggcataagcatccctcggattgatcggtcccttgtccggcacactttcaaagaactttttcatctccttatttttcttcaattcctctttcacgtcacactcctataaaccaaaaaataaaaatatttctaaatgttttattctacccaaacttctccgattgaaaaatttttgcacttttccctcaaaatttccatgcgaatttcggttctactttgattctcttccattgtccgtccgtttggcgctatagtccaaggtaaaaaacatctcggacacccgtgaaatgcacaccccttaagtattgtttaaaaagaaaatattttttcttttacctgaaactcaattatttttttctctgccccaatcacacagtccacattcagaccaccaaattccacttctcctccgttacacgcatgccgcacttttactccctttttttgggctaaccactcaaaatatttcaccgctattttgctctggttctctgctctctcataccctacctcaggcatgatcggaatatgcctgtccttcaaaaattttgccctatatatcttcatcacaacaccagcgattgtcacgctgtccttcatcacatccaaatctcctgttatccccaaaaataaccgccggaacttcaaaattgattccatcaaaatttcaacatcattttcgcaatacgtcttgagttgttccccttaaattttattttcaaagaaaaaatgctattttccctacctagttcaaattccttttgaaaattctcattgtgccatgcttccaattttacggcttcttcctccttcatattgtccgggcaatagtcttccaaaggtggcaggttggataatctcttcccaaaattctcattcttattgtatttgtgtggaaaatacaatttagctgcagtttttaagcccaaggtttttggaaggtccgccaatttattctgactaagcatccaaaaatcccgaaagtacactcttcccgcctttatttgataaattttcaaatcagccatcatcagttccgtcgcgatttccttctttgttagctctgacaagacaaagtgggaatcgaatctcccagcataatgagcaaaagcaatcgtttcaaatcgttgaaaacccattatccaaacgacaaactcgctcattgggtcaaaaccatccgctactgaccatgtgattttactggggccttcacaaatctcacattcccgctcttctcccgcacaaatgttacaagtacgtgcagcactaacaagattaggccggtgttctcccccatctacagtcgtctccagatcgtaggccacaattctgtaggctttctgcggtcgcacttgaatttttttgatgaaacattgccgccctgggtggcaaactttgcacagtttgcaaaatttttccccgcacacgtgtttcgaacgtgtttggtaaacttctccgcatttgtcacactttttgtactcattacaagccgccttcttatgtgcttcaaaacattccgggttgtagaacttaagattgcattcaccgcagtgaatctcatcgcagacatccgtacatggaaacccgaaccccatccgacaacattttttgcagcgttccttacactccattctgtgtctttcaggtcgatcgtacgtcacttcacagctgacacagaagtatcgaacaccaaaaaaccaagaagccgatttgatcccatcccaatggtctccttctcttatcacacccacttcatttttacgaacaccctctcccttgaaaattggcctaagcccggtcttctaaaaatatgtaactttatatttttcaagcgaattttgttaccatttcaaaagccacaatgcgaaacatatccgggaattccctgtcccagtatttttgtacagcctcaaggtgttgggtaccaaaagttttgtcatctgtgcttatccctgccttttccatcaattccatggccatttccctttgtttcttctccgtcttcatcagataacggaatttgttttccgttatacttttccctatgagttggtaggttcgagcaatttccaaagcgtaaaaaagacctaaaacgaatatcaaaattcttttttaatttgataggtttggaactcactaaatttcccctttggtgtgttaagccgacccgattcattgatttgggcgagggggcaaaagcgagacattttatgaagggagtaaaaaaaagccgatgagttgctactgcgagaaaggtcttttttgaaaaatacaatttgtttaattatcaaaaaatattgatcgaaattaatcaaataaaaaataaaaaattataattttatttaaatgttattattggtagagtggaaaataaatagggggagtaagaacatcgaaaaagaaataaattccagttcttcgggccattggtattgatatatgctctgggcgaaacaatcttctcatcatggaataaaaccgacatttaacaaagtatgccaaaacaaaatttacgtgcaaaagccgatgtgtttttggaggggggagagcgtcaattatttccttgatcagttccgcgggaagtgggcagggcatggggacgtgaaatgttttaaaatgaagagaaaaaaccaattaattcattcggcaatatcttactaacaccaaaataatgcacatgaaaaaaaatccatagataataaaaagaaggaacattccaaaaatttcgtcatttcttttcattttttcataatctttgtcaaaggttaggtttagcatctaatttcttaaaattttaataattttcaaacaatttaggtaacgggatttaacccttatcaattcaacaaattaaaacaacaaattttatcaaaatccaaattccattcattcattgaggcggacgtcttgggtcccttggtcttcctctccactcgcccagccgtcggatcacttccagcactctcggggggttgggatgcatttgcttaagaaaagatgtttcggtgttaggtaaaagacagggtctgaaattacctgtccgtttggcagcgggtggtcgaatagtggcacgtctctcagctggcgcggtcgttgccgtggttgcactggctgaaaaacatccggaaatatgagaaacaagacccaacattaccggaacgttttctggtggatgatacggcacgtttggcggcggatgagcaaattgcggtacggcgtattcccgttgaatttgtcgaacatgaattccctgaagaaacacccagagactgagaaaaagcaaccacaatttgatccaaattgaagtcacatttcgcggtgaatggtgaatttgcggcatgtctctcaacggcaacggttgaggcatcggttggacatgaattatctgaaaaaatgcattcgggatcttgaaaaaaagtaacaaaagcgagccaaaattaccggcacatttggtggtgggttgacaaatagcggcacgtctctcaatggtatcggttgttgaattggttggacacgaacggcctgaaaaaacattcgggaattaaaaaaagcaacaaaaaaacgagccaaaattaccggcacatttggtggaggttgggcgaattgtggcaacgctcttagtggtagtggttgttgcccatcatgaattggtcccacaccaatttcctgaaaaacaatgcactcgggattttgaaaaaacaaccgaaaacgagactcaagattaccggagcatttggcggagggtggaggaattgtggcacggctctcattggtacgggttgctgcattggttgaacacgaattgcctgaaaaatgcactcgggaatgagaaaaagcaatcgaaagaaa

SEQ ID NO: 7708 - DNA, 1794 bp, Heterodera glycines
  unsure (1)..(1794): unsure at all n locations
gcaatctaattagttattatactccatgacatttcatttcacaattggaaaattaatgcgtttctttaaaattatgcatgttaattagttatttaaagtgactattatttatatttcaattagaaatatattctaaggtgtaattcttgaattcaatgaaaaatatagttgtttgttattttatttcactttaatcatctgatttcgttagcgccagtaagagtgagtcaagctggcctttaaacttggggcctccatttgttcttatttataagaatgttctgattttggggtagcaatttttcatcaacccaatattttctatcgatcgccccatttttgactaattattctaagtcaaagaatattgtaatcaaaaaaatactgttgtcggtcgccccgcccccccccccctcttctgatagcccccccaccccaatttcacttctttcccccccgctccctttcgcctcgtactcgtattcttccatcccttcggcgaatgaatgctttggagatgattgagaaatgaaacgcaaatttttttatccaaaaatggggtggccttgaaaaaggggcaaaacaaaaattgaatttgacgaagaaatgacgcagaaatcggttgaaaaaagcaccggcgatcaaatgacggagaaaaacgccgtgggggacaaactttgatcagaaaagagcgaaagggaaggaaaaaagtagttaaaatggcgtaattttggctaaattaggcaaaaaaacgaaaggaaaaaaacgaagggcaaatggccaaatggaagaaattttcaaaaaccaaaaaacattactttttctggccctaaattttcagcctttgttttttgcctttgttaagagttgcgacgggacggaaatccgataatcccgtgaaaaaggcacttgaataaattcttccagatgagaaggggccaccaattccattgcctcgctttgcccctttctcatggggaaacattcgcccggccgatcgcccccggggggacaacgcccggcaaatgcaaaagtaaaggcaaaagcaaaggcaaacgcagtgccaaacaatggacgactcttccgcctcacagcgaatgtggcaacggatgcacgaagtgtatgtgaggacgaagaaggtgggccatgcaattaattaacgcaggtaatgcatgaaaagcatgtgacgaacacgtggtgaaaggggggggggaagttgagccaattgaattgggggggggggggaacgaaatgccaaggaaggaaaacgccccaggagggggggggggtgccaaggaaaagggggacggaatgccaagagaaacccgagaaaaagtctgaggtggcagccacaaaaatcagcgggcgagggaatcatatgccggcaaaagagagttcaaaaagtgtgtcgggaacagaaagacggagcagcatgctgctcagagatgaatggacagttgtttcctccgccggtgatcaaagatcgttctctgatcagcacaaaaagggaaaaaaggaaagccctcgggggatgaaagggaagggccgccgtacggggggnggggggaacgccagcggcacacaaattgcccccgccccgtccaacttttctccgtttgcttctgatgagcggctgttccgccatttgcccccgacgggggacccaaaaacctttccaacccaacgcccctcaggcgatataaagcgaagaaagcgccctcaaacatttttaatggcctcggtgatctctctttctctctctttctctcatccgccaaagccaaggccaacaaa

SEQ ID NO: 7709 - DNA, 5338 bp, Heterodera glycines
ggggacattttgcattggcactttattatttgtcattttaatccgacccccccccccgcgcccggcacagagtcattttccgcattttccgctccaacgaattttcggcatttttcgcgcgtcagcgaatgaattggcaaatgttttcgaataatcataagcagtcggaggaatttgctgctccctttgctaatgtttcacttccgccgtttgtcccttttctgctgctgatttttgtttgcctttcccaaaatttctcaaaatgttttatttttaagttttttaagtgtccccccttttcccctctttttttcctttgaatttccctccaaaatatcatttctttctttcttttttgtgtaaattagtcaaatttccgcccgtttttcagctgtacgacaccgccatggcactgacttctcagcctccgaccagctcatcactgatggcattttcggaagagattatcaaacaggtgataatatacggtgggtggggagcatacggtgggactgactgaagaatacggtaaaagggggcgggcaattgaaaagagagaaaagtgccgacaaatatttgtttatttgttgtgtttagctaactccagaggaaattgacgagttcagagaagcatttatgatgttcgacaaagacggcaacggcaccatttcgacaaaagtacggaccgatcagtgatcagagtaaaatggcatccaaaaaaccacaggaattgggcgtagcgatgcgttcgttgggccaaaatccgacggagcaagaaatactggaaatgatcaacgaagtggacattgacgggaacggacagatcgaattccccgagttctgcgtgatgatgaagcggatgatgaaggagacggactcggaagtgagaagccaaggggaggaggggaattaccaattaattagggggaacaaaacaaacaattagaggggaaattaagggacaaataggcgacaaataaggaccaattaggaggaggtaagtggaccaagaactaattaggtgagggactaattaagggaagcaaattgaccgccaattaattaataacaaataattaatgaaaacaaaaggaccacaatcatggattaatttattttgcatggacattgttcagatgatcagagaagcgtttcgagtgttcgacaaggacggcaacggagtgatcacagcgcaagagtttcgctattttatggtgcacatgggaatgcaattcagtgagcaggaagtggacgaaatggttggaatttgaacggaatttaaatttataactttggctttgcgttgaacagatccacgaagttgacgtggacggagacggagagatcaattacgaggaatttgtgaagatgatgagcgatcggtgaagaatgacaaaacagcagacccaagcggaggaaaaagaagaagaaacatatcgccaaaagcgccaacggtggaaaaacgaaaaatgaaacggacggaaagaaagcgccggtcgaaaaatttaaattttataaaaattttatcaaaatacatattactacctaattgattgatggtggtgttaagcatgaaaatttgaaagcaaattactaatttaaaggaaagaacatccgtttttcattgttacaattaaacaccacaattaattaattgatcaattaattaattaatgtttctcccatttttgtctgttttttcacattccatttaaatgaattatcaaaaaaataatttgataaataaattatgcaaataaatgcgagaattttcatgtaatttaaaaagaaaaaacaaagcgaagttcgaaatgagaatataaatttggcacttaacaaatgccgggacagtgcgaacagcacaacttttcattccaaaaaattgtacagtaacggcgcaaatgcgtaagccgagtttccatttgagagacctgaaaaaggggtacggtatgaggatgaaatgaaagaagggacattggatacggtaataaaagcaaaaagaaaagagtatacggtttggagaaggaaagagcatacggtaaaatgggactgaaaaaaataattaatcttttaaacttaattacacagagcgtgctcagctccttcggctggcgtgccctttgttcgtctccgattacatttaaccgcggcggtgccgcgcttcgttggctcgaagacgcgctaatgaaagcaattaaaaaatatttattcatttttaattatcgcactcattagcgctaattgtcgctggcgagggtggcgcagtgcccggggcatcctgatcagggtaattgttttcactgaaagaggcggggcattagcaaaacgccgaagtttaatttaccgtagaaacatttggacttcgtccctccgcgtggtcattctgtagttgaattccaccgtataacaggcaactattcttgccgaattgtgaaggcactgctgcgcataagctgatttgcagtcttcgacattgcagtagaggaaagaaagcacagaacggcaatttgggtccctgggggagagaatggcaatttgggtccctgggggagagaatgacaatttgggtccctggaggagagaatggcaatttgggtccctgggggagagaatggcaatttgggtccctgggggagagaatggcaatttgggggagaatgacaatttgtggcattttgggtccctgggggagagaatggcaatttaggggagaatgacaatttgtggcattttggttcctgggggagagaatggcaatttgtggcactttggatccttgggggagagaatggcaatttaggggagaatggcaatttgtggcactttgggtccctaggggtgatcggtagggtcgattgattatcggcagtcattcactgatcagtcatcctagcttagattatctcacttgtcgcggccgcagcagcggcattgttcggagccgtcgaaccacgccttttgagtgatcggcggctgatcagcactgatcagattcagaaacacttggaaacggcctcgctaaacaaattttcggggccaataatcgtattggtcacaatttgatattcacccctgggcaagtttcctgttctctctctctcgttcccctctttctcttccttcgtcctctcttccccaagcatccctagtcgctctctttctcttccaccctcttcttcccctgcttccctcgtcactctctttctctctcatcatcttcttcccatgcctccctcgtcgctctctttctctgccaccctcctctcaatcaacactccctctctattctcacccctttgttcagtctcttccgaatttctgcgtccactccgctgattttctgccgtgctttttgttccaactcgcgccttcccggtaaatttattgtccgacgaaattcgtaagtgcgtgcgtcgatcttttcgcaccgcggtgagaatggcgcctcttcgcccgccgccaaagccggcaaaaatcggtgaccgtccgaatcagtgcgggttaatcgattctcaatttgatcagtcagtccgcacaagtcgcagtaacggcttaatggaagaaagtggaactgacaaatgagagtcttttcattttcaattataaaaaatggcaatttttggattttcccccgttccattggcattggcattttcactgaccaatactgccgtttgtcgcgctccacaatgccactgaattcgtcacattgctggttcaaaagacccgtttccggaaccattgtgtacggaacatcaaaccgaatgccttttgggggaaaaatgccaatttcgaaggggaatgccaaaacagaaattgactgaccggcgggcccttcgaggattggcacttgcaaagtgatgcccaactctccgctcagatgggcctattttatggccatttttaattttcaataaatttgaaactttgacatcacccaccaaattgttgagcacattgatacgtttgaagctaattgagtaattgccaggtgctcttatgaaataaacctttgaatgattgcaaaggttaattaatcactgccgcacaatcaattaattaattactcggtaattaattaattaccttattgcctttttcattgacaatttgcacgtcctaaaagcattaaaatatttgctaaatttgacaacgaaatggacggcgcacctcttcagtcaatttcagctcattcttcactaaatttgtcaatcagaatttccaggataaatattttctgatcgtttttttgagtctcaaaaagtgattgatcactgaccgcctcggcaggagaaaacactgatctgaacgtgaaaaagttatgcgaatgtaaatgattaattgaccagtcagtcagatggtcaaataattaagtagttttgacataatcattctaattactcgattaccacctaattaatttcaatgttttctctccccaatcattccaattactctaattgcccaccccctaattaatttaagtattctctctccccaatcactatgaactatctctcgtgagcagtgtagggtgcgaagatcgatacgtcccgccgaatggtcaccatctctgcgtccttttcacaacggtacatgaaccttgagcagctgctgaagtgtccgtagtggtgagctcacgagcgaatgactgaggcggagcagacgcgcaagcacggagaatcgcgaatgagagcggaagcaaaaagaatcgtcgccgtttctgatgaaacagagaatgacaatggaaagcgcaaggtggacggccatgagggcatatgacaaatgggaagaaatgggaacggtaatgcatttgaatgcctaaacggacagcttagctctgtttggtcgcataatgatctacctatccctgcctaaaagcgaacgaaggaggcatccatttcaagtcaatcggagggaggaaaaacaacgaacgatcaccggaggaaagcaaaaggagcagcgaatccacgctcgaagaagggaaaggaaagcgatgagattgatcgataggaatcggaggatacatggaggagaggaggcgcagctcccgcaatgattgaggggggggggaggagagggaggggaaagtgatcaaatgggcagacggacttgggaaaagaaggggggggaagagaggggtaaaaatggaagaaaaaggaagtggggaaaggaaaaggaagagaaggaaaggagaaaaaggaagtagaggaaaggatggagaaaaagaggaaaggataaggggaaaaaagaggacgatgggaagatgagaaaaagaagaaaacgaggaacggagaggggaaaatggaaagaaagtgaggaaaagaaaaaagggggg

SEQ ID NO: 7710 - DNA, 3828 bp, Heterodera glycines
aggacaattaattggactaaaaataataagtataattagtaaatgaatgtggcattaattaagcaataaataacactacacttgaagactaatttcaaattaaaaacatatcttattcacctttcttgtgttggcgactttttgagaaaaatgagcacatttcccgacggtgttggatcgacgaattgaccattttcacaggctttaaaccattaattaattaagatagattttcatagttccaaatgttcttgcttcgttggaacactgctcgaactcccgcgtcgcctaatgacccgttaatggcacggaaaaagaattgaatgcgcggcgaattggtcaccagcagagacggggccgaattggcggaagaaaagttttgggcaaattggacggaatgggcatcgtcgaatagaacaaggtcgaaccaatcaccgggagaaagtcgaaagagaggaaactggggggggggggggcaagtggaaaagcaattaggcgcttaattgatgaccccaaattcgttaattgtgatgctaatagcattagtatgtaatccaaccttaacgagaataaaacctcggtttcggttttcaatggtccattggcattgcattggagtcctaatttatgtaagtttgtttttgttttctttaatttattttccttttccacctgtaacggcccgtatccggcacattcattggaacggcaaaagagccgttctaattggttaattaagcattttaaagagttcttaagaaaagatggacaaacccacgactcaaaggtacgaacgcaaacattggcatctgaatggattctcagttaaggtcaaaaacattaaacttaaactgaaatttcatcagtcctatgctttcgttaagaatctgagctcagttcccaatttgccctttttggtattttattttcatacggtaattaccgtttttcatttttccctttttttgggttggcttgtcctactgtatctattccttctgtttaccgtccacttcgtagtgcaaatggaacccccgccgtcgtctcctcccccctctgtccttctcatcctcctcaatttgctctccatttttttgtatttgttcgtacaaaattaacagccgatttgccgccaaaattgacggagttttgtcgtcgttttgtgaaatttgaaagtgttcgcctttttccaaatcgattagtgatagccgatcgtttgagccgagtttaagcgcgagaaactgttcaaacattatgtaattgtcgaatcaaaaccaaattgttacgtccagctttatcctcgcccccggcttctgctcaattgtccatttttctcggttcggcaaacattcgctgcctttggattttgttgcggcgattcgccaccgaattggcgaaatgtctcccgtagaatcgctttatttatatttttttgcatttttatttttcgacaaattcaccttaattcagtaaatatttcttcagtgtcctcgcatttctgtgtcccattatttgttttgtcgcagttctgtgcccattcgtcgtcccccgattcgcagtccgaaacgccgtcgcatagtgcgcgatgcgaaacgcacgcgccgttgtcggcacaacggtgctgcggaaggccaatgccatctgaaaagggcaggaaaatggaaatatttgaatgttggttgatacccaaatagcaagcgaatgtttggcaaatgaccggcaattggtcagaacaattgcgaaggtgccaaccaaactaaatttgaatttgaatgaaatggaatggaatgtcattataaatttgtgttttaaacgtttgtctcgtccaataacgcggcaccccacgaaaggcaccagcggcccggctcagagttggccaaatgaggctccagcgaagcccaggcgggactgaagagggtttgttgggattaaagcatatgtaaatggaaaagcaacttaaaaatgctggtgttctgtgccgatccaaaccgatggattatttcgggcaattctttgcttcgcacttcaacgtacctttgaagacaaacaattgattaattataaatgaattatttcggcttaaattaccagtccatttatgctaatggtcattttagctctctcttctttttttcaattatttattttctcaccacgccgtccaaaattcattttgtccgttcggcgcgcgttgcaaaagaaatttgcggctcaaatccctgtgaagaagccaattgtccaagtgaagcgcatcactgcgattattcctttaatttgaccccaatttattttgggtttatccgttaataataaattttaaaaaaacaaatttaatataaaaaagtgaatttacatttcgaggccacaaaaaatgtttgcttctgtccaattcattcgcagatcaatcggctccattttaaaacaatttgtgccgattgaaagccaattatctaattgggagaaaaaatgaaagcccaattctttagccattttttaccttttggctcagggcaaaatatgtgtaagtcaccaatactataagggaattcttcggccaaaatgccaaagcgggacaaaaaatggcataaaaccaatggcaaataatataatttgttttggaacataataatttatttagaaacaattaactcctttgaaaggaaatggataattaagcgaatttgagaaggaaaaaaacaatgaatttgacttaaaaattatttaactaaatccaaaaataaaaaagagaaattaaattgcatttaaattctgttttagtgtctttctttaaatgttttctgcgcgatttccgaccatcgatttgcggtgcatttccaatcactgcaaaatgacgtaaatgccccgccactttcacattcaattaaacgggttgttcttcttcttttcttccgttcttctctttgggtttctcttcaacgattagttaacaatgaaaaggcaaatgaatcaaaacgaatttaaatttgccacatttttaaatcacatttttagttgcataaaatgaaaagaaaaagcaaaaaaaaaggacaaaatgccatttggcagaagaataaaagtgactggcttcctcagctgttttttaaatatttgtccacattttcttcttttttgttcattttccgcctttgtattgggacgagcgatagtcggggatggcacaatgagtgaatttgttggtgaaagagcagtggcagcagcccttgaaggtgcagctgtggcatcctccgcagcacgtcactccgtccggcgtgccgtcgccggtgcacacgccgctggggtcgcaatggatctgatgagcggcgattaattaattaattattggaatgttaattaattaaagccgaacaaatcaattaaactcgccaatgccattccgatgccggaccgggtgaacaaacacagcaaaacaaggcacaacttcgccattgaacagaaaatgcaaccaaaaatagaaattgatctgaggattataaactattaatattataataaaaataattattttataaaatttgaaattaaaattttcgatgaaatttctgccaaaaggccatttaaatatttaatttggaattaacttatttgttagtcacttattaagctattacaattaacttttattcttcttcattttttttattgtattttaaaaattatataaaattattcatcccattcggtttgtgtcgcatattggacggtgccaaacgtaaaacgaaatggtatgaaaaaatcaacctccctgaatttgccaagaagtcgtataaaataaaatttgcaacaaataaaagagaccatttttttttt

SEQ ID NO: 7711 - DNA, 2316 bp, Heterodera glycines
  unsure (1)..(2316): unsure at all n locations
tagtgatttttatataaggtattaatcaccaaaaatgtctgttatttgggaaattgctagaacaacncaactatctnggggagctcaattttcactcactatcaccctggaggagtgatctgatcaaaatggtgcaatttagttgtttgatctgcatcgaatgttctcatttatgaatgattcagattttatcaagtgcacgaaaaaatttttttgaagtttgatcaataattctgttatagtatgacaaattttgggaaaatacataaaaaataattgttttgtgtggttcttcttttgataatttttccaattgggtagttcacatcatttgcgtttttatttttggcctgtctataattcctacaggcaattaccgtccttgatgatagagggtaaatttctcccattgtgaatgaaaggtgtggggaaatagaattgcatgaaagaaattataaccaaaatgttccagattgaatgaaaacaaaaaatgtgatgaaggatgggaaatttgagattctttgcctctagggaggggtggacagcagatagcgaacagtaaatttgatgaacgataatttagaataattttgataaaatgtatcggacattatcgccttcttctgacactgcaagggcgaatacggattcgatccaatgttgccgtgcgcttgggcccgatcgcaaatgcgagcaacctacgtcagaatatggcaacatgccgccccaatcgaaggaaaggcaccatgaagtcaacatcgatgatgccaacgttcatcggaaatacatgctgatgcgcggaacgggacactataaccttttttactacaactgcaagcactgggctgaagaatttgtgataaatagtgagtttaattgaaaacattttaaaaattgaaaagtctattaattttttgaataaattcagttttggccaagactcggaataaggacgaaaaatgtggctgtctgcagtttcacttccgggcaaaatcaattgaaggtgaggaaacaatataaaattgaaagtcgtcaaatcttagggcaatttttcgaattgaaacaaaaatgaaaagcacattttgtgttcagaaaaattaaggaaattaaaattaattctatttaaatgtaaaatttcttgcaaattttcagctcatcgaaattcccgtgattatgtcaaccttgtgcgatttgagtgcaccaactgtcggcgcgagaatatgatcatcagcatactttatacagaagtcggaaaaggaactcggtaagtaaagcacattttactttctctctcactctcttcttttctcctttgactctctctctctctctttattcttttatctctcccactctttctccctctcttctcattcatgctggtatgcacaatgtttctctctcccccttctcttcctctctcgttccactccgaaacgtgccaactccgtctgagccaactttgagtcaactttttaaattgttgactctttgatatcattggaaagctcttgacaggctctattagcctaccaataattacagagaatgtcgaactgtaaaaaattctcctcttcttttcttccctctatttttattttctgctcccttattgtctcccgctccctttctctcctgtcccttttatcccggcaaaattttatatttatttatttttttgatggggctgttatgtcgatcgttatgccggacaaaggcaccattatattgacatgccttttaacgaccttcgagctgtttatgatgcgatgccggaccgggagtcgtatgctaagcatcactacgatacttttcattgggcgagagccttttacaagaaaagtaattattttgaatttgtagcgcgtccctacattttcggcccgacttttacggctgtacatttttgacctgttggaaatcgaaaattaacgccccacgccaaaatcggattttttctgccaacggaaaaaggatgataatttggcattctgttggtcgcgaaaatcagattttggcttgggccgcaaatgtcggggccgcctccgattggcgtgcataatcaattttcatttaaaatcgattatttaatgtttagttacggggttctggtgatgatacaagccgagctttggggcccaatttcaaattcgaattggccagtcgctgatgaaggacatttgatcatgttatgttttctttgattttttcttttcattattaaatgtactttttattatanttctcatttaaccgatttcatcattttattgcattttttttatattctcgacttgaacataaattttacttttt

SEQ ID NO: 7712 - DNA, 916 bp, Heterodera glycines
ttattgatcagacagcgccgatgtaataaatataggaaaaataaataacatatatcggacaaagggcagcagattttgaaaaggagtgggagttaagtcaaatgaattgccattttgtgcatttgaaccgttttgcccataagtgtgcatatggcagaaaatgaattttaatttgttcggattcggcttcgggtttgaaattgatcgaaactgcgcctgcttcgtgatacagtggcatggtgcaatttgaatttatgaacagtggcaatcaaattttacgcgtccaatcaaatttttatgagtatacccgatcaactttttaagtctactttcattgcatctacaacaatattgcgttatgtttgactagtctaatccgattttttcatttgaaccaagtaaatgtcggagaaaggtctttaatgcgccccaagttgcctgatcaatgcttgcgtatgtgcacttgccggtattgtgggtctacagaagaaaaagtggttaaccaagggtgattctcaaaaacaatgcgcataccatctaaacgctcttgcgctttgctaatagtgtatttttttaatggatttattttaacgaaaaatttaattggacgcataaaagtctattggacgcataaactggactagaggaaaaaaaactctgtgtcccaaacttcggaagaagcgtttttccaccgaaaaattgttgcttcctaatttgtcaatttaattttttttttcgagtacaaaatccctccctttcacgaaatgcctttgccaattccccccctcccccctccctcccattttggcacacattttacggaagaaatgcaaaaatgaatttttgtgatggtcacacacacacacaatgaaaaagtatttataaaaaatgtgtggtggtagtggtttgagcccgt

SEQ ID NO: 7713 - DNA, 1370 bp, Heterodera glycines
acgagcttattcatccagaataaacaccgaaatatgtatgaaatatgtacaaagacccagaaatatgtaccaaaatatgaaaataaaacgtacaatggttattttttggaaaaaatcttcctaaagggtgaaataggcaatgaaaaaatgccataaaatgacctaaataggcttagaataaatcaaattttttagcttggtggggtaactttaagaaaatttttagaaattaaatgaatttccatataattttcgccctactcatcagctctgacctaaatatttgacacatttctcaagacacagcactcttctcactgtacagcagcaacgataaatctctcgatacaaatctcgccggatttcttcttcgatgatccctccctactcaaaaacatttttcaaattcctgggtttaatgggtggaattgttgcactttgtgttaaatttagatgaactgcgagattttagaaagcccattcaaatatttgaaaagatctttcatttcattttatccgtataaaaaatcctcattttaaaaggctctagtaaatccgatactaaataaaaaatttttaaaaagaactcatgagaatttcgaaattaatttttaacttattggtaaaataaaattgggaaaattgaatataaatctataattttaatttaataagttctaaattgattttaaaatagcttggagcaataaaaaatcattttgctgaattttatttaattcgaattctcaaaaattatttttaaacatttaaatttaatgtcagattttccggctcccttttaaaatgttccgggtcggcttggtctaattcccagaataccttatctatattcggatatgataagaaaactgaaaaaaatctgggagagagagaaatcttttcggctgcactttttctctctctacgaaaaagcgattaaaaaaatatttcattcatttcggaagaaaatattacacacactttcagcagcatgcacatggtttctctactgctcatcagcaccataccaatgctgcttctcatcgtgttcacagctgtaattggggcgcgtgtaatcgacggaaccaccgccatggatttgttggctggcgatagcgaattgaaacaatcgcagtcaaaacaatttgcagtcagtgcgccgtattaataaataccgtagaggggggggggggctctatttttcaaacctcctcaaaaggcctccttctattagagggggtcttcttttagagggaggtcttctattagaggaaaaacggtagtcgaaatcatagtgaagtattgggattctaaacaaatggatgttaattgaaaacatagccattaaaaacaaatcgtaaataagaaat

SEQ ID NO: 7714 - DNA, 1951 bp, Heterodera glycines
  unsure (1)..(1951): unsure at all n locations
ccatttaataaataaattttattttaaataattttttttcccaattatttcgtttcttttattttcccctttttttttttttccccctttttttcttcttttcctaacaaaccctccttctccccccatcatttttacttccttaaaaaaaacattctttttttttcttattttacattaaaaaaatcccacaaattttactatatttttacattttaaatatcttaaaaatctnaacaaacattnactttaatttaccaatttcccatttcattttataaatttntcaaatacccaattttttacacaattctaaaaaaaaaactatttttcctttactatttaaataaatcttcttatacttaaatatttaaccatttntacttaactttcataaaacataaanctcttcaattnancaaataattcctcancnaacaatttnttctttcantccattctttcctctntaattcaatttctaaaaantctcaaattgggccaaaatgctttttggcctttaaactcagtcagtctcattcaatctccaaatcccttttttccgcaatgcttttgcctaaaatattttcttaattcgaagccattgtaaatccatcaatttaaaatttatatttaaaattgttgtttttttcactttgaaatgatttgttccattctatcggataaatgcaattaatacaaaaacaatggctaataataattaagaattcaattaataattattattaaaatatttgtcttttgattgcaatttttcctttttactcggtcatttattcagctcataaatttatctctaaaaatagttgggaaaattcccaaatggaattcctatctttttaatgatcataattatactttaattagatattctttttgttttttatgtccgtaactgatcaatgcaccgcacctccacacatccatcgcatcattagcacagaagagagacacattcatcacattatcatatcatcatcatcatcatcatcatcatcatcatcacatcatcattcatcccccctccctcttcctcctccctctcattattccgtcgcggttccttttttccaatttataaaagtgattgtcaagtgatcagtcatttattagcccaccccaacaaaatgtgggggaggcacagactgaggaacgaatcagtgaatggaaggagtaaacagcaaattaactaattaataattaattaatgagtgtacaaaattactaaataagcaaatgacaattgcccttttaatgcattcgttgctcattttgttttccatttttagcagaatcttttcccggaattgttgcttatgggctaattgctgttgagtttcaattttatttgccactttatacctttttgtgattaaatcagcttacaaattaatatggtggcgcataataacaataataataaccataataatgacaatgaaaagaaaagttctggtgttacggtaataagtaacaacattacggtaaatgctgcaacttcggctgagcattcgtcgattgaagacgaaattgagagcatcagcaataaaagccgcaactcgaccttctcagcaaatggagaacgcaaaaacggactttcgtatgggcaaaatgtcaaaacgaaaattgattgaaacgaatcactcattttaagctacgcggagattctgatcaattttctgaagggaatgatcgggccgggctgtctttcgctgccattggccttcagacaagccggactatgggcaagtgacggcgcaaaaaagggaacgaataagccgaaactgtccttttcagactggacttgcgctggtggttgtgctcggctttttgaattggcattgcatgcacaaattggtgaaatgttcgcagagactttccaaagagttcatttccttttttatcataattttaatttatcactaatttt

SEQ ID NO: 7715 - DNA, 3263 bp, Heterodera glycines
acagattggaatttgcagtgttttttacgttttttgtgcaaatcacataaaagaagtgagtaaccattcactgatcacccatcgaattggtcgactcaaatggccaattgtttaatcactgctgatcatccaaaagtgacagtggaaaaccactgatcatccactcccaaaatgtccaaataatcagtcactgattaccccaaaaatgacaaagtgatcggtaattggtcgtccaaaagtggccaaataatcgggcactgatcacttttcaagaaagtgtgaatttttaagtttgtcgactttgaattcccttccttcacttatccgaaatacatctggatgttctccatctttgtgcccatggttctgatcacttttgtccgttctcttcgtgccattgccgtgctcagttccattggcaatgtcttttgtattgccgcgctcacttttattttccaggcaaactcttcaaattatatatatatatatatatttatatgtaaatattaaatattctttctttagtatctcttccgagcaaaacaccaaaatttgtccgactttccctcaaatacaaattttgacggcgtaatggccgcgtgcggtgccgttttatattcgtacgaaggacaagcgatggtaaacagagaattgaaaaacatgaaaatcatttttaatcaaaataaacaattaaaaacactcacttttatatgttttttaggttcttccgcttgaaaatcgtttgaaaaaaccgtcacaaatggtcggtttctttggcattctgtccgttggcatgaccgtagtcactgccgtatattccgcctccggcgttctcggttacatcacttacggctctcaagtgaaggggagcattacgcaaaatctgccacaaaatgaaatgttcgaccaaatgccaaattggcgaaatgtgcttattaattctaaatgatttagccaatttgtgatcgtccgcttgcttttcactttggtcatgtttttcggttttgctattcaaatgtacgtcgtggtggaaatgctgtggcccgaatttgtcaaatttctgcgcaatttatgtccaaattttggggttaataatgagaatgatcacaaaaatatggtcggcattgaattgctcttccgtgccgcgctcgtcaccgtctccagtgagtggtgccattgtcttccttttaattgcctttaattgctcgttcaattaattaccccctccttacttccaagtgctaattggcctcgctgtgcctgaattagagaatatcattccgttggttggtgccaccgctggaatgcttttggcactgattttccccgctcttctcgaccttctcgtttttctgcccattcatttacaacggcacagaattcgtcaaactttttggcttctccttgacaattggacacttgtcaccattggagtctttggtttaattgccggactgagggcgaatttgcggaacatttttacaccggcagaaaatattgttgcataataaaacggaattaaatatttttaaaataactagtaaaaagagaatatatgtacatatataataaacttaagtttcataataaaatgcataatattgttgattatggtcaattaattacttacttatcgctgccattctctcattttttgtttcttcggcagatttgtgttgaattccattttaaaatatatgaataaacttttgctcagtgtccttttatttatttgtgcattctccgttagttattaattaccctaatttccgtaaccttttaaattaaattttcctccctttaattttaaaatgtttcattgcttttgctgtgtcatttgtgtcactgacaaagcttcatacactttggatggaatggcagacaaaaattgaactctgctgctacatgaaataccgaatgatcgatgaattttgatttcgatggtcattggtcaaataacactaataaatgattcaacaattgatttttattaagcgttgcccgaaatttcattgaaattctctccggaggactcgtaaaaggcattccaccgaatgtaccataatcggcacggattggtgaacttcgccttggcaaaagatgtttttggcccgcttttaggtgatgatcgaccgaataagaagctgtagttatgataatcagataacaccttttattttgaaattcttttaatcaaagtttaatttgaaactgaaattttcggtcaacaactttctgattatttaattgttttttccgaattatgttttcactgtgttttggcacatttgctgtgaaatgaaaccctggcctaatttgaccaccattaggacattgtgacaaaaatgcggtggtggggtggccaagggggggggggcgtattttgcggggtttcgcgaattttcgtcgttttaaacccctaaaaaggacatccctttcttttcaaatcgccccgcaatcattcacatcaaattctcttctctcctctgtttgaaaaccagtcccccgccaaaacactttcatccccggccaaaagagacacaacggacggacggacacccgcggggattggggcgacgtaaacgaagggaccgaccaaaaaaggggggaccacgagaattatacgaataattgtagaccttcggcatgagggttttcttatcttagtgagtggatcaagtaaatcggatttgccgataaataaggaaggtaatataaaattaaaaattatttcaggactaaatatgtgcccctgtaatagttgatgtttagaacttatttaaaagaaaaggataatggatattatattttattataattaagacattaaattatttggccgtattagcttcgagagaaggtgacaataatgtgtcaaataggcactaatgttcaatatccgtgaaaaacaatatagaaaaggttttaaaaattccaatcacaataacttttaaatattaattagcaacaaaaagtattaagaattagaaaatagttcgaggaaatactataaaaataaatattcaaaagaaaaatgagtgaaattagagaaacataagtcttcaaaaaaatgatatggaattctgaaattaattaaacgaaataataaaattaaaacatttcgcaaataattgtgaaacagaatccatgtgttaattaaatacaaataaagagtattgttttttatatttaaaaaaatagagttgaagttttctaaaaatagtgaaatatatgtctagatagtggctaaaaagctgataaat

SEQ ID NO: 7716 - DNA, 1786 bp, Heterodera glycines
aaagaataataatattcgattcaccagcagaaatgccctcctaagattcacagttattatttttattaattcggttttttccttttcttttctgtgtctcctttgcatttaacagagaaagtgagcaaattttttaattaaattaaacattaaaatatttcaagtaaaaaattaacaaaaatatttataattaaaatgaaaattcaaattgcaatgcgttaacaaataagcttaccaaactccgcccgaatgtgatgttaacgacccgctcagctgtagccaacaaaaacacgaggtgaatgatcaatcggaatgatttgcccattaattatttaatgaattgttcttctgatagttaatagtccatttttgatttggtcattagtcattagaaaatgggttttcttccgggaaccgttttcttgaccaattcgactcattaaactgtttttcttgcccttttcggtgtgtttgtttctgagcggcgcttacaaatgcgcgtgtccgcaagggtacggccgactgccggacgggcgatgtttggtgatcaacgaatgccaagacgcaaaactcaacgaatgttcgccggatgcccaatgcattgatcaggcacagaaggggccaaaatgggccaagaaaagggacaaaacatgtttaggccgagggatattcttgccgatgtaagccgggatttgccgatgtgtcgccccaaaacggaaggcccggcacagtgtgccgaaggcagcagaacgaatgcggcagcccaagcacatacggtggggaagggagcagcagaggaggggcaaatgagcagacaaacgaaggggcaaaaggaacgaatgcttttcagccgtcgattgcgaccaaaacgcggcatgcgttgacactgccggtggttatgagtgccgatgccatccggggtatacggacatttccgagtcattcagtcagctgccgggacgaaaatgtgtggtggcggtgaacgagtgcgaagatcggtccaaaaatgactgttctgaaaatgccatttgtaccgatgccaaagaagggtcagtgaaaggggaagggcggaggaaatcactttgatcagtgtcaaattcactcttcagttacacatgcacttgtaatcccggctttgttgacgcgtcggccaatgttggcaaatacccgggccgaatttgcaacaaaccctttgaaaagttacaatttgacactccgacaaatcaatgcgacccgaatcaatcaaatccatgcccagcaggacaagtgaatggatcgaaattaaaccaataaaattacaaattttaagatttgcaagcaaaactctgccgggcattacaattgccaatgtggcgaaggggcgacatttgtggacggaaaatgccaaatagtcgcggcatgtcaggtgaatgagcagaattaattaggaccgacgaggcggggggaagtgaccgatcagtgagtgagcacattgtgaaagccaaacgatcaggtggacccggaatgtgacaagaatgccaactgcatcaacgtgctcggctcctactcgtgccaatgtaaacccggctttttcgacgtggacaaagtgacgccgggcagagagtgtaaacaatgtgagaaaaagggatgaaaatgccgaaaggacggcagtgatttgtttgtctgaagtgtcaaatgaatgtgccgatcggcacgactgttcgccgttcgccaaatgcgtggacaataaagacggattcgaatgcatttgcaatgccggatacaccgacgtttccttatgttttgg

SEQ ID NO: 7717 - DNA, 1583 bp, Heterodera glycines
tcgtccagcaatgcctttgcctgttccacacttctctgagctgaaaagcgccaaggaatgcgtcggtggtttcggcatttggcttttccaatttgcaggccttgaaaaaaacagggaaaatttcccaaaaccagggggttgggttggttatatggtatatcaaatgtattacggtcaaaaatgcgtttctgagcatttcattggcaaacacggcgccgtccgtcaggtgcgcaaaccgtgccaatgccaccaccaccggtggggcgttgtcggcgtcgacggcactggcgctgtgttggcccttggcggccaattggtcgcggaccgaaaaattgggaaataattttgagaatttatttatttttgagggattttctttaccagttgataaagtcggcacaacacggcagttttgccacagcctgattggccatggaattggacaaacagtccggcacttttttgccgaatttcgtctctgaaattttttttttatttttttttaaataatacaaaataatttaatcattaaaatttttattaaaagaatataaagcgattttaaattctttgaatattttaattaaattatttttgtattaaatttgaaaaagtgaaaaaataaaaattttctcaaatttttcgaaaatttctaaatagaaattaatttaaaaaaattattaaagaattaatcctaaaacatttgttcttaaaagaattataagtagttcatttttaattcattaaaatttttaaataaaaacaaaattaaattggcaattaaatttgaaaaataaacgaataaacgaataaataaaattattttaaaaaagcagcattaattattattaattattttaataatttgctgctgcggtatcaccacaccacacttgtcaaatatgcgtttcacaacagcgtccaatcgggcgtcaattgcgccccggggcacccaacgcgagggaatgcgcgactccaaatgggccaaatggatggcatgttcggcctaaagcaacaaataaaaaaaagtttaatattgtatatattttcaaaatgggtgtggtttttcatggcatttttacgggaatcaatggggggaggggcggcacgagacccgagaattggtccaaagcagggctgcacgcaattgcagattgcggattacggaaattgcggggtttttggagttacggattgcggattgcggatttttgggatttgtccgcaattttgatccgcaatttgacttttgaattattttttgagacgatttcgtgcaagattattttaataaaatgaatttttttttttctattttttatttaaagagaatgtatacatttctttaaattcttatttctttagcaattaaaaatgtcaaacttaaatcctggtaattggtggtattattttttgaccgtcaagggaaatcatctgctaaatgtaaagccaacggatgttcgtattcaaaaacattagatgcttctctcagtacaactgtgcttacttctcacctcaaaaatcagcactctgaacttgacaaacaacgtgaagacttcgttaaagaaaagcaaaaaacagaa

SEQ ID NO: 7718 - DNA, 2607 bp, Heterodera glycines
aaatgttgagactgatgacaaaaaaaaaggaaaaatatatttcgagccgagaatcaagaactaaaatctcgaacatcattagtccgtatttcctgtaatacagcccccccccaccctctgaattagagccccccccccctttgagggggttgaaaaaataaagtcccgtaggctccattacggtggtaaattggtggcaaagaattttttgaagtgttaaatttggcataaaaattatttattgattttcaaattaatttttttgaaaattattttatttcctgtttaatattgtataaatctgtgttcactgcttgtaattagtgttgttgttcacctgcaccgtggccatggcggcggtgcgcggctcgtgcagcggcggatgccgcgtctgctcaatgtttgggtgggctgccaaaatcagcgatttgagccgatccgtcaatttggtggccaattccaattcgtaagcagcggattcctttggggaaaattttgggtgaaaatttttaaaaatttcaaaaaatttatttacctttggacattttttccaccagctggacgggtcaatctcgattttttgctgaattttgggggaaaattttgccatttcactccgataacaacatttatttattcagtgatcaaatagggatcaataaatgtaattagtttggttaattagccccaatttgttaattcattagtgccaatgaaaagtaatttaggcgtcaacaaatggaaattgagaattttattgaaaagttaaataaattttcaacattttaaaagaaattttgtaaattttaagtgattctttaattattaattaattaattactccatggatattaattaattaattgattaatattttgttttaataaatgattttaaattgttgataattatttataattcacctgtaaccgcaaatccaataggaaggacaaaaggcgttgctgcgggtcgttgagtaaccgcgtgctgagcgcgttcttcagcgcgttcacacgctcagcgccttcactgcctgcagcatccatccaacgctctgttccgccatcgcgttgcacgccttagggggggggggggggggagaaaatttcataaaaaaatttcaaaaattttttaccgtgaaagcgccgtgtcaccagcaacgagcgtccgttcgcttctgcagcgtccgcgcaccactcaatgaacgacttgaacagttgcgcgtgccgtttcgccgcgtccggttgcagtgccaacgggccgtcaccgctgaacacgcgcttcgcaacacgctgcaagccttggcaaaggctttgggcacctgccgggtcccggcttgccctaggaggttaaagaaatttttttttaattagagaaaaataaaatttaaaatgctgccttagttggtattctgttggtcgttcagttgcacctccaccacctaaatttttcaatataaagtaagtcgtttttaattaaaaaattaatgtaattttatttcatatttttattaaataaatataccgtattccctaaagatagaagagacccccgtggcttcattattttttcagacccacccccctcaaaagggggctctatttgaggggggggggggctatttttcagcaaaaaattttttgtcaccattttttttgtacattttttgccactttcatggcttttttcaaatttttcgtgccggtgcctattttaaaaatattcgtgtctaaaagtccaattcccataattaacatttttatatttaatcttttttgtcttcattaaacagacaattattttaatttgaaatatttttttgttaaaaaaataataatttatttttaaattatttttttttacttacggtccaacacataaaattggcccagtaaaactgcaacatcatccttaatttaaagaatttaattttagataaaactcaaaaaaataaataaaatattttaattattattaacccaaaatttaatttattttttatattttttaaaaattttaatatttacccccgcctcaagcgccgcctcgcgcaacgcgtcaaactcctccgggtgcagctccagcggcagcagcgcctcgccatagcggtcaccgatgaacaccagcgcggtggcgtcacgatgcgcaagcagttcagccaacagcacgcgttcgtccacgttctttagcacgtcctccactgaacatcggcataagaaaatgtcacgcgcgtacgcgttcacgcgcgtgtagaaacaacaaactttcaaacagtgtgcagcactccaagtccaggtccagctcggcaaagtgctgctgcaggtcgaccagcacgttgtgcagcacctcccgctcgtgcacaaactcttgcagcgagggcagcacaatggcaagcatgtgcgagcgcggcagcacgtcgcccccgtcggcgtacgcagcagcagcagcgaggtcgcacgcactgcttgccttgggcgagccggtgccagatgcaattgaactgcctgaggaattttcaaaatttttttttagaattttactggaaaaccttaccccctcaccgaaaatttatgaatttttttaatttctggaagttttatcaaaatt

SEQ ID NO: 7719 - DNA, 1110 bp, Heterodera glycines
cgaattttattataatttgaaatggcattaatttaaaattaaaaatatttttaaattaaattagttaaaacattttaaaaaaactaaattcaaaatggttagccgacatttgcggaccgacttttgcggaccgacttttgcggaccgacatttgcggaccgacttttgcggaccgacttttgcggaccgacttttgcggaccgacttttgcggaccgacttttgcggaccgacttttgcggaccgacttttgcggaccgacttttgcggaccgacttttgcggaccgacttttgcggaccgacttttgcggaccgacttttgcggaccgacttttgcggaccgacatttgcggaccgacttttgcggaccgacttttgcggaccgacttttgcggaccgacatttgcggaccgacttttgcggaccgacttttgcggaccgacatttgcggaccgacttttgcggaccgacttttgcggaccgacatttgcggaccgacttttgcggaccgacttttgcggaccgacatttgcggaccgacttttgcggaccgacttttgcggaccgacatttgcggaccgacttttgcggaccgacttttgcggaccgacatttgcggaccgactttttgcggaccgacatttgcggaccgacttttgcggaccgacatttgcggaccgacttttgcggaccgacatttgcggaccgacttttgcggaccgacatttgcggaccgacatttgcggaccgacatttgcggaccgacttttgcggaccgacatttgcggaccgacttttgcggaccgacatttgcggaccgacttttgtgactaaattatcaaaaaaaaagagaaaaaaaatttaaaatgaattttcaaataaattttcgtaattaccaaattgaaataatgattgattaataaaatgctttatacaaaaatcatatcacaaaatatatagcacgcaaaatttttcgtgtttcacctactagccttagtctaaagagcttagattttgatcaagcatacctaacaaataaaagatataaaaatatattttatatctttaaaaagcaaaaattaaaatgaattactcaccattatcaatgac

SEQ ID NO: 7720 - DNA, 1098 bp, Heterodera glycines
  unsure (1)..(1098): unsure at all n locations
ccagcctaatatgtagaacctcnggagtgaacaaacaaaggaatttggcttaaaatgtttttgagagttagtctctccccgccccctcccacttgggacaggcaaacatttctcgaccgacaaaatcgctgaagctgtaaacaaaatttagtcattcaattgagtctaaaatgaatttaattttatatttaatacatatttatgggcaattataaactgaagggaataaagaaaagaccatcatcccaagagaaggcggcagtcataaaatgagttatacgtaaggctttcaagaaaagccagtttgttcacttgcttaacatgtccaacataaccagcccaccccaaaaagcattaaatcatcaaaaacggttttgagaggtaaagaaaattgagaaggaaaaatggcaggaggggaagaaatgcgaatgtgaaaaagtacatactctgatcagtttaacattgatcagaaaggcccacaaatcttgggaatgttttcaactgaattggttacacattacaaataaatgtacttgggtggcggcgggatttttaagcacggaaagaacggaatgaacaaaaacatttggctggggaacgaagggacagaaaaccttttcatttgtaagtttcagaaggagggggaccacttttgctcggttggacttctccgattgccattcattgcctttctgtcttacccgcacttctccaagactgctggtccaacaaccctgaaattcgaccttccatcagaagggttcgtctgaacaccgaaaattacctgaaagtgaagaggggcggggggagggtggcgcccccagacacttgcgccgcccagccaaaatgacacttgcgccgccgacatttgcgccgcccccccccccctattttgacataagcgaaacaaacatatactaatttttaacaacgcaacaaaattaatattttcaacaatattctaatcccatcctttcgatcccttcatcccccccacggtattgcaatgaatggaatatgtcggatcaaatcatcgtcatttttttcttctttccccgcctaagcaaataaccaattgcctaataactgagtcttttt

SEQ ID NO: 7721 - DNA, 4796 bp, Heterodera glycines
  unsure (1)..(4796): unsure at all n locations
gctctctgcttatttgttagaatagaaatctaaataaatattaaatataaaataagaatctgatagctcatcaaaaagcaatgttaatcaggtgttttttctatttttaaactaaaatttaaattatttttttaatgaaaaatagtataatattttttacgacggggactccaaaattgataggatggtaagtacaaaagggaaatgatggtgatggtggtggtcatgtttgtgattgtttgttcttatgccgacctccccccgcccttcccagcagacatcccaaattttttcacttttgaattgccaattgtcagtcaattatggggttgtggttgtgatgcgattcgtccttttcccgcgaaatgctgcgtcactttaattgtttcgtttcattgccctttgtacacagtcacatttaaagttcgcttttttcaaaaatataatttcagataaggcttcgttttctcatttttccgaatgtgccgtactgattgcccttgccctcctcttcctccgtcctcctcccctcctcccgccttttcttcctcggcccttcccttccgtcgttctcaaatgccctccccatcgtttgcaatgttttcagtctcttctcgctttgcactttttctgcccttcaaaagttccactttaaaatcgcttcattcatggtaaggataacaaacaatgcaaaaatcagtttctcttttcttttttttcaatgatctgctgttttttaaattattttttgtttcttttttctctgatttttgtctttttaggcttcccttctttctcttgcgaaagttttcccatcggttgctccatttggttatttcattgacttttattttgacaatttggcacttttggaattggcacgtcgaacggtggaccaatcgaacgacagttattatcgtaagtaattctgaggggcgtcttaccccctcccctttcgcttattaatttttgttttaatttgtttttgattacgcccactcataaacgacctgaacgtcttgcggacatgaccaggttctttttcccttttctctctgttttctcattttggttgggattttcagattttcgcaaactctgatgcatatttctgacctccattggtacaattttagccatcctaaaacgattttcatcgttttactcactccgctgttagggtcgtcatcgaagatgccaatgcgacttcggatgccgttcagcgtatcctcgtccgttccggtattcccttcacttacttctccaccaccacgaagcccggcttccccaaacgcggatggagccatcgcaacgtcgggttggacttcgtccgccaacactacgctctcttccctcacaatggggtcggtccgtctctccgttcgtccgttgcctctctttgcctttgaaattggtttttcttccgttcgcaggtcgtttattttgcggacgacgacaattcttatgacattcgtctctttgagcgctacatcaaaaaagtgagaacgattggcatttgggcagtcggtgagtcattttttgtgccttttaatttttgattttttttttcttaggcctcgccggttctgcgattgtcgaagcgccgcacgtggagaatggcaccatcacaaagtgagttgtcaattcccctcacatttgttccactttccctttcttcagatgggatgtcgtttatgctccaaaacggcgtttcgctgtcgacatggccggctttgccgtcaagtgaatgtgttgccttttcattttgccaattaccctttaatttgattcaattttcagtcttcggctgatcttaaacaaaaagtagtaactgtttccgtcccttcaatttctttctttctttttgcttccctttttagtgcctctttcaatttgggctgtgtccgcttttcgcctgagtcgtgttttcttgcgcaggtaatttaataaaattcaaaattaaatttatattgccacagtttggaattcctcgcgaaaaagttgagccatttggatggaatgacgagccaaaggaagtcagttaaaagcaaaaagataattttatttgtattttggtttagattttggtgtggcacacaaaaacaaaaaacattggcaccagagtaagcaaatcacggaaaatcaaattttccttttttgttttcgttagttttaatacataaaagcgtgaatttgcgcaaaatgaaaaggaatgattgtgagaaaaaccaaagaaagcagcaaatacggcttaatctgcttactttgtggacatattttaagactctaaaaccttaattattagtaaattttaaaagagaaacaatttcagggagagtcccatggatacgtcgtggagctttaattggtctgatttggctgcgggtcgccacaattacaaatttattgacacgggtgtaaaaaacatcgattgatgacggctaaccagcaaattgcccagcggagaaagacgggaaatcggaaaaattaaaacattggcaataatcgactgactaatgataatattgcaaaatatataatatttgaaatttattttcattcttttaattaatgttgctttgataatattttttaattttctctctgaaaatggactgtcaatcattctcctgcattttcaaaaaagcccaccgaccgacccatcgcccttttcaaatcagcagatgagccacctcacctgtcaaccattcgttaattagtgtcccatttaattaatttccccccccccccccataaaatttgtccgattttaaaatgccaattttatattctgccctttttcgtctgttcctccctttggttgtcccttctcttttttgggtcgctttggcttcgatggaatgcagcgaaagtgtgctcagagtgagcgatttaaccaaagccaaagaaagaggtacaattcggcattttgggcttgccttccatttcaaaaaacggcgattgtttaattttgaatttcgcctctccccctttaccgtaccctctcccatgtacagtacccttccgtttgctgaacctttccctcgcttctttggatgtgaatatgcgccccttttgcgactctgagggccattcggccgtccgattgcccggctttttgctcattttgtccggtattctttcgcccttccctttttctttttccaatgccttcgttttcggccaaattgtcctttcgcgccctttgcctccactgaatgcgtcgtcccttcgtttgtctctcactttggagcaaaactccgtttgggtgggccgaatttgtgacaaagggcgaagtcaaagtgcctttttgtccgacgatttttggtgaatttcgaaatgattcattcattcgttggattatttctctgccctttcagttctttttctctgtgctcccttctgccggacgcgtgcaattcgctggaggctttggcttccaaatatgctgagagtgatttccccctgcttttgccactgtccgatctgttcccgactgatcagccaattgctctcgtgccaatggccaatttcccattgctcgagggctattggaaggcgcaggcgcaaatccaagcggacgacggaaacgcaatggaggaggaggaggacgaacagaatgagcagcatattctgacacattttggcactgaaaattggcattttgtttcgttgggcaatgatttgcatgaagacctttaaaatgaattcatttgacattcgttttcatttaccgaatttatttattttttataaattatttatttggtataaagcgaagatgttcaaaagttgctgcttttcaaattaattatggtcaagtttctgtcgctttccacaaaatgtgcaatttgcagcccatcggcgcattgatcgggcggatggaagcggcggtgaccaccctccgccccccgaggggaaattgtggggctggcgaccaatcgtcggctttgcattggatccggtcgcctttcgctgttcatctcccaccaccgaattggcggttccttcagcagacttttcacttttggcttgcattggcttttgctctttgcctttcgtattttcccttcatttttcgcttttcccaacttcaaaatgccaatgcctttggttcggttggctttcccccgcagtgtctttttgttggccctcttttgccggttcgcctccgccgaattcaggccccatttcagccaatggctcgctcaacgctttggcgaagacgtgcgcaacaacttggagaggtgtgtcgtacgaatttgactcccatttggtgccgttttcagacgcgacctcggcatttggggctcttttggggggcgcaccgccgcggaggagccaatccgaaaccaaccggtggtgttcgtgcacggttgtctgttctgttactgttgcaattcaattggaatgccctcaaacttttgaaggtgtttcaaatcgcgcgtgcgacaaaatgaaacaatccgccgactttttcttgcaagtgccaaaattaacataatttggcaaattgttgttttaaactaaaaacaactacagtaaccacggctacactttttctgagctgtacggtacaacgtatgccaatggggaccaaggcaatccgctacagtaataaagcggcatttgccacaggcaaatgccacaaacaaatccctttaggtgggccgcctactcaatgaaatgccattatgtgaaattagtaagagaaatgtcggatcagttcttgaattggtcgnngatgatcaagggtgcttaaagtacgcgctttgatcgtcgcagtgcgtttatac

SEQ ID NO: 7722 - DNA, 1975 bp, Heterodera glycines
aatcgatgcatcatcgattttggcagtgtcgtcggcgcattcttttttttgaacggctgccaattctcatatatttgtcctgactgagcagctcacatgcagcagcgaggcagagagcagttcatgtttgtctcattccccctgctgttgcagcaattcctcggttcattatatgtatttacctactttttttttctggctccactgactgctcttgctatggccttccatttttagtaattgacacggaagataaactaagaagcgggggggaggggcaaagacacgggttctgctggaaattaaatatctatgggcccgcaggggaaggagggcgaggtggggggaggtgggtggacctcacgtgaactcgacaacgacgccgacggtactttgctgtacaaatctccaattcaactaaatgcccggggggagggcgctgttgggtctgctgctgacactctgacatgagccgaggaagtgcgtacatatgtaaaagcaaggtaacagaagaggaagaaggagaagcactcacggaggaggagaaggagtaggactcatccgcgccagtgcgcattaactttagcgcgtttgtacacatacaaatgtaggaattatacattgcgcgcccacactttgctattttatccccccgtgccctctccgggcccttttttgcccttctaatctaatgatgtgggcaaatctggcgccgcttccgctgctcatggaggtggaaggggagaaggtgtgtggatggactttgtgctctgtttgtgtgttttgttgccaatttttcccctccgcttgacccccccccccccaatggtttcatttattattatcctcctccattcatttctctttcttccgcctctttccatttctttttctgtccataatagcacatcgtatatttctatttaccataataaaaacacaggtaaatgaatttggacaaaatttcctcctcatttgatcagaaaggaggtagagatttagggtaaattaagtgcaacgcttcattaaatatgaaaatttgccaaaaaatcatttgactaattataattactacatacctatgtatgactgaggatgttttttgcgcaaaaatctgatgcaattctttctttctcactttatttatttttgttttgaatttcactgccatcggcggcagcgccaaaaactcgtcaatttactaattaatttgacagcaccaatcagcagcgctcattgactagcagctcttgcgttattcaaattaatgctttaacaaccaaatccgaagcaataaacaccaaaacaacaacaacaatcaaacaacaattttttgttgttcggtcattcaccaacaaatacataatttttttaattgcgtaaatccgtgcatcgcaaattgtgcaaaaaagaagaaaaatttgaggaccgaccacaattttgcgttttatcttgcggcctttgttagcaaaatgctgtcacctgaccaattgcctgacgaggtttgatcgggaactgtataaagatgggaaagattgacaaccctaaaaatggttgtttgtgatgccttatgaaaattacgaattaactgatgccctattaaatgcctgtaaaaagtcaataaagttttgaacgtgattctgacaaatgttaaaaactagagagctcacaaaacgcaacatcagttggcgattgtgcattacaagatagagggtctaaagagatgatatttttctttatgagtatcaggcattgatcaccttggacagaatggaaaacttttttcattgaattttttgattttaatttaggctttgagtacattactcgggaaaagatttgatcatcaactgcatttttttctgtgacctttgacgacaaaaacctacaaattgtaagctttaggaagattgcattcggtataattcttgccatcacttcagaatctgaacgcaatttctgagacacatccatg

SEQ ID NO: 7723 - DNA, 5865 bp, Heterodera glycines
  unsure (1)..(5865): unsure at all n locations
tttttccgttgaactattgccacatatattcgtctaaataactgggcaacaattggcgcgttgtccctgtcatatttgatggaattgaatttttgtatttttaaaaaaattcgaatttccgttccggatttcgaaatgttcgaaaatgtggtcagattcgtattcagcagctttaatgagcatataaatgtgtttcccaaattttattaaaaaaaaaaaaaaaattcgggaccaatgaaccgaaagattgccatttattgtctgttacttttagcccagaatttagttaagcaaaaaatctataaaccaagttttcacttgataccataataaactgagattgtcattgtttgaacgcgtgaactcgaacattgtttaaaatgatcatttctctggaatttttcagttatatatttttgtttattaaagtctcgtaaaattgccaaaacaattcttttcatgtttaagtccattcttcgcaaccgaaacgaacggtcgccaattaacaacgaagaattgcagaaaatgtgcaaaagagatattgtggagtttcttcctactccgaaggaggtaccaacaatttaaagctattaggccttattttaattagattttgggtgatttcgttttcgagaggagcgccgggaacaacagagagaaaaggaagccgaggaaagggaggccaatgtcagcgtggaaaagtaggaaaatggacttgtcgagcagtgacgaggagagaatttaattcgcgaaatatttattgtatttgtttttgttatcacccattttgcaattatttttttcaaattgcctctttatactgaggtcgaaaaagngggttctagtcggttttacgcgtcccatgacactttacgcgtcccaacacattttacgcgtcccatgacattcgcgtcccataacaaaaaataaagggagaaaaattgaaatagaaaacttaaaaaaacaagctagaatcttctttttataatttttcttaatgatgtcaacagaaagttactagtataaaagaattttacaaaaaaaagcctaggtttaagccaaaagcttaggcgtagtctaagccattgttcgagttgcctgtgtatgagttgttattatactttatgtttaacaataaaattttagttaaaaaattactgaataccggacaaaaaaaaggtttcatcatagttattaggacggctaaaataccatagaccagggatagcacttaattccggtttccgaaaatttttgagcctcggaatgacatccctgccatggacacaaatgccatgggacgcgtaaagtgtcatgggacgcgtaaactgttgttgggacgcgtaaaatgccatgggacgcgtaaaaccgactagaacccaaatttttttattctttggtgactgtaaattttagtttaacaaaaaattcgtaaaattcaaatttttatttaacttttttgcaggtaatcgtaactgagtgggaggagttcggcaaaaaggttcggaaaaatacagaatggtcattaattattgcaaaatgattaagggcgagttggcggatgtgttgacatcgtttgaccacgaaattgaccaggcatcggtgcaccgagggaagcaaatgtacgcaatatttgggacatttgctttttttgggcattacaaactttttcatccggcgatgtcgacaggcgccgcagcggaaatttttaccgaattaaaaaaaactgcaatccggggcccatcccatctagatggtcctaaatggttttgaaatttgtcattaagaattgataaactgaccggcgccctgtaccttggcgagctgatccgacgcattcttgcccagctggtgatggaccgtctgctgttcagcggcacactcgtggaggcgttggaccggccggacactttccccaccaaatacatctccgaaatacttgggtatgttggtacaaatgctgatttttgataatgtaaggttttacaaaacctattttcgcaattaaaatattttaaatttaattcgaaattcgaattttccatccatattaccgaagaggagagtttaaccaggacagggagtattaaatccgtaattaaagaggccttcttcaattaacaaaaatgagtaactcgcaattgcggtgtacaaaaatgtaataaacatttgtgtaatcacatctaacccaggagtaaatgacacccgaaaaatttgaccagaaaaattatgcaatttgatgtactagtaacagatttcgttctacagttgacatttttaaaactttcttcggtgccgtccgtttttgccggcaccgccggactcctttttttgaacatttcgttcatcaattaattgattgttgtcgctcttttcatttcagcgacaacagcggggtgttcaaaaattgtcgtcgcatttgtgacgagttggaggtgccaagccacgggagcaacgactacctgatcatgcgcgaggtgtgccacgtggtctcattacgttcagcagccattgttgccgcaggtatcagagagtcgaatttttccaaaaatttgatgaattactaggtaagttttttcaaaaatttatccaaaaatcgctgaaattttttcttttttttttttttgaaaattttcataatttaaatttttcgggggggggaggaaggaacgccgagggaggaggagtggaaagtgcacacttcatgtcccctatttgtttgccatttccagcaatcaccgccctcctgcgccatgtcggcaaaaggaaggtgaaggtgggcgtcggcggtgcactcatccaattccatcccacataccacgagctgttggagtcgcagctgcactcgttggccccgctcaacattgaggcacaaaaattttcattttttaaaacaaattgccaattttctgaaaatttgcaccgtttacagtgggaattggtgcccgccgacgagggcagcgtcaaaggtgccgcactgattgcagcagttgcggaaaagttgaaactttgacaccatatggtgtcacgtcacgtgttggaccgagcgtgtggatgggagtgatggtgacgctaattaggaggcatttatttggctgatggctggatggcacactcactcttcgattatggcacattttggtgccaaaattttcacacgaaaatcataccttttacattttgcatttgtttgtgtctgtttttggtggtgcataaccatgcttccttcatctgctgcttctgttgtttttcaattttctgccctcctccattcttttttgttgttgtccaattttttggtccattttttatttttttaaatcaatttatatgattcctccaaattttgttttgcgcttggcgatgcactgcctttttccttctccttttgtttctctgatcagaccgttgatctgcggcatcaaattgtacacgacgaaaatggtcatttgtttggtccatttttgcgagtggcctcctccacgttgtgttgttaactcctcctcattctccgcctcctcccaccatatatttaattataattatcacaatcgtttttttatcacactcttaacatgttttttgtggttgaccagcaaataaatttttaatctgcgcaactccttttttaacatccattttttcggtactccttaagaattgcggtaccggcgtatctttaacttttttctgagctaatcactcttacatatgagcacttcagagaattcgagcaaaaaattgaaaatattaaatgtaaatatttgtgatcaaggaactgaaaaggctcattgtcaggagcaaaagagtacaacttaattaaagctctgaaaattaatgaatttccaaattctgagctcatttgtcagaatgaccccctaattagcctttttttttgtcccagaaaagtgattttttttcgccgagatcgcaattctaaagggattacggattgccatgtttgatgttttgattttgcccaaatcaatcggtttgatcattatgcattttcttctgtttcgcttcatccacaactttttaagctgccaattgatggagattcctctgctgcctaccgctcaaataaaataaaatgattaactgactaaaagacatcgccgcccgtgggcgcatgaatttcgcattttcataaattttatttcattttagacccattttcgtgatctgatctgactatttcgtccattcatttattcattctttttttatcacgttttcccccattttaaagtaatggatattaaaaaaatgtttggacatttttgtaattgcttcatttttggtcttaaaatcagataattccctcctggccaaatatcgatcgggttgcaaagtcggattgatcagatcactccatcggtcgcattgcttaccccaccctacccgtctcacattgtttttcaatcttatttatgaaatatttgactccatgaagccccaaaatttctttcctctaaaattaatctgatacaaaaactgacaacgagcaatcggatcaccattgatcgacaagcaaaataagtgtctctgttgtgtgatgttgtcagcgaatccgccgcctcctcgtctgagctctgattcgctgatcagtagcgattagggctgctcggggttttcggatggtcgtttgttagagaatcgttgaaactctatttaatttttatggttcataatcgttttgctggaattttttcgcatttgaaagcataaaatttacttacaagggaaccacccgaaataagtcggaaaaatgtgttacataccattggatagagaaaggtcgacttctattgtgaatttttaatattacgggcacatagcaagaaataaaaaagttatgaggcctctttaaaaatttatttgatgacaaattctaacataattttttcttttaatttattaaattctctcccaaaaattgcacgaaaataaaagttggaagaaaagaaacaaaaaaaatgttaaaaaagcaaatgcaacttttggcagaattttcccaacaacaaaaaagaacaaaaatggccttcgccaacggctgaggaaagcaaaaaaaatgcaaattaataatagtaatttcagaagacagaaaaatcggtgaaatgcgaaggaaaatggggacaatgaaaatgagaaacttgggaaaaagaacataatggtgagaacggatgcaaaaacagaaaaagggagagaaatttaattgtccaaaattaatttatggtattagaaacaaaaaaaggttgtaattaagtattaaatttattgcaatggtaaaaaattaaggcctctaattgttattttcggctcaaatcagtctccgggagttctcgagggtgttggtattattgtgaatttgtattgcccagctccgaacctcggatccaaattagaacaaaaagtcgaattccttcccaattattcccaaagagctgcatgcctccattaaaacaaagtcaaattagggacccgattgccaaattttaattattcctatttgaaccacaattatgaaaaaaataaaaggatgattttatccaataaatattttgatttacaattaattatgattttctttcattgttcttatttggaaccagcagtatcaccaatttttaaataattgatcaaatattttatttaataaaataacaaaagaaataatcccatttaaatgcttacaattaggctcaaaatgtccgggccattagggccacaaccggcgttttatggaactccacaattctggcaccaaaaagtccggggtcctaagctgaaccggagactccgtttgcacttctgctcaatattctgaaaattattctattcaaatagaaatgtcatttatta

SEQ ID NO: 7724 - DNA, 3244 bp, Heterodera glycines
tatttacacgttttttacagcgcgattttttcaacaattttttgggaacttggaggagggtacagcggtgccgataggcgccgccgggaaatttttaaaaatttcagttcaatttattattagaaattgtacaaaacttactagtttttaaaaaaaaaaattaaaaaatttacgacttttcatcaaaaatttcggaagtcggaattccgaccccaaaaatgtcggaaaccggaagtctttccgtgccatacctggtgcctatcgacatctgcgagaaatttaatgaaatttaatgcgatttgttaacagattttgtctaaaattgaccaaatgacgcagtttttgactcaatttctacaggactattaagtaaaagcctatccggcggtgccgataggcgccgccgggaaaatttcacaaattttgaatgaaatttgcgatgaaaaatgagttaactttaattaaatttattatttaatttatttaaaaatatttggcattctgtcttagaaaaattttcaaaaaaatcaataaaatcccgcacaaaaaatcaaatttgcggatcccgctgcgggattggaactcaaaattctttgcgggacgggatcccgcgagattaatcccgcaaatcccgcattttccaaaaaatgcgggattgcggactgggatcccgcaaaatcccgcgcgggatcccgtcccgcgccggtctctaatagagaacacttagggctttcgaatgataccaaaagttagatttggttgataaagaaaaagttatagtccaaaaactgggctggcgccgaatgtcagccctaacttattttagaaaataatttaaagaatttcgaggttgctgatcatgcactgactgacatccatttttttgtttaaaaactacaaatactcggaaacaaaaatgaaagccatcgatcctgcaataaaaaaattatataaactataaaatattgtgagcctcgacattataagtgaatttttgtctttttcgtccttttatacacaatttgtcgattgaaattgcgcattttttaggaggtttttcattgtttaaaatggctatttaaaagcgatttttcaattccgggaacggtccaccggcagtccgctccgtggtcaacggcacgcccggcagcgtccagcggcagcgaaatgtctcgcccaaaatcggattgtacggcttcttggcgacgacacttttgcgagccgggaagaaggagttcagatagtacttcaggacggcaaggaatctgtaaaagaattagggtgattttgtccagcgaaaagaaaagaaaacaccttttttcgggtgtgttttcgtaagccgcgctgaccaattcgtctggatgggctgaaaaatgggaagtgctcttcaaaattccaaaattcattctgttcaccgaaaaagtcggcgtacatttccagaagagagcgcctttccagaacgagattacgtctacttacatttcctagtttcacagtcgctctcccgatgttacggacgccaacggaagaaaggccggcgacgtacgactcggtgtaaattagggatttttcgattttcattccagctgaatttattatttttttggcaggagtgtgttccggtgatgcagcaggaggacaataagagccgaaaactgtggcgtcatctcactgccgcactgtacactaacaacacacagctggcgactcaaagtgcgttttgaaaaaagggtcaaattgcatggatggagtaattaagattttcccccgcttagttaaacagcacttccaacaacgccagcgggaggaggagacggagcgcgaacgacgggaccgtccagcgtggagaccgcgccactttgtcagagatgggtccggggcgccgacagatgcgtggaaataccgcgatgcgcagggataacgaatcggatgggccccaacagagctgaagaatgggcgagaggaaacgtcaaattagggcaaagatgtcagaagaaactcatttacttgtccgaaattgtctatattatgtattaatctgtatattatgtactaatatgtgtgtagatatgtacttgacggcccggagccaacaactcacaaaaccacttttataagatttaagtgcaaattgctaagtatttttacttcaattttaaagcatttttaataatttttgattccgctgaaaagcttaatcctggtagcatcccctcctgttgcaaatacgaatgaagtttaccgtccatttattgcgaaggattttctgtatttggacaaaatcgtataaaaataaaaaataagcaaaataaaaacaaataataaataattaattaaacgactttttcatattatctttgccgcctttctttcgtttgtttcaatgggaattcgaagccattttcgtttttcattgtttgatgttcgaaaagtgtgctaaatttgaaagggttattaatttgtcgtcgtccgttcgtctgactttttttccagcggcgatggcgtcgcacttctccccaacaatgggtccccacttggcgttgccggtccgcaataactgtacgcgcgtccgtccctccatccgaaaatggcgccatcgacacggcaacgcttcggagtcgcttcgcccgacacggacgactgtttgcgaaggacggacggcgcacgcagcgaagtgcgaggcgaacagggcgaagcattgggctgcgaggaggggcgcccgttgtgcaattggcccacggtcgtggccacggattgaacttcgccaaagtccgtatcgattgacgcggccgaggaatgatgagagttgagggaatagaaaaagcgcagcgattggagtgcgccgcgtcgcacggatcgcttgagcattccgctggcgggcgaaggatggccaatggtgccgccaacagactgctgctgatggtgcgacatggtggaccgtttacgccgttcggagcacgctcttcaaaatatatttgttaggtacaagcgacatgcgcctccgtccccgcggacggaacagggggttagactcacttcagaaaataactcattacccgcaagacttttacaaccacttattgccaatctaattacttgcagatttaaagctatccattgcctgccggttttcggcacagcaaagcactaatagggtgatggattcacttcaaaaaataattccttacccataagttttttacgaccacttatcgacaatctgattacttgcagattaaagcca

SEQ ID NO: 7725 - DNA, 1990 bp, Heterodera glycines
cacccaattgcctgccgaattgcaataagtaagccaattgacaacaaaagcagcccacgcagcccaattgtgctgtcggccgtccacaatgcgaaccgcaaaaatggcacgcacttggaaaaccctcaaatcggcatggaaaactgctgaaaagggggagaggtatacggtaggctgacacatcaaaggacaaggcattacggtaatcggatgagagaaaagacagaagacagtagggcagccagcagatcaaatggaaaacggcgatccttctgaaacagcgaaactttgtttcactttccattcgcttctttccctttcccttctccccaatttctgtgccctttaaatgccaaaatgccattctttcattgccttatcgtcgtggtcatttcgcgcatataatgagggtaacgcggttccatctgcaccaacagaagcgggggagaagcattctttgccgaacggccacaaacgcactgctgggcagcgccggagacggaagtgggcgacgcgcagttgggctggcgggaacatttctcggggactgaattggctaccgctgaaaggaaaagggtggtgagaaattgtggcaaaacattttgaaggcttaccacgtgcttttcgctgccaaaacttccgcttgacatggaaaacaatgcgtgcgtaattcgactcgatgacgcccaattggacgaaaaagccaacggctaaaacagtacgggcgaccgtttggccgacggacgattcagtccaatgggcccctttcgctgcgttgttttctgcgtctctttgtgtgcagttcattccgtcgtcagttgtgccgacgaaattaacgcacagccaaataatggcaccgccgcaaaagagcagagaaagcagcgcaaacagcggagtcagctgaactgccacttttctgacctaaagggcaaagggcgcaaatgagcagcgaaagggaggcgaaaaagcggactttgttgttgaacggcttgcgaacggtgatgaaccgttcaatgctaatgcaggcgagacaagtcaacgagcacagtttgagcgattggtcgacggcgaacgcccaacgacacgtgttgggggagaagtgccggtcggagaacagcaaatgccaaactcggaagcacaacgaaccgttgacggacaggtccagcagcgaaagcagccaaatgtacttgctgaaagagggggaacagccgtgaacaccgtcagaccgacccatgccaaacagaccgcaatctgtccgacggactcaaacttttgccagaggcaaaagtcgcctttttgccggtgcggaaaagggaggcgatcacccacgcgttgccaagcagtccgatcagaaaagtgaacagataaatgagggctgaagcagcgaaaatcgtctgtagccaccaaagcattgtaagaaacactgaaacaatttgagagagaatgaaaaacagtttggaaagaacaattgaggggagaagcataactaactgagtagaacaaatggaggtgaattggctttaataaggcattcgggaatgaccttgagaggaggggaaggacccgggaatggttttaagtgcgggagcttcggggggggggagggaaggggaaagttgagaatgagtccgcccattctttgccagtccttggaaagcaaacattaatctgtgcgttttgcaacgtctaaagtactgtactcccggggagggtctttttctacgcggattttgtcattatccgttcttttccctccgggtttttcgcattttgtactaatctctgattcagcgccgcccaaagggattcattccgttgcattaaagcgaaggagcaaaatgagtcagtcatttcgccggcggagggaaggagaaacatttgatggaccaacggaaaatggtaagtggcaatccattgtaggaactgagggtggaagacgaacagagacgaagccaaattaatgttagcctaattaagtaagcaattaagg

SEQ ID NO: 7726 - DNA, 2780 bp, Heterodera glycines
  unsure (1)..(2780): unsure at all n locations
tataaaatttaaaaaaaatcccgcnccttttttttgcaaatctgctgctgtggcattttccgttgtaaataaacgcgggtttttctaaagtcattttattggtatttatttcgctcaattacaatctcattttttggaaacattcaaattcatttataatattttttgtatgtctttgtggcgttgtgccccttacatgggaagcatggccacagcgtccgtgtaatccagtccagctggcacaagcatttggtcgggtggtaattgtgcagttggctgtccacgccaaagctcaacgacacattgcccttgtaagcggcaaaacagcttaaaattgtgccattttagagtttttttttgggggggggggaggatgtgagtcagttttccgcccgaaacgcgaggtttttctcgtctcgaatcccgcaccactttttttttggtcgtcaatggtccgaattccggcccggccggcccgaactttttatggctgtcccgacccgagatttttctcgacccgattcatagctaatgtgagttatcaagatagatacatgtttcatatgatatcccacttgttcgagagtatccccgtgattaattccctcacagtcgagtcgcccccgcccccgaaaattcacaaaatcagaaaaaacaaagaatttttaataggtattttattttaaaaaatttcaaaaatttttggtcattccacggcctaactaactcgggatttcttagtgtgttcacggattactttttttttttttaaatttatgctgaccttccccgttttcgttctgccgaaaggcgtgacaattcgcaatagcattgtgctaaataaagattttttcaattgtattttttgattttcctccatttaccgtacacttgcaggtaccgtctctcgaaattttttgtctctcttgccttcttttgcaactgccttcttttccgacggacagctattatttttgttgttaatatttgaaataaaattcaaaaaaaaaaaatcctccccctcttccttgaaattttaaaatttcaaaaaatatctgtctctccccccttccccaaaaaacacctgttgaacttgcgattgccgctgcgacaccttcgcttcggccggtttcttcaagaatgttttggaatgcgttcatcttaattatgaaagagggtttattcacaagaacgacagacatatatacaaaaaaatctgataaatttttgaaaaatttctcaaaattcaacccctaaggggatggatgggtcatgaaatgacgcgttcctcgagagtaggctcgagaccgagatctcccaccaggaattccgagactcttcctaattcaaaaccaagtcgtcaagtagcgcattgattgccattcttaggctaattaccatacccgggcgcttttcatggggtgtgccaaaattgattaccgtagcctgtacagatgcgtctcggtcaatcaccgacgctttgtatggattcaaattgcacaccgtaacggaagggaatggcgcattttcaaatttgagcttaaatgtggtggggaaatttaattgggtttggcaccatcactcacatcgagatcaacggtttttgggtacccaaagaatttgatgatcagataaatcacttgaatgacgaggattaagaagcacacggcgaacacctttccaaaattataaaatggatgcccatttacaaattgatcacttttgaaattgacaagaaaattgggtattgattgatcagcctaaagcaaactgatcaaatgtttttctgattgctgttcattaatttgctttattttcattatcgagtttaccgggcagtgtggtttgtgcatgttaaattttcggcacccactgatcagataaaagcattatttctattatgtgctaatcagccacttctctcgctaccatagatcagttaatccatcaacatcttttgtctcactctcgttagctcttgaactaattaatgggttttataccccataacctattttctttcccaattgttgcgcctgatcaatcaattactaacgccttttgaattggttatgaatttgatctcgcgattatgattaatcagctctgatgttctttttgtttgttgtgttgtattgctttcgctaagtcattaccgctaaccaaaagcgcctccatcgtttgtttggcgccagcgatgcgtggcaaatgccgtggatggtcgaatgccgttcgaacttttccatgatctgcttcaccgagtccatgtgcatcctgtcacctgtgagtagtgatgattgatcattcattcagcggcttttcattaaaacaaaagcagccatttatttcatttcctctactgatcgaaagacaaataattcttgcttttcacattgattagctgtcatcaacatcaaagcattgtgtttttgtcattttttttttgatttttttttgacatttttactcgctcttttgaacggaaagtcggcacgcgagagacgtcggaatgcactcattgcgtgtggaccacctttctgaaacatggggggggggaatttaaaaaatatattaaaaactattctcggcaaattgtcaattctggggggtggcacatttttgtcaacattttcacccattaattaaccctaatcaacctaattatgctagaaattaacaattaccgacaagaatgacttaatctgcagagtgtggcatttttgccacaatcctaaattgctctaacgtgaagcccattatcctattgtattttaatgagt

SEQ ID NO: 7727 - DNA, 2031 bp, Heterodera glycines
cctgtcattaattagtctgatcagcaacaattgatccgttcattgatcagagcatcacttaattaagctttctgactgattgaccaccttgaacagcccgtccgggtgggaatgttcctccgcatttgccagcaacaccgccctgcgcagttccggccgcttgctgaccactgccgaccttgcagttcccctgctcccgctggattgcttggacaccttgcggtccggtgccgccgacgccgaatctcggcttgtcgttcgctgcgttggcggcggcctcggcctgccgcccgccacggctgctgctgttgaactgcttgaagacgattttggccctggtggtaccgccgccgctgctgttgagcttgtcgtcgacatctttggtagtagtgccggatttgccgaggttttcctgctattgccgttctcggcgccggcggcggcttttccccccggtgctgcccgcccagctgttggcggaggaggcgtcccctgttgcggcggctggtggtgttgttgttgttgttgttggccattgcttaaccatgttgaggacggtggatgacgatgttgtgatgcttgttgttgcggttttgccgtcgtcggcttcgttagcatcgcttggctagggtctaaaaaaatttaaaaattttagattatatattttttgtctcatatgctatataaaaaagtgtcatgactgaaaagatgaagtcgctctgcttgtaaaaagcagtctatccctacggggattgttggtgatgatgatgattgtgatgaaaaatgaaacctctcccccctcctttggatggatattttgcttgaggctgatcagtcaagaatgagactgactggaaaatggatgggaagcgtatgatcatcacttgttccccccatttttagggtttaaactaaatttgaaaatccaaaaaaaaaattcgcttttctcggcatttatttattaataagaggtaaaagccaaaaaaaatgatgacagctttttgttctcataaatgattgatgatgatgacgacgacggggaggaactactgatcagaaaaaacgaaacgagtgaattccccagtattttttctcatttccgatcatttaaaattttaaaaaaaaatttacgcggaattttaaattctgcgatttttttttgatgaaataacaaatggaaaaaatagcagccaagtgcacaaatgcttcttgggtgaaatatgataagcaatttgatacttatcggagacagaagagagagagtccatgcaaactgctgaaagaagagagaaatatgtgaacaaatcgtccaccgtaacaggggtgtgacttgtctcagaaaagacgagagcgagagtttggcgagaggcgagagtccccaaaaagacgagagcgagagtttggcgagaggcgagagtccccaaaaagacgagagcgagagtttggcgagaggcgagaggacgagaggcgagagtttttcaatttttttctgtagccttattttttaatttaaaaaacttcaaaatcgtatattaaattagggttacgggcctgggtatttgggcaaataccgggtcagggtattgggctctaggaaaatccgacaccggaaaatccgacactggaaaatccgacacaagcagaaaatccgacaccgctggaaaatccgacactagcggaaattccgacacttgaatttcgaaactaatttactaattttaaaaagcatttttgattgtttgagttagaattaaaatacatataatataagttacaatacttaattatttaaaataaatatttttattgttataaaatctatctaaagtatgcatatgatattcatgtttatttgtatgcccttttttgaccatctcaaaaaatttataaacaatcccgcaaatggaatcatggtaaagggcataaagcgtaagcaagtgtacgtggaacaagacatgaaagtcacagagatttttttgactcgcaacaataaacaactggagcattatttgcgagcaatatcccatcgaa

SEQ ID NO: 7728 - DNA, 1120 bp, Heterodera glycines
  unsure (1)..(1120): unsure at all n locations
tcgggaatagcttccctatagtctgtactttaattctgcgttggatttttgctcccccataaatgtttgagtacctcaaacggacacttgaaaaaatcgatttttttgttttcggggcagtccccccgagcgcgatgcgcccagatttatggggagaccgaatccttccggaatagcttccctatagcctgtactataattctgcgttggatttttgctccccataactgtttgagtaccccaaacggacacttgaaaaaatcgatttatttttgttttcggggcagtccccccgaaccgatgcccccagatntatcgccgccgatttggcccgccggaaaaattctaaaattttgagtgtaatatattaacagaacttgtcaaaaaatgatcaaagttttggttaaatttgcagttttaggctgtttaaaaaaagaaaaaataataatttttaaattgaaatattttttattaattaaaatttcaattgaaaataatttaaagaaattattaaaaaaattctgtaccgttggggaattgaacccaagagaaaaataatgaaaggcagaaggtttagccagcagaccatatttgaattggagctatccaaaaatagagaaaacattaaggaaggaaagaaagagatttaagatttttttttcgcgtaaatttgaaaatttttctggctgctcaaaagttcaatctttaggggtgtattttcaactctcgcctctcgtcccaaaaaacgagaggcgagagacgagaggcgagagtaccaaaaatggcgagagttggcgagaggcgagagacgagaggcgagagttgtcccacccctgcaccgtaaggacggggatttgggagggatcccggctcaaaagctggcacaaaatctcgaccattcacaaaagctatggatgccttgggtggggataattccagggaggggggtacgtattcaagaccacctccatattcgcaaaatttttaagggaaaaatagtattttgtgataaaatttttgatttttcttattggtatcccccccccccctagacctccctcacccaaagttccaaaaaaatttcgctaaattcccaaaaatccgaaaaattaccaatttt

SEQ ID NO: 7729 - DNA, 3405 bp, Heterodera glycines
  unsure (1)..(3405): unsure at all n locations
ttgagtagcttagagtacaaaaaattcgaaaattattgaaatcatgtttcccactcccttctcccaggggtattattttgtaaaaagtctttatttccccaataaacttttcatacccaatttttagcaccgtgaatgttatttttattgaattctgaaccggtttgagtagattagagtacaaaaaatttaaaatttcgaaatcatgtttcccactccctatctcccaggaggtattatttgtgtaaaaagtctttttttccccaataaacttttcataccccatttttcgcaccgtgaatgttatttttattgaattctgaaccggtttgagtagattagagtacaaaaaatttaaaatttcgaaaccatgtttcccactcccttctcccaggggtattattttgtaaaaagtcttttttttcccaataaacttttcataccccatttttcgcaccgtgaatgttatttttattgaattctaaaccgttttgagtagattagagtacaaaaaattgaaaatttcgaaatcatgtttcccactccctactcccaggggtattattttgtaaaaagtcttttttttcccaataaacttttcataccccatttttcgcaccgtgaatgttattttgattgaattctgaaccggtttgagtagattagagtacaaaaaatttaaaatttcgaaatcatgtttcccaatcttctaaacatctagggctttcgaatgataccatgattgtgaagtttggccaacaaagaaaaaagttatagctttttgaacattgctgagacggagttggccagacggagttgacccctaccgtactcaactcaacaccttttcaatcaatagaaattttatttttaaataaatattaaaattttttttaaataaaaaaaaaaatttttttttcaagacttccttgtcatttcccgcaatacaatcggaagcccagcagatgcccaactccgtcgctgctactccttgcgcccccaacccgttcaacaacaatcacttcccacaatcagatgcagaaaagtacaacaacaaacagtgttgaagtgcttcagaaaaatgagcgatgacaaaattttgctgtggttttgatggtcgacaaaaattccgaatgcttttttattttttaatttatttatttgatcggaataaaaacaaggtattgcaggaaaaataattttttttaatttaccagctaaataaagaataataatttgggctactccaaatgcttctttatattgaaaaaaattacacaaattgattgacaaaacgtcaagtacaatgaattgcgttaataattttcaaaaaatttcgacatcacccaattgcgatggtcttttcaatatttattactacaaaattttttcaattcctctcaacatacttaaaaatttatttgtaggagataaattatttattttaatttttatcaattaactgtgaaagtgatagaaaccctcatggattttaggatgaccgaaaaataatttttgaccaaaacaaaaatcatttgtgctttttcatgaaacagaaagaaatgcttaatcgttatattagaaacaaaatgaaaaagtgtaaaaaattttattcataattttgctaaaaaaactaaattcttaattcataatattatgacacggatacaacaacgaccggcggtttatgattatttgagcacagcaaaaatttgacacaaggaaattcatttttcattatttcatgatatttggagctaaataaatatatttatttttttagtttatttattttttttcattctttacctgaaaaacttgtgcaaaatcccgtaaaatgaattgtatttcacgtttttagtgaacatgtgcacgtaaaagtgcccaaaaatgaattgtaatttgtatttcacgttttcttgtgtacaagtgcacgtaaaggttaaatcgttttagacccacaaaattgtaatttcacgtttttagtgtacaaaaacacagaaaattacctaatcgcgacttcacgttttattgtgtaaaaaccaaaaaatgaattgtatttcacgtttttagtgtacatgtgcacttaaaagtgaaatgttcccaaaaatgaattgtaatttgtatttcacgttttcttgtgtagatgcacgtaaaagttaaatcgttttagacccacaaaattgtaatttcacgtttttagtgtacaaaaacacagaaaattacctaatcgcgacttcacgttttattgtgtaaaaaccaaaaaatgaattgtatttcacgtttttagtgtacatgtgcacttaaaagtgaaatgttcccaaaaatgaattgtaatttgtatttcacgttttcttgtgtagatgcacgtaaaagttaaatcgttttagacccacaaaattgtaatttcacgtttttagtgtacaaaaacacagaaaattacctaatcgcgacttcacgttttattgtgtaaaaaccaaaaaatgaattgtatttcacgtttttagtgtacatgtgcacttaaaagtgaaatgttcccaaaaatgaattgtaatttgtatttcacgttttcttgtgtagatgcacgtaaaagttaaatcgtgcgactgtcgcccggttggtcttccggcatgcaattaaatgccttaataatttttttcgcaaatgactttaataatatattttcgttttccgaatggcgcgtcctttcattggctttgcttttgatgccttcaaacggcgtttgggtgcccatgacttcccatttctccgtggtttcatccatggattcaattagtggggcttgcttaatttactgaattattccaaaatttatttaaatttttaattattttaaatgaatttaacacaatataatttcataatttttgttttcaagttatgatgcccaaagggtcaaagaaattggtgccgaaagggccgcggccgaatgggtcgtccgttgtgaggggaaagtgaagtgggaaatgccaaaatggccaattcaatgtttataaatattttgctttctcagatttgaccattccccccacattttctaaattgtcttaagttcgggctggagctgtcgccatttcgatgggctcagtcgcctccaaaatgttcaatttgtgcgctgcaaatcgctgacagttggcacttttgcgtttgactaagccaaaaatgccccaaaggacaatggcctccaaatgctcgccgattcgtccatctccgacactttgctaacacttcacatcgaaaagtgtccgaaagtgaccaattcaggcatcagacatttgcgcaaattgaagttgaatgggcaaatgttcctctanaaacatttgctcctcttttagagtgctgaattcgctgactttgcaaatttgaaaaatgtttggaagccgg

SEQ ID NO: 7730 - DNA, 2236 bp, Heterodera glycines
  unsure (1)..(2236): unsure at all n locations
ccccccccccggggcttgccctttcactctcttcccttttccccngcccctcccctttgtgtaattcttttttattgtgttcgctccttcccccttcaggcgccaatgattgttctcgtcgtccccctctctcttcgccccttcggcgcggattgctgttgagcctggccctttcccatctttcaccccttggccattctttccgcaacattcccccaaagaatgccttctgccaaatgggtgtgccatccgtcgcttttctgttcacttttttgctgtcgatgattctgtctttggtgctaggccatgaagcgagcggagacgccaaaagcagaagaactgtttccggcactggcgctgcaatttcgccggagggtgccgagggcaaagaatgccccgcggggtgcacttgcgcggagctttcggtaattggcagcgatcttcttcctcggactttacccaaacatttgctgcagttggaatgcgccggtttcgacttagaaaccgtccccaacgagtggccctcccatttcgagcgggtcgttttgcgcaattggacaatgtccaccatcgacaaaaacgcattccgtcgcttccaatatttgcgcgaattgcacattttggactgtccacggctggatctgatcgaacggcacgcgttcaaacagttgaggaaattgaggtgagaagttgaggctggtcaaatgcagaataaatttcgaaagaatattccaacaatgtcaaaatgtggcactttgaaattttaaattatggaaattaaaaaaaacatggctctgaggggggggggggggaaggggaagtgtcggtttgtcacgggagaagggggaggaaaggcgttggaaaatgtttgtcggtcatacggcgacccattggccgggaaatgccattcttttgcttctttcaaaggctgcttgtgatccggggcaacaaaagtcttcgcgagctgcacaaagcctccttctcagccatcggaaatgagcagtcgctttccattcaaattgcggacaatgccatcgaacggattcgctcctttgctttcaagtgccattcctcttttatgtacaatttcgacataaatttgtatcataaatgctcaaaatctgcgcgaactgtcaattgaagagcgctgcttcgaattggaaggctgtgccctcggggctatttcgcgtttggactttgtcactttgcacggggtaaggcacggctttttcctttcccttcaatttgatttggtgccctgcttaatcaattattgttaagcttcttccatttgattttcctccttccccccttttcggtgtgttctttggaaccgttcgccttccaaaacagcacattgatccatcagctgaacatcgccgcctcttcgctgaacaaattgccacggaatggctttgctgaactcagttacatcagtcaggtgccgtacagcagaagtgtcactcgcagcaattatcacactcataatcagagtgatcagtctctattctctcaataatcatcattcttttgtctatctcatttgtcaatgccaatcagtctcagcactggtcagaatactcgctgatcagtcacttattcaattcgctgatcggattaaaggtcgtccatcccatttcaaacagaagcgtggcgtgtcaaatttcgtttcttcacccttttgccttttttttaaattccttcgatttttcctactcgaatttcactttttattacacaacaaagttgaaatatcaactttaaactgtccttttggcctttatccgattgctttccgttggcggggggacaaatgcctaaaatagggaatgccaattttgtttaattctgtccgaaatttcattttgcatttgcctttcagcttcaaattcgcgagtgccggattggccgcattgacgagggtgccctcgggggactgttcacggtcggctctgtccaacttcagtccaaccaaattgtgcgactgtcgcccggttggtcttccggcatggacaatgttggcaaattggtgttcacttacaacaccgtgcgtgagccgatggtgtcgccagaatgccttcggcacgacggcgcacagcgattcgaatttgcggacaatacgctgcactgctcatgcgcactccaatggatgatcaacgcaccggaggaggagcaggtgaatcggacggcaggagacggccaaaaatacaaattaattgccaattttggattattt

SEQ ID NO: 7731 - DNA, 2238 bp, Heterodera glycines
aaaagcgcgtccagaaatgagaaaaatgaaaagggaaaagcaaaagcgcgtggtcagtaattgtaaaaggaaaaagtgattagaaaattacttaagtgatcaatcgatcagaggtgaaaatgctgcggtaaacgattgattgccttacgccaatttgtacgcttcggttggtcaaaagtcctgcaaattgcctaattaaattaggcgtcggttgcgcactccttcccaattctgcccaagtttttgcactttcatcaaattcccaaatgttagtaaaatttcctcaaaatgcacttctttccatttttgctgctgttttgaccctctcccaaaatgctcctccaccgatcggtccctttttgattgactcacgcgaaaaggcccaaatgattggtctccaaatcgaaaaggcaaatggcaaaatctgcggggacaaaaaagtaaaaaatggttataaaatccggaaaattggcacaaagggaggggagagattccatttggcaaaagtggaggaaatgagcgacttaatcgaaccggacaaagtgagggcattttggccgcaattggaagtgatcggaatcgacaaggcattggtgtgtgacagaaagacgaggtgatcgaaggagggagggcactgatcaaaccaaagaaaaataaatgaacaattaatcggagatttggataatttagcgatttctccatggaaattccccttcttctgctggaggaaggcgtcggagttgaaaagggggaaaaagcaaaaacaaatttggcaaaccgaacaaatttaatggaaggaggtaaatgcggcaaaatgccagaagggaaggatttaagaatttcaatgcattaatttcatttgcattgctttcgtatgaaaatggcaagtatcttaggacatttctccggagggcagcgacaggcgaataaatcggccgaatcgcccaaaagcgcgccgattggcattgacattgaaacgctgagtgatgaggggaaacactcgttgagcagaatggtgtcgccggagggcgagaaggaattggatgggatgttggcacggatggaggcgatggcacaacggggaggcggtagggaaatagcgcatgaccagcagagagggggaggggcagcagagagatttgctaggaggggctaaaatccaagcagtccatgtgtttctgttggcctcagtgaagccgcttccgtcttccgtgttggagccaatcctcgaccgaggcaactacgacccgcgcagtgcgcccgcctttgtggaggggcgtccggtggaagtgcgcgttggcatccacgtgcaatcgattgccaactttcagctggccacaatggttgcctttttgtgtctttcccacttcaatccctcccccccggcttcaggattacgacatggacatgtggtaagtaagcatcaatcacttcaaaatgccattgatccttctgaggttgcgcatgagttggcgcgacccgcggttagcgcaaaatctgagcacgcccgttctaatcaatgacgagcttttccttcggtttgtccccacttttggtggcccttttttgcatttcgtcacatttccaagtcgaatttggcgtccggatgccttttttgtgaatgcccgtgacgcgcttttccatcgcgtgacgcgtttaaacttttacgcgtttgtttttccgactggcggcgaagtgttcatggaggcgcggctgtacttgaagccgaagagccaattggttctctgcaaatacccacacgacagtcagacactgcgactgcgcatcagttcaagtgggagggcgaagcaggggaaggcctactgattagagcaatggctgatcagcaggccattcgattgatagccaatcattgggcattttcatggtcggaaaatcatatttagtccttaattacctcaagttgcttccacctacggttcggtgcgctttcgttggttttccgccccttccaatgccatccgggtccatggacagctccaactgcccgacctgtacatcgacgggttgcaaagcggagagtgccgcagtgcgagaaaaaccggtgaaaagggagcggagaagcaaatggacaagcgaaactcattttgttgctgattaaggcaacttttcttgcttggaagcgcgttttttgatgaaaaggagcatcggataccatctttggcagacttatgtgccgacagcacgtgaatgagggggggggggggggggaaaaaa

SEQ ID NO: 7732 - DNA, 2076 bp, Heterodera glycines
  unsure (1)..(2076): unsure at all n locations
ggggggggggggggaccgtaagggaagaaacaaaaggtatcaaatttgtttttgttcagagattgtcaaagacaaggacgggatcagtagaatcactgatagctactgcttttctttctccgttaattgcctctccccactctctttctgtctaattaccgttaattgcctctccccactctctttctgtctaattaccgttaattgcctcctcataccacggttaatccccgcttcctccctccctcctccataggcgttttgttctcttggatcagcgtttggctgcccgaagagttcgtcgaggggcgcgtgttcgtcgctctgaccgtctttttgacattgagcgctgagagcagctcggccaaagagacacttcccaaagtgtcctatgtgaaggccatcgacgtttggtttggcttcaccgccgtttttgtctttgtaagcgatgcgaaaaaagtgagcgaaatcatttcgagagagcaaaccaaacaaatcttctaaggacgggccgaaattcttaacaaaggtccctgcgcaattcggcacattttacagtcattttggccaccatttgaggaaaaaattaatcgttttacgattttactgcaaaatttcgtcgccgctaaaagccaattaatttgtaagcaaacgactctcatttcttcagttcacaatgctccaagcactgctcgtcatcggtttggaacacatgagcggtcgcgcggtgacaaaacaatgaaattcaaacgaaaaaaggttttaaaacagcgaaagactgtggtggaacaagcgggcgaactaagcgcgccgaaagcgatcattttgatgatggactgtcgccgttaccatcggatggcaaggagtttggacgactttttcaaggtgtatcagcaacaaacgatgtgcaacaatgaatgaaaaatgttgaataaggtgatgtacccggtgatattcgtcgtctttctcatcatttacattttcgtggtgatcgaaggagaagaacagaagtgtcttcagcaggaggaaaaggccaatggaaggcaatgagtgatggaaaaacatcggacggacaaaagaaatagtcgagagttaattagggacattctcgggaattggacaattgagaatggttcttttcctttacagtatccctttgtcttattgtatgtgctcttgtcaagtcattctcaacctttgcttatcgaattcccttttcaaaattgtaccgtttttttttctcaagcaaaagactttttttcaattatcatttgaatttgttatgcctttttattttgcccgtccttcgaatcgatttccgagggtcgaattgttcgattgtttgtcctaaagattttcggtcggtcttcgacaaatgtctaacaacaaatgaagcgatgaatatccagcggaaaaacggcaccatacctttgatttttacctaacaatttgagcgaatttactcaactgaaaaagggaaaaaatgaaaacaatgggagatcaccaacaacagagtaaagtgcggaaatggacaaatgaatgaattgaagaaaaaaaacgaatttaagaaaatatttccgttttcgctaccaaacacaaaaatttaatataggtatttgtataggctacccgacttttggggatccgacacttagggaacccgacttttggggatccgacacttagggaacccgacttttggggatttgcaacttggggacccgacttttggggatccgacacttagggaacccgacatttggggatccgacacttagggaacccgacttttggggatccgacacttagggaacccgacttttggggatttgcaacttggggacccgacttttggggatccgacacttagggaacccgacatttggggatcccgacatttggggacccgacttttggggacccgacgtttagggacccgacaattggggatcccgacatttggggacccgacttttggggatttgaaacttggggacccgacttttggggatccgacacttagggaacccgacatttgnggatcccgacatttggggacccgacttttgnggaccc

SEQ ID NO: 7733 - DNA, 1171 bp, Heterodera glycines
ccccctccccctccctctcttccgtcgtcccattcaattcgaatccttcggttggttatttttcacgtttctcgacaaatcgctgagctggagaatcaattgatggccaattttcaggggacatatttttgctaaatggccataaattgataattcagtgaatgaatgatggctgagtgaatgttcttcgcctgtttcctgaattggctatcgattttgtcctttttctgccatttgcttcttttgcggccacaaatcgcttttggtccgatcactctgtcccatcgattcgttttctcccccgagggaatatgcgtgggttttgagcttcgccccccgggcatttcatgcgatggaatccccgacaaatgttcgctccctcccattcggcctttgtccttctctttcccatttcctttgccatcccttcgattgttttggctttcccttttttgccaaattcgttcaaaaaatgcctttggtctttcccccccggcgtcgtttaataacattcattctttaaaatacgcataaaaatatatcattagtaggtcattccgaagaaggttaatccaccgtcggcagctgaagtgaaaaatggcggacgaagcgtcggaatacactgacgaagaatacacatacgaatacgaggcaaaatgggggggggaaatagggggacatggaaaagggactgttaattgatgttaattgagacaaatggaaagacaaatagagagtgacagacatgagtcaacacagatagagaaacaccgacacagccaaatgaccactcacacattaattaattattaattaaggatgaggaagaaccggaagccaacgagaacgctgctcccgcgccagttgaagagctcgtaagtcgagaaagaatgccaaaatgggcaattttaaattttggaaattgcagccaaaggacgaaccgaaaaaagcgggcgaagacgcagcagcgaagaaaaaggaaacatcaccaccaaagtcgctgaagaaggaggggtcgccgccaaagtcgcctaagaaagaggcgagtccgaagaaagaggcgagtccggacaaatcgccggtgggcaagcgaaaggcgagcgaattgggaaaacgaggcgagaagggaaataagtggcaaaattcagggacgaacgccacgccaatcgat

SEQ ID NO: 7734 - DNA, 971 bp, Heterodera glycines
cagtcgaccgaactgagacaaagagtccggagccggggtaccaaccgatgaccaagtcggtacagaagaaaatggcactttacgcaggtggaaagccgagcaaacacgacaaagcgtaagttggatgaggaggaagggatgtcgaaatgctccgaatcgatgcttaagcaagctaatgaagtccgagggcatcatccccatccaggccggcaccaacaaatacgcctcccaacgcggaatgaccggcttcggacggccacgtgacgtggtggacaaagtgaaaagtgagaatttggcagaaatcacagacgaagagaagttggcatcgctgaagggcaggtcggttgacagtttggccaaatgcgcttttttaaaaacattctccgtccttttcagtacttggcttcagtccggcaccaacaagttcgcctcccaaaagggaatgaccggtacggcaccacgccaattcacacatttaaacaacagttgatcgaataaaagataatggcactttaaggaattggaacaccgcgggacgttaattaccgcacgaaagggacgggaggggcgggcgaagtgccggaggacaaagcacgcttaacggacggtgacatggggaagggaggaaatggaaaggaacggaagccatttaaagggattgtgccgcttcagtcgggcaccaacaaattggcgtcgcaggccggcatgacggggatgggaatgccacggatcatcgacggttagagagatcggcgagggggaggggagggggggatttcaaattggcaccatgagaaaagtgccagtaatggttgcttaaaaaagtgtttacagtgcgaaagacggtggaccaggacagggaaagtcagggcttcattcacctccaaatgggcaccaatcgattcgccagtcagcagggaatgaccagaaagaggaaagcattgggaggaccaattgcgggagacacaacg

SEQ ID NO: 7735 - DNA, 1785 bp, Heterodera glycines
ttttgaaatgctcagaaggtgtggaagcgaatttatgaatcaccgcaaaaacgcaagaagccacgtttccgtaaagatgaatttgtacgcatgagcagagagaagggacagttcgagaaggggtatttgccaaactatggagacgaaatcttggaaattgacgaggtgctgaaggcggtgcgccccgtcagatacaagctccgggatgatcgtggtgaaaaattccggggcaccttttatgagcaggagttggcccgcgtgagaaaagatgccggcaccagttacagaattgaaaaagtgtacaggaagagacgaaaacaggatggatcaacagagatgctcgtaaagttcattgggtatcccgaacgagaatggattgacgagtctcagattgtataaaagcgctcatttatttttattttgttcataagttttaataaattcataatgtcaaatagtttcttcgtgtttttgccgagtaatgtgacggattatccggacaatcaaccaaacaagttccgggtcaggcttccaaaacctttgcatttcaacgggtcttgggtgtgtgggctgcacagtattagctacccatactcatggtcaacaattggtacattggatgagcagtggatagacatccacttcacggatattggggttcctgaagaagacaaacaccgcatcgtacgcgtgccggtaccgagatcgtcacacaatcgggttgaacagctgagagactttttgacgacaacgctgagaaaccatgccaatgctaaactaaagccgcttcctcgagaggaagaggcggaccgtaataggacaaaaccactatattctccaccgcctgctaaaagaagtataaaagatgtgaatgatttgtctttgtttccttcacccccgagagttgatgagccggaaaagccgcctaagtctcctccagcacatgtaccacctactgaaccggtaactcctcctccggcatcacccccgagagttgatgagccggaaaagccgcctaagtctcctccagcacatgtaccacctactgaaccggtaactcctcctccggcatcacccccgagagttgatgagcctgaagagttgcctctgccccttccagcacatgtaccacccactaaaccgataactgctcctccggatcataaactagaatcaccacctccaactgtaaaaccttcatcttccccacctgatacaacgctcccttcttcaactccagttgcaactcaacctccggcacccataccacagccaactcctcccaaaccttctgctcctccccctgcttcaacacctcccaaaccttcagctcctcctcctactccgacggctcccaaaccttcagctcctccccctgctgcaacacctcctaaaccagcatctcctcctccccctgttccgacacctcctaaaccagcatctcctcctccccctgtttcaacacctaaaacagcatctcctcaaaaacctcctaaaacgaagctagctcctcctccacctccagcacaaacacagccatctcctgtcaagaccacacccgcatctaaaatattgacggctaaaactattcctagaccccctcctcctaagcaaaaaacgtcgcctccagaaattcctacacgaccatcaatttctccaacactcgagtctccgcctcggattgatgagtcgaatagaacaatagtaaagccgtcagtaaaagaaacaactccaccacgctttgccaagacatttgatactaccgcaaaagaaggaagccgaccg

SEQ ID NO: 7736 - DNA, 3680 bp, Heterodera glycines
cttctcctcctcctccggctaaacggcttctcctcctcctccggctaaaacggcttctcctcctgccactactactaccactactaccaagccaaaaacaccgcctccgctggtcaaacatagtcctcctccaacagctgcaaaacagccttctcccgtaaagactacgcccgcgtctaagctaaagcccgcgaaaacggttccaaaaccaccgccacctcctcctaaacaaaaaacaccaccaaaaccttcaccgatacttgagtcaccgcctcggtatgaagaatcgaacagaacaattgtaaaaccactcgtcatacaaccatctccacctcgtcttgaagaagcgaacaaaacaattaccaaacaaatgacatttgatactaccgcaaaagaagtgatgccgacagagcctgttgcagctgctttaacacaactagcagatttaccagaaaacaccttcagctttcgaatcaatccgctcccagttgtgccccgctcagtatctattcaataccttgatgatgttgaacgttttaaagtctcattcaatgatcggttgatacgccatttgtcgttctcaccgcagttgggctatgtgctcgggtttgaaaacccgcagcatgtgatgtcgaatgaagtggcaaaatatccggtggatttgcgaggcggaatctcgagttttgccgtttactcaaaaggactaactgagaatatgattgttggaaattcgctgagttcactgctccgtgttgtgtcagtcagcggtgcaacacccggtgactacaatgagaaaatttacgattcgcccatttttgcgcgagtgctgcccagggagatcaacgaaattgagattgagctgcgcacaatggacaaaggcaggctggtcccattcgcctacggcacgacgctggtcgtgttattatttaagaaagtgataaatttctgaaaccactcattttttgtattcattcattcattgaacgtaaaaaataaaatggttcatattgtgtttgaccctcgcagtgccgggtacgacgagtatgtgcaatacggtagcggaatagaacacgaacatcacttcattgggtccagtccctttcaacgagggtatgggcagcggggagcaggggttggagacgtgtttcgcggtctttggcgctttttcctcccaattctccgccgcgttggcaccacagtagggtcggaggcgctgagcacgggtcaacgagtgttggagcgagtcgggaacgacggaatgccacttaaggaggcactggtaagcgaaggaaagaaaggaattgataccgtactggagaagggaggtctaccaaagcagtttggtagtggtggaagaacgggtataaaaagaaggagaaaacacacaccaagtcaccatacaataattggccgaacaatcagtaaaccagcaagaaaacgtgttcgatccgacgcatttggactttactaaatggctttccacaaaattgacaatgacagtgtgaactccatcaccaatgccttggactttttccgcatcccaccaactaacgtcagcgtctcatcctccaaagtgtttgaactgctcccaagtaaccctctgacggacaccccctatcacttcaagcttcactccagtcaaaattatattgatctctccaaatgctatttgttatccgagtttcgaattcgcaaagaaaatgcaaatggtcaactggttgaccttgcagctgatgaggttgctccgattcaactgattggacacacattcatccgtaacatcaaaatgagcatcaatggccgtgaagtgttcaacgcaaattctctgatggcctacaaatcgtatttttcacacgaactctcctattcaacagcggccaaggactcgcatttgaatgctgccggttactaccgtgacactggtggtgtgcttgaggtgggagacggatgcactgcacgacgcaacctgtttgtaggcagcagaacagcacaattcatggccaaaattgacgccgatttgtttaaccagcctctctacttgatcaacttttgtgagttggacattgaaattttgcccaacgacaacgactttgtcctaatcacaccacccggtgttgctgcagccactcgctaccatttcgaagttgtcggtctgaaaatgtatgtgaagaaggtgtccctgatggacggattggcgttggacattgcacgaaaacttgagttgaaaccggcacgatatgcagtgaggaaaacgctgatgaagtcgctgttcatcagtcatgggcgttttgaatttacgtctaatttgttcatggatcaaattccccggcgtatcacaatgggattggtggccaatgctgactatgttggcaccgtttcacgcagccccttcaactttcagccatttaatgtgcgtgaaatttccataattgccaatgggcgctcctaccctcaagcagcctacgacttggactacccaaacggaaagtatgtgcgccccttcaacgacatgaacgaagcggtgggattcgccaactcatcggaaagcaacgggattacactagcacaattcggcactacgcattgcatttacgtgttcaacttgacgagcagtggagacgaccaagcggcgctttttgatctgataaggaacgggaccacagcagtgagcatcaaatttaatcaggcggtgcccgctggaggaataatgttggtggtgatgggcgagtgcgactcgctggtgatgttggataagaatcgatcgatcagcactgacatcactatttaaggcacacttattttcattttttccataacgataaacatgtattccaaaaaagttggcgtcattttattccttcttcggatttctcttcccgtagtgtcatgccgagaggaaattcctgagtattctgaatatataagaagaaaggcaatgcttacatccacaaccacaacaacgattccgtctacaacaagcacatcaacaaccaccacctcctctcccccaaaaagtgacaagttaattgaagagcaagtgtcagctggtctcacgccactcatccaattgtgcaaagaccgaccagaagaggggaatttattccaacaagtcgtttgctgggcggtgtttgcattgtatttgatgcttattgtcagcctggttctccatcaactttgctctattttttggctgaagaatggacagcgtgcaaatcacatcaatcttgaacgaaaaccgggggaccgcgcgagtctttcggggctgcttcgccagtgatcaattaccgcctccggtcactctacagtatcccgcagcgctaattgttaaccgggacccacattacaagggagggtctcattggtgcgccatatatgcgaagggaatggaagaaccagtgatttattatgacagtctagcccaaaaaattccatctgtcattgtgtcatcattcctgaataagtttccgatgggcctaagaaaaaatattcgttcctatcaatcccaattagtgtcaacttgtgccccacactgtatagtttttgtgtatcatatgtcacaaggtcattcatttgaaaattttattgagaaattggaaaaatcgacaaattctgatctgtatgtaataataatgatgaataaaatggtcaaataaatgcttacaaaacgctaaagaaaaaat

SEQ ID NO: 7737 - DNA, 2147 bp, Heterodera glycines
aaaaaaaagttatggctctatcatttaaaagtgattttaaagcgatgatgagcagtgacaatttggaatgttcccttgtgagacgacccaaaatagtctcagtgtgaataaaaaattttaaatttatttatttcaaagtaaaaatatttaaatttaattattttaaagtaaaataaaaaatttcgggcagcgcgagatttcggcgcgagattttgtcacgtccccatttttagcaaataaaaagcccttaaaatgttttttttgattctggattgctactttttgaggcaatttttctcaaaaacataaattttgaattttagagatgcatttggcggagttatcaaatccattactattttttgaagaaaaaacattgaagaaaagttgaatagaaatatattaaagttatttgaaattattaatattattttttttaaatattgctttaaaatagttaaatttaaatattttaccttaaataattaaatttaaatatttttactttaaaataattaaatttaaatatttttattcacactgagactattttcggttcgactcaaatgataccaaaatttttttatttcattggttgttttccaagcaaagtactaaagcgtcgactgctgctaccaaaagtgccaacacaaataaacggcacgattctttaaacatgcccatggcattttgtgccacaaccaggcctaagttttagaacattttcctgatcactatagaatcgataatttggccaataaagtcgagagtgagagttggcccaaggttgaggtcgaacaacaataatggtaaagtcaatcccgttaatatcggcgttagaatctcgagcactgttctggccaatgatagtgcgtttcttaaaaacttccattcccccctcacttccgaaaatccatgaaaaattttaaacataaatgttttaagaaattttagagaaaattgacaaaaattggagttttaaatttttttttcagaaaaattcatttttaaaataggagtaaaaatttaggaaaaaagaattttcaaaaaggtgaatttctcaaatccaatttgttttttcaaaattcattaaaattccataaatttttttcaattgtttaaattactcaaaattttcttttcaaattattttaaaattccatcgattttttggagggatgtcagcttaaagaaaagcgccaccagcagtatgcctttgggcctaccggctcggcgtgtctcggcccacaacaaatgccttcttcccgctcgactgacgcacttcgcctcgccccgcgaacacccaagcatctaacagagacattatgccaaacattttgaatttaaattttacgcatttttttatttgcctggcgctctgtttgcctccaatgtaatgttgcggattgtcagcgttttatggttctccaccaaaatttcgccagtgcccgcactgtaatgttctccgatgattccacggttcgcttggtcggcatttcgaatgcagcagaatggcaccggtgccgttttgccaatgggaacggcggacaggaatttctaatggaaaattggagctaatttttcaaatttgtatttttttggcattctgtttattgctctgggaaaaattactactaacggatgctcggcggatttaagggattaaaatacctatttcctggctttttgtggccatgggtcctggaaattccggcaaaattccgaaacatccgggcccgaggcttaattttcaaattatttttaattttatttttggcattatgtttattgttttgagacaaatcaccagcaaaaaatgctcggcagatttggcttcgataattgatagaaaggattaaagtacatattcaactggctttttgtggccatgggtcctggaatttcggccaaatctcccgaactacccatgccaaatacgtacaataagtacacttggatgttcattaatttttcaagatttcattgaaaaagcctaaaatttcgctcccattttaaaaaaaataatttacttaaaagctataggtcccttttagcaattaataattgccgatttccattctttttcacattttaaacttaataataaattaaataaaaaatttgctcttttattttatctaaggaat

SEQ ID NO: 7738 - DNA, 2908 bp, Heterodera glycines
aaataaaaattgatcattaaaattgctaaaatattatcgagtaaatccaggtttttcatgcctaacctggacttggattttttcccatatttgacctggtgcatggattttctggacacaaatccagtaaaacctatgcgcctgattttaatttttttcgaatggcactctcacaaattaaaatggggaaatttttttttggcattttccacttttattcttttagctttgtctacgcccatttcattggtcgacgtaagaatcggctgcccgacatgccccattcgtccaccaccgcccggttttggaacgaattggcccagcaggaaggcggcagggcccagcatcaaagcggcaccatcggcggaggcaccgtcggtggcacaaaaactgttcgactcgggggcgaggcccggacattgctgggccggcataacgagtcgtccgactcgggagacgacactttttgatgagtgtgccgtgccgtggcagcgggggtgggggaccgaggggagggcccaaaaatgtgttttgcggaattttgggattcgaaatttggccccaaggatcactgaaatccggtctcccatccctgtgtgccgtgccattgaaagtgacgggatgtgccattgtatgtgattgtccactttactacttttccccccttcattttttggggctcgggagtctaggaaatgttcagtggtgttatccaagagactcttttggcttgaggacggaattaggtacattaactgactactttattggaaaatattttttaaatcgcctaaaaaatccatttttcgggagttggcaccaaaagacctatttcggcccttttgtacatatttccgtcgaaaaatttcttaaaaaatacaataaaagcaacaaattgtttcaccgacaacacatatttggcattgctcgacctccaaatttattgaatttttttaaaaattttaaacaaaaatttgaaaattttagcatttatttggggggagagggttagtgattttggcacttaattcacttttaggtttaactattttaagcacctaaaaatccaggtgctctaaaaatggaagagctcaaaaatatcgccattatttttttgtaatgccaaaatatttcgtaaaatttgtatgatatatatttaaatatatttattaaaataatttttttttatatttttcgcctaatttgtgccaaacaaacacaccatcgttttgccgttcactacgccaaactgtccaaaatcgttgatgcttttgccggccggtgccatcaccaccaatcgttgctgcggctcttcagccgtttcgctgatggcgcccaaatgctttttctttctgaataatgccgatgcccgaggggatagggaaataatttttttaaataaaaatgccaatatatggggggctttcatggccgctgatcacgaatccggcatcccatttagactgacaataagcgattctcataaatttggttttcaaccataaaataggaatttcgaaggaaaagaaaacttattgacttttgtttggtttcgggtgctgaattcgtgatcacttatcagcggctctcacagattggcattttaaattttcaatggaaaaaaaatgtggtgtgggcatgatttttgaactaactttagcttgataagaatgcataaaaatttgtaattttctggtgaaattcggcactcaagaaaatgccgaaatttgtcgacaaaaatctttaggcggctaagattttagatgaaatcttttaacaaaagatattatataattttattcagggggaggagtcaggaatttttgtttgcttcaatacagtaataattttgcaatttttagagtaggatatatttatgtaattaaaatttttaaaattaaacccaccccgacattggtgtcagtgcttcttcaccattatcatcagtgatcactttgtacagcgatttgactgcttcaatctttgcgtcaggcgaggcgaacgcgaacagagtttcatgctcttaaaatgagcaaaaaaattgtattcatgcaaaattttgttgaaaataagaagaaattttttaagggaaggtcctggcggtgccaaagatttttttttgctcaaaaaagtgccaattacaattattgtgttaaaatatgccaaatgttacacagcagggttggcacggaagtccgatttctgacattttttgggctagaaattccgatttttggcattttttgggatcgaaagtctgactgaattaagtcggcacgatttgccacattaaaaaaatcaaaaacgaagcgaagcaaaattttaggatgaaaaccaaaagtgccaaaaaattaaaggcaaatgaaaattgaaattttgtgaaaaatacatcccctaacccatctacactttgatttttgtccaatttgaaatcggtgatttgaatggcactggaattggccagccaaacattgccagaaattccaagagtgccgttgcgaagtgagcccaacggcacgccataatattcttcggcatttgttgtggcccacatagatgtaatggcttaaacgttgaaacattaaatgattgacgaccaaattttagttaatggataatttaccaatgattagcacagtgataagcaatggcaggtggaaagccatttcaaattgtttgtcaagtcagacaaagtccgaggcaacaaaaaaaaggtttaaaagaaagtgatcaaaaagaattttaaagagagagagaaggagagagtgagagtggaaagaggggagagagagaaaagaggggaaaatgagagagagacagagagagggggggggagggagagagttagagagagagagctagagagagagaggcggagagagagcatggggagagggcagagaggggg

SEQ ID NO: 7739 - DNA, 1306 bp, Heterodera glycines
aggcaattaagacattgtttaaaaaaagtgatcaaaaagaattttaaagagaggagaggagagagagagaaggagagagtggagaaaagaggggaaaatgagagagagacagagagaggggggggggagggagagagttagagagagagagctagagagagagagagagaggcggagagagagcatggggagagggtagagaggggggggggtccttgaaaaatgttacttattagaaaactaattaggcaattaagacattgtttaaaagaagtgatcaaaaagaattttaaagagagagagagagagagaaggagagagtgagagtggaaagaggggaaaatgagagagagacagagagagggggaagggagagagttagagagagagagagagagagagagaggcggagagagagcatggggagagggtagagagggggggggggtccttgaatacttattagaaaactaattaggcaattaagacattgtttaaaagaagtgatcaaaactaattaaggaatgaaaaatgcattaatcaactgagacaattttggtgcataaaaaacgctgatcaaaagagatgaccaatgtcagaaaaagcaccctgttgatcagtgggaaatggattggatttgcactgatcactttgtttgttcagtcagggttaagcgatcgctttctgctctgcttatcattcatttatccctttgcacattcattctctcgaataccttttgcacatcaatcatttgggcatttttctgggtcatttaaaaccgatcagaattgatggatatgagttgatcttttttttcgacactgatcagccatcattttcttctccgtttctgcacttttaatcagtatcaattcgaaagtgttacaaaaaaaaaataaaatagtaaaaacggaaaaaataattaaattagattcgaataaaaaatagttttttttttcaaaattttcttagtttgtaaaaataaaataaaatgaaatttgagactatgtattttcagtgccttccaaaagctaaatattttgtttttcaaaaaggagttctatcatcgaagtattacataacgcccttgaaacccgaaaaatgggcaaatttttgaatgtcaaataattcttttaccgttacaataggtattaaaattataaaaaatagttgccagcatcaaaaaaatgctcaaattttgcatttttggtgttgttgcacaaaaagccaacaatcggcgtagatgaaacggaagaaaaaggaaaacaataaaattttcaatttttttttccgtttttaacat

SEQ ID NO: 7740 - DNA, 3781 bp, Heterodera glycines
gcgtatgaagtgattagaaatgtgaatccgtttgctgaagcatatatgatgatgaaagaagaagaagatgaagaagttgatagagcaagaaatgagaacagagagccagccgagatcaagcttttgtttgagaccggaaggcaattggacagacgtttggggtacaatgtacctcgagcgaatgaagttgctgcagtttatgtacctggggctgacggtgaagtacttaatgccaagattgtggtgagagaacgtggaaaggaattgaagattttgaatagtacagattttatggtgactccaatgacttacccgctgttttatccgcgtggtacgcttggttggtaccctaaaatgaagcatagaaatagtaacagaagagtaacgagattgcaatatgtgtgctacacattagcaattagagaaagagagtttattccgattttgtacggtggaaggctctttcaacagtattgtgttgatgaatatgttaagattgacggagacagaatgaattggataaagagtaaacagaaaaatattttggctgatgcatataaaaatgttgataatatgttaatgagaagagcacaagaaagaggtttgccactgggaaggaaggtcattcttcctcaaagtatgacaaacagtcctagatacgttgagaagcatttccaagatgcgatggccgttgttagacggtttggtaaaccagatatgtttttgactatgacatgtaacccgcaatgggaagagatttcagagaatttgtttcatgaacaaaagtcaagtgatagaccagatttggttgtcagagtttttaatttaaaggttaaagctatatgaatgagatagtcaagaaaaaggtttttggcgacgtgattgcatggatgtatccggtagagaaccaaggacggggactaccgcacatccatttgcttttgacattggcggagcaagacaaattgattaatggtgaagatgttgaaaagaaaggaattagtgcgagaataccagacaaggaattagaacctgatatgtttgatttggtgaaaaggtttatgatccatggcccatgtggtaatttgaacccaaattgcccatgcatggaagagtttgttgacaagaatggtatgagcggaaggaaatgctctaagggatatcctaaagcatttcaagaagagacagttgttcttgaaaatggtttggctgggtatgcaagaccaaatgatggaagaatagttgaagtatttgcaaatggaagaagacatgtattagacaacagatgggttgttccgcataaccaatacctgttgaaaatgttcaagtgtcacattaatcttgaaaaggttaatagtgttagttcagtaaagtatttgcataagtatgtgcataaaccaccagacagagcaagacgggaactagaagagaaaaatgatcatgatgaagttaaagagttcattgatgcgcggtatgtttgcccgcaagaagcagtgtggagaatttttgaattgcctatgtatgatagaagccattgtattatgtccttgcctgtacacctacaaggtgaacatatttgttattttgacgagaatatggaagaagaagagattcgtgaaagaattgcgaatggttctgagttgatggcatattttgaattgaataagacaaatgttttggcaaaaactttgttttatcaccagatacctgaaaagttttgttttaagaaaggaaaatggacagagagaaagacatattttaacacaattggccgaatggtgaaggtgtcaccggctgagccggaacgataccaccttaggctgttgttgttaaatgtgaagggagcatgctcctatgatgatttgaaatcagtttttgatactaatggcaatgctaaagtttgtgaaactttttcagccgcatgtttagaaagaggtttgattagaaatgatgaagagtggaaaagagcattagaagaagcagagagttttgagatgccatggaaattgagagcgttttttgcattgattttagtccattgcaatccggccaaaccggaagcgctttggaatatgtttaaagactcattgtctgaagattttagcaggaattttagaaaagaagtagcttatgctaaagcttatagagaaattgcacttagcattatgaaggctggaaagacacttgccgattttccaaccatggaacagataaatgttgatgatgatgttgaacaagtgtttgacctagccgaagaattggatttgggacaaagaaattatgctttgatgtatgatgaacagaggaatgtttgtgatgccattttgcatagaatatggaatcctgtaaatgaacccgcgttctactttcttagtggaccgggtggaacaggaaagacacatgtgaacaagacaattgtacatatgctgagaggtcagaagaagaaagtttgtacaatggcttttactggcatcgcagcaactttgctgcctgctgggagaacattgcacaatagatttggattgactttggatatgagtaattcgagtattagtccgaggtcaaaggcatggcaagagttaaaagaaacagatttgtttgtttgtgatgaagcgcctatgataaataagcgcgcaatgagtactttggatgagaaattgaaagagataatgaataatggaatagcatttggtggcaaggttatgctttggacgggagactttcgtcaaacccttccaattcagaaacatgccacgagagctgagatggttagttcgaccataaagagaagtgcgtactggaggttggctaaaagatataaattgacgaagaatatgagagctcttgcaacggagcaagaatttgcgagagatttgttagagattggcagtggaaaatggaataatgaaaatgatgagataattttgcccgaggattgtattagcaatggtgatttagcagaagagatttttggtcaatgcattgtcttagaaaattggaatgaaatggcaaaaagtgccattttagcaccgaagaatattgatgttagtgaaatgaataataaagttttagaaatgttgcctggagaagaagttgtgtacacgagtatagacttagctcaagatgagaatagacaaagaccagatgattatttggatgagtatttgaatgctttaaacccttcggggtttccacggcataagttgagacttaagaaaaatgctattgttttgttaatgcgtaatttgaatatagaaatgggcctttgtaatggtgcgagaatgaaagttgagcaaatgcaaccgaatttgattgtgtgtgagattttgactggagataaggcaggtcagactgtgtacattcctcggatcacgctttgctgttctgaagattacccttttgaccttcacaggcaccaattcccgttggtgttagctttcgcaatgacaattaataaggcccaaggccaaacccttgagcaagttggcatagatttgagaaaagatgtgtttagccatggtcaattgtatgtggccctttcgagagcaagagcttggaataagttgagaattagattagatgatggcaatttagagagaaaggtgaagaatgttgtgtacagagagttattagataacagtgattaggtaatgtgttagactaggcttggatttagatttagtatagtattagaattggtttggtatagacaaaactgttggtcttttggttgctcaagacagtacgaacacaattcaaagtaagtcattattttgaattt

SEQ ID NO: 7741 - DNA, 2190 bp, Heterodera glycines
ggacggataatcccattagatacagacttaatacaataaataaggacaaaaaatgttaaaattggggtgcaaatgtttaatttaattttttatttttatggttccttcccgattctcaaggagagaaaaatcaggccgtcaaaatcagtgggaagatggtggaagaaaggtaaaaaatattggcacgtatcacccaccctcagcggagagtaaatttacaaaaaattgtaaatttactaataatttgattcatttttattttaaaatacaaataagaaataaatcaaaaaaaaaaattacttcaggtaaaatttttgttggcttcgattttttttttgattttaaaattctactgatgattttaattttttattttatatgttaaaatggattagttatttgctgattgcggaaacgcaataatttttatttacattttatgcgtgtatttcacatgttaaaatatatgcccgtgggggtcacattatatttgcgccccgagcatttgtgccaatgcccaaaatcgggttcaaactcaaatttttttcaatccaagatggtataaactgcttttaaaaaagcaataaaagtgattttgtatccaacaataagttcgtcagaaaattttgaaaaaataatagattatttaaatccgatctttgggcataggcgaaaatgtccgggtctcaaatgtctgagcacgcctgcgggtgcttaatgttaagaattataataattaaaaactttagaaatatgcaataaatggtggtgaaaaattgattaatagagaaagtagaaatattagaataaaagggctaaaaaatttggaaaaattaattattttcttttaataattttaaattttaattccaattattttatttctttttcgaaaaccttggaaccatatacatatttaagcaatttttcgataaaactttaggaaaatgcttttattcaatttaccgccaaaattgttgtttttctttgctatggcaatgcttttagcgaggaaaagcactcaaaaaatgccaaatgtgaccaaaacacatgcaaaaaatggtaattatttgattcagttaaaccagggctcccaaattaaaattttcaaggccggcgatgggaaaattttgtaatttttaatgagattcttaccaaattttgcgatttaaaccgatttaagaaataataataatttatacgcaaagcgtgacgccgccaaaataaaaacaacaataagataaagcaaaatggtcacatatgagagtggttcataaatgtgtaaaacgaaccaaatcaattgagtcaagaagtttagaaaaaacagttgaattttgtaacctaacttctttaggtaataacctatagaagcgagaagcacgaacaaaaaatgaatggtatctaatgaaaatatttgtcaatgacaaagaagcatgggaagatttgatcggatttgtatcaacagataaacaacaaatcattgacacaaaaatcatttttgaaaaaatcaaaaattctccaattctcagcaacgaaaatgaacaaaatcttgcgacaatgttcgtgcatttaaatgcgggaactgcgataattacgaaaataattaaatgtatgggtttggtatattttaaacacaatttaaatattttaaaaaaattttaattggggctcgacctagaccggatcgaggtctggatttttgttcaggaaatccaggtccaggcatttttcaaaatttatcgagctctaattttttaactattttcccattttaagcaaacagtttcaccaccgcaacaacgacactcatggcaacaaatagaagacgaaaacgtatggataataataataacaaccaaaataacaataatggatataacaatgtgtatgaaatgttgcgtcaagcacagctaatccatggccgaagacgggtggccgataatcagcctacacgtgttgattgtgttgttgtggtcattattttagttggttgtgcgttactccttgattccttgtcgcaatatgttgttttccaattctgaaccgcttttaccactgtaaccaggcccgtagccggaaaaaaaagaaattcggaggcggtaacccgaagattccttttttttttgtttgtagcggttttgcgccaaaaaaaggatttcaaaaagtatgctaaaaatgtaggggttgatg

SEQ ID NO: 7742 - DNA, 1005 bp, Heterodera glycines
ccaaaaaatggggtttaaaacttaaaaattacatattttttattgttgttcgttgtatcaaaaacaccttccaagtttgccaaattcgaaaaaaattctcattaaaaaaaaagaaatgtcgcaaaaaaaatgacgaaaatatttattgaaaatgccaaaatgacgacgaaaactcaaatttttcgtgttttgtggggtgtaatttttaaaaatttccaaaaagttgatctttaggggtgtatttttcgttttttttcatttttcttgtgaaaatttccaaaaaatggccaaaatatggactaaaaacccaaaaatggcgaaatatggatttattcccgaaaacccccaaaatatggatttatatggactaaaaaccttcaccaaatcaaaaaattttaacgcagaaatgctatttttaagcccctttcttcatagcatatgcgcagaaaaaatatgttaatccatataatttacaaccctacttatactgatcattttgtgatttagaggagcctatttttaaagaaaattaaagctttttgttagagaccgagatttccaaattctccggaccggaccggactggtattttaaaaaatgaccggatcccggatccggtctctcataatccggtcaatccggtaatccggtcaatccggattttcatattgccggatccggaaccggattccggattggtaaaaatttaaaatttcgcatcttaaattgggaaaaaacccgcaaaatgtcatcaattatatgtagaaattcggtgcaccagaaaatgtcgccgttgaaaagacaatttcgccaaaaaaatataatttttcaaattttcaagaaaaaattaaaaaaaaaaacaattttaaagtttttttatttttgaaaacctatgttttttgggtaatcctggagtaggtttaagctccgagccccccgacccgacccgagacgtttatggagtggagtccccgacccccgaatcatattgctaacaaaaatcat

SEQ ID NO: 7743 - DNA, 2497 bp, Heterodera glycines
  unsure (1)..(2497): unsure at all n locations
gattcaaaagtaacaatgtattcttgcgaaaatttaattattaaaaatgaattgattacacagtaatcaatttacgacggaacgacagataattgcgcactcatccaaatgtttcagtctcacaaaaaatgagtgtttcctcgccttcttcgtcggaatcgttctgaacccatttgatccggtcgagtcccaactgctcattttcgccaatctcttcaaaaaactcttcttcgattccgtattggccctcattcatcacaaacgacggttcctgcaccgtttccgattgagtctgaagatgggagctcatgcaaattaattaaaattaaacgctttatgattagtcctcgcccacttaatttaaaacgatgccaacctcttcctcttgcgtctgtccacccatttgcgcttgtaattccctcttttgcatgcgctccttcaaaaactgcaaaggacccatttcttccgattgattgaatccatttgtacgacgcgaggggtaactaaaaaagatatagaatcttatgaaaaaggagttttctctaattgtctgacgtttaaagcctccaaaattgcttacatgcgcttcatactcaaaaaagtctgccgctccctttgaatgtgatcaattgtgaggagcaactccggcgttaaaatagcatggtaactgaatcaaaaacttttgtttgttttttatttattccgcgttgcacctgagaacgtttcccgtcgagtcaatttcgatgtactttttcatgtgttccgaatgtaagaaggcgttgaacgaattgaagccgaggtccaaggcccttctgtacgggtcgatgccaatgtcatcactgaatattggaaaatggttgttgataatttcactcttaattcatttatattataaccagggattcttttttatgtaagaaaatcgcgaaatatgtaaataaaatatgtatggaatatgtgtacaaaatccccaaatatgtactaaaatatgtaaatggttatttttggaaaaaaaaatcgtcgtaaaaagtaaaataggcaaaaaaatgccataaaaggaccaaaataggcttagaatcacattttagtactttaagaattaatttttggtatctgttttatgagaaaaaaattgctttttttaaagatatatttttccaaaatttttttttttattataagaaatttctattaattcttaaagtatgcaaaaaatgaaaatgtgtacaaaaaaaatgcgaaaaagtccaaaatatgtagaaaaatcccaaaatatgtaagtactataaaagtcccgatttttgttcgcaaacacaaaaaagaaaattttcctacaattaggctatagagaatccaggaaaaaaaacatgtattttcataaaaaagaatccctgattataaccagacccatgtttatttggatgccaacccgacaaaagaagggataactcactaaatattattcgcaatgtccgacgtgtaaaggtatccctcgggcgtgacgagcatcgccttatagacaattttacagaagtcgtcgatcatcgactcggtgacgactgtcgcccgctgtcgtcggcctctcccagcgcacaaattcagtccctccaattctttgcgcaaatcgtcgctcatttaatctaacaaatgaataattaacacatttacaaagatcattcggatttaaaagacaataaacattgatattcaacaataaatttgtaaaagtgaaagaattaaattcaaattcgttgtaaatacaatggataaatgagaaaaggtaaaaaaaacaattcagaaaaagtgcaaatgaaagcacggaaagaattaaaaggggatttggataaaaaaggataaatgaatgacaaaaaatacgaaaaagagatagtaaaagtttttacaaaatgttagaagcgttaaaaacgatgggaaatgactcatttgagcacgtaatacgtccgtttcacagtgaagtcgacctccacgtggagaaaatcggggacactgaacacgaaaccctctcgagggtcggacaacatctgaaaattggaatgaccaaataaccgaccaattaaacacttaaaaagtttctatcaaaagtgaaacgcccaaatcttttgtgtttaattgtcacaaaaataaaataaaaattcagttccttttcttttgcacgagttgcaaaggaccctacgaaaagtgacatgattccggtgacaaattcaaacaaatttcatattccgttgatataacaaaagaatgagtgtgaaacgtacctcaatgtaagccaaattgctgaatccgatcacagtgcgtgtgggaataacgcggttggaaaaaagagtgggcagcgatcgacggacgatgtgaccctttttgtcattgtttttgctttcctcagaatcgttcgaataatggcgcttcacacggaaaacccttaagagaggcgagttcnaaggacttgngttcagattaaattttacgatgataaagtttgctc

SEQ ID NO: 7744 - DNA, 2267 bp, Heterodera glycines
cgcaaagcccagcggaagcccgccaaactgacgggctccgagcaaacgataaattcattttttgcagccaattggacgaatccggggatagcaaaacaaattgatgcatttagtgctggaaattgatcatttttagcaactatagtaaagaaagagttaagaaagcacaccaacctgactgtgtcaatgttgtggtcttctgaattggcttcggcaaaggcgtgggaggagacaacccaacaatgactttctgttttgaaaacaatggcggcttctgtcgacgaccaatcggagaattaaacggtgaattgcgaaagcaattggaagttgctgttgcgcaagactctatgagcgaattgatctgccgtttcagttcgtcagtttccaccgattgagtagccaacttttgttccagtaattcgttgctccgtaacaaatcattgctgaacttttaaacattaaaatataaaaagttgactaagttaccgtgcagattcactccgttgaagttgaatgaccaaattctcattcttctttttcaaaaggacttcgttacgacgcacctccaataccataaacgagtacttctgactaaaattaaaatatcatcttaaaaaattcatatgctttaactcacatttcctgtcttaacgtcttaattttgtcaatgagttccgagatgttttgattttgaggctcatttcccatgtcgataattgaaattttaaaaaatagaaattttgaaaaatttacagtttcatgtgaaaaatctgagaaagatctgttaaagaaggaattaaattgaaacagaacatgcaatttgagaaagaaaattaaaaactgtgttaaatcaataaaggaaaagccattaaaattagagcccggacgggcctttagcgggccgccagggggctcttattccgtttagccccacattttttgcatttttcaaaaaaaaacagttaatagattttcggggttgctgctcgtttttttgggattaaaacatgtaatctaggccaaattgacgaaatttttgatattttggtacatgtaattcaattcaggaatacttaatttatgtcatcgaaacagaagattgaattttctaattttcctaattcaatttgacaaaaaatgaataatctatatattaattttgtgctgtaactaatacatttaaaagtaaacaatttatcgaaacgaattccttttggaaaatagttcagtctttttttcttttctgtttgttgtttacgtcttttttgtgttatgagcgagcacatatttcttcattattggaaaaatcgaaaacaacaaaacagccagaaaggctgacatacctataagatgtactcacgaatatttcgctaacaaataaggacttttgggtcacttatgcagttaattttcgtaatgtatgtcacaaagtaaacaaaaaatttaaataaagttttgacgcgattgtttttatttggatggaagaaatggtgaaaaaacagagataatagagataagttgtattgtaagaaagagtgaagaagagagagagatgaagacagttaggaacaaagagcggagagtaaaggagagagaaatgattagagaaacaggaaaaaagagagagaaagtatgggagtgaatgagacagagacaaataagagaaagagagagataaaaataagagaagcgagagagagggggtagagagaaagaaaaaaggagagagatagaaagaggagagagagagagaagaggagagaaaggaagagagaaaaagagaaaaagagaagagggaggaagaaagagaggagagaagggagagagagagaagaggagggagagaagaggagaggagagagatagaaaagaggagagagagacaaagaaaaaaggagagacaagaggagagagatagaaagaggagagagagagagaaaagaggagagagaggaagaggagagagatagaaaagaggaggaagagagagagagagaaaaagaggagagggagaaagaaaaagagggagagagagagagaaagaaaagaggaggcagagaagaggagagagatagaaagaggcgggagagaaagaaacagaggatagcagggagagaaaagaggagggagcgaagaggagagagacagaaagaggagagagagagaaacgaggagagagagggagagagacagatagaaagatgagagtgagaatgaaagagaggaggagagagagagaaaagaggagagagtgaagaggagagaga

SEQ ID NO: 7745 - DNA, 1606 bp, Heterodera glycines
atttattttagttttcttttctgcagattaagattggtattaatttccaatttttgatcagatttaatccatatgatcgcgctccgatgcgcactttgaaaattgccgacgaccaatcgaaggcaatgggtgtgtaaataaatgcattttccattattattgggtctttttatgttttaatacatttcagaggacactgtgcttttttacacggcctaccaacgctttgcccaattggccaatcattcggacaaccaagtgacgctcactcttcggcctggcactgtgcttttcatcgacaatttccgagtgatgcatggacgaaaagcatttcaagtgttttatagggaaagggaaaaacaatattaataaatatttgttttgtattctttgtcagggtgaacgagtgatgtgcggttgttatttgaatagagacgtgtttttggcaaaggcaaggccaaaactgtcgccagaattctaccgaaatgtgtgaagaattgggcggtgtgtgtttaatttaacttatatttactggcattgtaatatttttgttcaatttacataatttgtattgctcatgatcgaaacggttaacaatagacgaaatgtaatgaatgaatgacaaattgtgcttttttggctggaggtaggggcattcgtcgcctttctttcacctttcctctctctctctctctctctgatcagtctctccgatcggccactctctcatcactgaatactgctcggggctcccttcccgcggctgtgccttttcagcagaactttccgtccgttgttcgactgaccaaacgctccgtccgccgcgtacatttgtcgaccgattggtgaatgcctccatttgcatttgataatccgcaaataagtcatgcggaagcgcgcgttgcacagcgcgtaacagagcggatttatggtggaattgacataggaaagaactgaaaggcgaacaaattggccaagggacgacgtacggtacgtacagtaactaagtgtgaagagatatgatgggactgagttggggtagaaagcctcgaggcaaacgatcactgaaagggcaccgggggataaatcagcggagagagacgcaaaatgattaattagctaatgattaattactgattagtaatgaccattgtaaggggtccaagtgataatgaaggcgaacagaatggccgaaagtgttttggccgcttttccttcttgcttccgctcatttcgccgcctctctttttcacttctgcgcatctgtgaaaagtgaaatgcctttggcaatgccattcattcattctcaaattgtatcttctaattcaccgatctgtgccaattattttttgactttcagtggtactttaaatgcaaacattttcattcttttaattagtttattagtacccttccccctctctttcacctgttcctccctcaactgaaggatgtcgctcttcttcatcagctgttttgacatcgtcgttccgttctgttgcgtttgctgttctactaaattggtcacttcttcttgtgtttctacttcctctctcttcccccccccctctctccctctctctctctcgccctccctctctctctc

SEQ ID NO: 7746 - DNA, 3714 bp, Heterodera glycines
  unsure (1)..(3714): unsure at all n locations
cttcaggttttgttgttttgcacaaattgggggaggtccgtaaataaatttgtacaggataccgaattcaaatttgtttctgttcaggaatgccagcgtctgtccggtgaccagctgctggactactacaccgagcagtggaccaaattccagttctcctccactgtggtgaatggcattttttcctacttgaaccgacattggatcagacggaacatcgacgaggcggtgcgtcccggaattttggaagtgtacaatgtgagtggtttgacggtcatacatgaattggggatgggtttcatttttaaattctcgaatttcagttggctgtttccatctggaagtcggtgatctttgacgaactgcaccacaacatcacgtccgctgcgctggcgctggtggagaaggaccgcaacggggaacgcatcaccacgcgactgatcagcggcgtggtcgcctcatacagttaagcttttacaaatttggaccccgaggcggggctggggagtcagggaatgggtctttcgttcggcgaccagattctgccgccactctttcgttcgaacacccgctaatttgcattccttgtttccagtcgaacttggcatcaacgagcacgacccggcggcggacgtcggaggaccagcaacagctgcggtcgcccaacaacagcagcagaattcggtggtgcatcgtccgagtgtcaaataccaagtgtaccgcaactactttgagcagcgctttcttgaggtacgcttggatgggttttgtgcattttgaaatttttacattttattttttcactccacgcaaacaggacactcgcaacttctacacaacggagtcgaacaagtttctgcagtcgaacagtgccaatgtgccggactatatgaaaaaggtgggtggtgaacaggggggagtctcgtttacgagcgcaactttcgtcatgtttttctctttttttcaggttgaacaacggcttagcgaagagcgggaccggtgccaaatttacctggacaacacaacaatggactcgctgatggaggcatgtgacacggcgttgatcaagcatcacctcgagctcttccacgacaaatttgaggtagcagaaagagaattgtccattttattatattacacttttttcagtcattgctcactcgtcaacagaatgaccatcttggacggatggtgagatttgcagaatgtcaccacttttctcacaatttttgcataatcgtttttttcagtacacactttgttcgcgtgtgcccaacgggttggccaagctcaaggagatcctgaaggcgtacatcgaacaggagggcaaggcggccattcagcaaattgcgcgtgaagcgtccaacaatccgaagcagtacatcgactgtatcctcaaaaagtgagtagcgggtgggtttttggaaatactgaaccattttaaaggcacaaactctacaatcgcttggtggtggactccttcaaaactgaccatggctttgtgcaatcaatggactgcgccttccgcaagttcatcaacaacaacgcagttacggagatggctcggaatgcgtccaaatcgtcgcagctgttggtcctctactgtgatcagcttttgcgcaaaagtgcacgcaacaaggaggacgagaagatggatgagtacctggaccaagtggtgggtttgtttggttctttaaagtttgaaattttccatagtttctgttttcttaaaaatgctaatataatattcgcattgtcacagatgaccgttttcaaatacatcgacgacaaggacatgttccacgcgtttttccacaagtttttgtgcaagcgcctcgtctacgacacgtcggccagcgaggagcaggagcggtgcatgatcgcaaagctgaagcacatgtgcgggttcgagtacacctcaaagttggagcgtctgctgactgatgtcgcgctgagcagggaccattccgagcagtacaagcaggtggctaacgaaatttaaattttcattgagacagttttaccccatttttagcagccgagaacatccaacgttgacttctccgtcattgtcgtcatgtcgaacgtgtggccactggggcagccggtccaattcgacatcccgcgtcctctcctcgactgcattgactgtacgtttggggaagacgggtggtggagagaggtacaccctgggaaagtgtcattacttttcagcatacacccagtactacaccaaccgcttcaatgggcgtaagctgacttgggcgttgcaaatgtgccgcggtgaattggtctcgacgagcaacactttcaaggacaaatactcatttttggtaagcaattccgacattaaaaattgggtttcctcgtaaaaataaataaatgtttttcttttccagtgcaacacgcaacaaattgccatcctcatgcagtacaacgaacgcaacacgtacacacttgacgagctgcacgtcgctcttggcaccgactttcccgctgatcagctgtgcgccgttgttcaatccttggtcaagacgaatctgctgaagctcaccagcgccgatgggacagctttgaccgagacgaaactcgatgacaaggagcagaaattcacctttaactcggaattcaagaggtgaatttgaaaatgaacgggggtaattaaattttaaaaaatttaaaaatgaatgtaaaataccgttaattctaattatttttcaatttcccgtcttttcagccgcaagctcaaagtcgacttggtccgtgccatgtcatccgccagggagacaaagaaggagagtgaggacgtgcagaagacggtggacgaggacaggaagttggtcatccaggtgagacaaattgacaaatcaattttaatgacccctttcttctccctcattaaggctgccattgtccgtattatgaaaatgcgcaaatcgttgaagcatcagctgttggtggccgaggtgctcaaccaattgacaacgcgtttccagccaaaggtgggggagaatgattttgggtgcaaatgaatgcctttcctttccttttaaggtgccgatcatcaagaagtgcatcgactcgctgattgagaaagaatatttgaagcgctcggaggaggatagcgatttgtatgaatatttggcatgatgacaccattaaatgtgtattgtattggatgttttgtcggagggtataattgtattgtattggatgttttgtcggaggttataattgtattgtattggatgtttgtccgcgttataattgtattattgtattgctcatctcgtattattgctctgaataaatgctaaataccaaaattgggagatcagaattgcaagcggctgattgcatttaaaattatgggtgttgcgagcttaaaaattcattttttcaacaaagtgtaaatgtttcaactcttttttgtcgcctccggcaatttctcaatttaattgcgccatagaaattcaaaaaaaaaaaaaatcaacattacgttgntctgtgggtcctttgtttagatattttgaatgggacaaactgattgtctccgcgtggccatgaaaatgaataagcgaattttgaagaaaatgtgagaatttattcgtttaagaatttgtgaattcatttttaagaccacttcaatatattttgaacatttcagttgcanttgcaatgatggtttggatggaccttttccctctttttgac

SEQ ID NO: 7747 - DNA, 2528 bp, Heterodera glycines
aaatttttttattgagtgcaatttgttaacagatttacaccaaaaaatgaccattttgcgactttgagctacttttttttaataaaatagaggatttttagggtccggcagtgccgattggcgccgccggtgaaaattttgaaatttaagtgacagatttattccaaaaatgaaaagattttgcgattttaatagttaaatttatattaaattttcgtcgaaaaaaggaataactttgaaaaattagaagaaaaacaaatacttggatgggaactgatccaaaggaacagaaacataatgaaaagagccaagagcaccactcgaccatgcgtgtgaacaaaaaaataaaaacaaaaaaataaataaatatatattaatttaagtttatcaaaagcccatcactaggggtcattttcacattgaaaactcaatctttaggggtgtatttttcccgaaacttcgggtaaaatagccgaagccgaagcacgaagttcgaagctcaaaaagcccgaagttttcgaagccgaagccgaagtttcgcccagccctggtcaagatggggttttttcatagctttttgtttaagaaataaaaattggtccgttcatagaatacaaaattgaatttaagcgtttgtctctcgaaagaattctctacggaaacgtgtccattcagtgagggtattttttgccgaggtgtgttttgcagcaaaagaaattcaattttaaataattaaaattaaggtttttctatcccaaggctacccagctaccgtatcggcagactgtagaaaaacaaatttgaatttaatgaaaattataccacaaaattcagagaaaacaataattcttttaaaatattcaatgttgctttcttaaataaaattgaaaggaattaaaaacataattaattaattatattttattcaaatatttttatttaaattattatttttcattctatttaataaaaagaatttctataataaatatttatataattaaatataatttaatttttttgcatcatctaattatttataaaatattttttattaaaaatatttggcaaataaacaattcattttaccaaaaatggaatgattaattgtactcactcaagactctcgagtttcgcctaatgtaaattaattagtcaatttcaaaaaccttctcagattgcaaacgatggcgactttttgccgacctgctcaacgatgcaagcttttttatagtaagtttctttgaattaaatttttaaaattgaagccaatttttttgacacgattaaaattatttccatttaattacgttttgtttatctgatattttcctatcatttgcaccttttgatcattttatcacaacttactgagtgagtgagcactttgtttatttttcttaaaccatcgaaacttttttggatcagatttcctttccgctcaatctaacatacctacctaattggtctgataacattttttatcaatcgtttcatctttcccagtgaaatctatcattgcttcataatctatggcttggtccctctccaatatctgatcatctagcactttccggtctgatcactcccattcccatcccattttttggtctgatcactttcgtcccattttatgatctgatcaatccccacttcccgtccgcctgtttcgcgccgtttgcctgtgtcgcctcattgctccgctccattgtcggcgtcgcgggcggtgccacgcggatggccatcatacggcatcaggtgagcgatcatcaaaagctaatcgggaggaatgaggaatttcgatctcgttactcgaggaaaagcccctcagaaattaaatctgccggataatcatttatccctaattagggtcacactcaaccccagctaaaactctcactttaaattccaatttctcgaaaaaagtttccaactttgagagtaaagacgaaaaattaaattaacaaattttcttagaaaaattcattaaaaattccaaaattttcccgacgatgtctgttggcaccaccggtccccctcctacccccttgttcccaaaaaattagtttgaaaaatctcgagcaaaaaacgcgggtttaagaacaaaaagcgtccttatacatgaccatacaacaccatgctttttcaaggcacgtcgcgacaatttggcggacgtggcggcaaaggacggctcccaggagacattagtcaatgtgaaaattgaaattttttcgaattttcgaaattcccaaatgcccccaggtgctttctctgctgtgttcgttggttctgttgcctcaggcggaggggcgtccgttcaccatttgggcactgttccttctgttcaccgctgtccatctgtttggtcagtcgtgtcgaaaatggaaattattaattttgtttaaattatcaaaaatttcgccagcgagcaatttcttaatttttcaaaaaattaacgcaaaaattcacaaaattggataattggtcatgttttggcgaataactgctaatattctttccacacccat

SEQ ID NO: 7748 - DNA, 1844 bp, Heterodera glycines
atattcgggtggagtttcgaaagatgggatgtcgataatgcctaaaaaacctgacattttccagctatattgagtgaaagacttaaaaatgggtgcagaaaattggaaatggatttcatttaatacacgaccaatatttttacgatttgaaatgttaaaattggggaaacagcggcggattttttcatgcatagtttttggttacgcgccgccccacaattttgtgctttcttttgaattccaaaatccaagtggcacaggccttaaattgggtggtcaacaaatattatgtcaatttcttaaccttaaaatcttggagtccaatttcccgggcttttaataagcccaaagtggctaggtctatgtcatgcatggcctcattacgactccttgcctcataaaatcgctcaaaaacgtgccgatcaatcacagatattttttcaggtttactccccccactggcaacatatttacgaattcttaaacaaagaatttagtaaatccaaaaattttaaaaacctcgcaatctcgttattgcttttaatttttctatagagatgtttaatttgattataagaagtcccttcgtccaaaagctgtacgatttttctttgcgtttcaatggggtatttttgttgtcggggatcacggttcggggattcaacaaacaactcctcgttgtcagaattggatgtagaatcgctgctgttttcggaatcaaaatccaagtattcaacggggggatcagtggggttttcggcgagaatggactcaagattttgcacaaagtgtgcaacttcagcattatttttatggcggttaagggtctgatttaaatcggatagaagggcgtccattgtgaaaataggacaaaatggccaaggaatggaacgggtgaggagagaagatatttcccaggtgcaacattaaaccaatagcttactttgcatttaacagcaattttttgcaggtgtgaaatcgtcaatttaaatttataataataaaaagagtattttgaaacggttataaataattgtaattactataattatttcgtgctttaaacttgtttttgaccactttttggtactttaaaatgattaataaaaacaataagaattgttgaacccacgcggagtcgaaccaccagtcaccatggcgccattctgcaccacttgaccaccagcactgaagggaaaacacaggggaaaattagggtttttgaggcctcataacttttttatttttcgctataggcacgtaaaattaaaaattcacaatagaagtcgaccctgctctatcgaatggtaccaaatttatacccattttccgagttacagttcgcgaggttccccttgttagacaaatttgttaacagagtttgaaccaaaaagggttaaaaaaaccgaattttgggtaataatggtttaaattttgaaaattggaattattctataaaaaaattataaaactttatttttatttaaaattttttaaagtttatgttctcaatgaaaaaattatatttatcaaactctgaattttttcctttctctcaacttttgatctcgaatttttatttttgctctcgcatcccgcttcaagatgtgatcaaaataattttatacgaattgtacacaatgtttgtttaaattaacgatgataattcttcgaccataaattctgaattgtatttttattttattttttttgcgcgccaaaactgaatagaatgctaattaagaaattaattaaatggcctttttaaaattttattgcctcttcgctagtttgggtttttttcaaaaaatgtttactaatcatcttttgggattgtctttctt

SEQ ID NO: 7749 - DNA, 2484 bp, Heterodera glycines
tttgagtttaggccagtcattctgaacatgccgccatccttttgtgggacacacgcaattggaaactgatgaacaccttgaaagcccatcaggtttgacacggtcaggcgccacccccccccccccttgaaatgaaaatttacaaatttttcaaaaaaaaattcaaaattttatgaaattttgcatattatcattttgtttttcgtcctggcgctcaaattttgcactaacaaaataggaaaaaattttggccaaaagagcaatacgcttcaaaagtttttttttcaattttttttgtattttttttactttaattttattttttacagttgactgtcacccgtttgtccttttcacacggtcattcattttctttgctcacttttatgtcactctttttgaaaatgtcttattttttcagatgaccaatttttgctcagtgtttcaaggtaatttgcttttattcggcttttgttattattacgattattggatttacaattttatccattttagggacagaaattgggcacttttccgtcgtccaaatgatgctccgtctccatttgcgtacacaatttttcaattgtcgggaaagggccaaggacacagccgaatcagtcagtttcaggaaaattacaaaaaattttcataacacattcaagaaagctattttttgaaaaacctttagaaaaattcatcaaaaatttgaaaatcactgaaaaattttattgaaatttcttaagaaaagaatttttttttgaaattaaaaatattcggcgggtgggggggggggtaaacccgtgcacctaattttgatagggcaaatcaaatacaacttttttttgctctttggtccctaaaattctttcggcaaaggcgttttgggaagattttgtggtccagtggtactgattaggggtggcatggaattccgaaattttttttggtccgaattccgttttccaaaaatttttggggcctcggaatgccatccatttctctggctggtgccaatgagcgcggccgcgaaatttttttttttttgcttactttttttgtttttagtttgggattgtgcctgggcctcggacgcccatttgtttgccacttgctcacgggacaaaacgctgaaagtgtggcgcatttgtgccgcggtggaacaccaacaacaacaacacgacgaagaattggaagaagtcaaacaaattgccaattttgtcgggcctgctccccaaacggcagttgacattgctccaaggaaaatccgagataggttagggggggggggagcattcaagaaatttcgacatttttttactttacccctccccctcgaaaaaaccataggggtatataattaaaccgagaagacataaatgattataggctctatgagaatcactgatcgatataagcactttgccattcttttgcgactgactgatcagaggtccaactccaccgcatgtttgattttgcgcagaaaagtgaccgcctctctgtcgtcgatcaggcgatggtcgtaagtgagtgcggtgtacatcatcagacgaatttcgacctaaaccaatgggttgtattggtggtacaaaacaaactgagttgtccgatctcgacaccctttctcgacgtgcctttgcatccaccgccacagtcagatcaaaaatgccgagaatggccgactgcggtgggctgatgttcggagtgccgagctagcgctacaatttgttttacaaggaatctgaattggggggggggggtctaaatctgaatccaaactcttaatggttgtgcattcgtacacctttctcgtacacgctccacttttcttcattttttgacggcaatgattcggctaaaaacaaaaacaatgttcatacaaaccccaaaaaatgaatgcccaatgttttaacttacgattggaattgtcagccgttaataacacacacataataagtgtacgttgtagatgttgcatttgtaatatgcatacttccaattccccccacaccgccgcaccgggcccccggctcgggcatctttttaatgcgttttcttagcgctacaatttgttttacaaggaatctgaattttgggggggtctaaatctgaattttagtgtttttgtcatggattttaaaaaaacaagggaacgctgccaaaaaaccaatgccccgacaaaacaaacctcaaacaccgagaccaaactcttaatggttgtgcattccaatcctttgcacataccaaacttgttggccttggagttttttgatccgactaaaaacaattaatgcaaatcccaaaagtgaatgcaaccaaacttacgttcggtactcgtaggcacagaaaaagactatttctttctctgcttgcagcgctggtgaatgcgtgcgtcagacaataaaaccaatgagaaaacagaacaaaccaaaaaatagagagagaaaacgtttgcatggttttaatgcgttttcttaaaaa

SEQ ID NO: 7750 - DNA, 1451 bp, Heterodera glycines
ccaaactcctaatggttgtgcattcgtacacctttctcgtacacgctccacttttcttcatttttgacggcaatgattcggctaaaaacaaaaacaatgttcatacaaaccaacttacgattggaattgtcagccgttaataacacacacataataagtgtacgttgtagatgttgcatttgtaatatgcatacttccaattccccccacaccgccgcaccgggcccccggctcgggcagcgttttcttagcgctacaatttgttttacaaggaatctgaattttggggggtctaaatctgaattttagtgtttttgtcatggattttaaaaaaacaagggaacgctgccaaaaaaccaatgccccgacaaaacaaacctcaaacgccgagaccaaactcttaatggttgtgcattccaatcctttgcacataccaaacttgttggccttggagttttttgatccgactaaaaacaattaatgcaaatcccaaaagtgaatgcaaccaaacttacgttcggtactcgtaggcacagaaaaagactatttctttctctgcttgcagcgctggtgaatgcgtgcgtcaacaataaaaccaatgagaaaacagaacaaaccaaaaaatagagcgaaaaaacgtttgcatggttttaatgcgttttcttaaaaaccaatccccccaacaaaacaaacctcaatgttcgtgcattccaattttttgaacatgccactctcttcttcgccttggattttttggatcctcctaaaaacaattaatgaaaaccccaaaagtgaatgcaaccaaacttacgttcggtactcgcagttggtacatttgtagtacgcatacttataattccccccgcaccgccgcatcgggccccccgctcgggcttcctccagcgcttgagcgtgtttaaaaaaggtaagcacattgttatcccacggtagcataaatctgtaaatgtgatgaattttgagcgcaggggtttcccaatttttgttgtgcgcgtttttttgattaatattttagcgtgagtgggggatgcggtagggtggggggggggggggggttagcgcgacaattttagtgcgctgcattcagtttaagggacgaattcacattgtgattatgaggaccgtagaaatacacatttacctacatatgcaccaaaaatgccattttcatgcaatttgcagagagtgaaatttcaacgatttcaacgcaacgattcctcgtttgttttgcaaaaaaaaattgttacataaaaatgtgaataggtaggtatattcccgggagttttcggtgttgttgatcactagggatgccaaaaatatgcacatgcatatttttttcctggaatgcgggaagcctgaaacgcacgaaaaacatgtttttaaacctgtaaaggcaaatgatgaaatttaactgaaattgattttcttattcg

SEQ ID NO: 7751 - DNA, 4287 bp, Heterodera glycines
atcaccattgtacctcttctaatcaccattgtacctcttctaatcaccattgtacctcttctaatcaccattgtacctcttctaatcaccattgtacctcttctcatcaccattgtacctcttctaatcaccattgtacctcttctaatcaccattgtacctcttctaatcaccattgtacctcttctcatcaccattgtacctcttctaatcaccattgtacctcttcaaatcatcgttgtacctcttccacccgtggtaaacggttgtgaagagcccgcacaagcttaacaaaatttaaaaaacgggcgcgaagctcccgtttgagttaaaaaaaatttaaaaacgggcgcgaagcgcccgttcgaggccgcgaagcggccgaaaatgccaaacaaaatttaaaaacgggcgcgaagcgcccgtttgagctcaacaaaatttgaaaaaacgggcgcgaagcgcacgtctggtcacaaccaaatttaaaaaacgggcgcgaagcgcccgttcgaggccgcgaagcggcctaaaaatcactgaaattctttaaaaattcaaaatctcttcacaaccagatagctaatctaggtagcgaagctcaagaagcgcgaagcgctttccccagcgccaccctcgcatgcaacacccgctagttataagtttataagacctttcattttaatgtaaataagtgatacattattttataagcaaataattggaccaaagacaatgatagtcatatttttgatccgaaaaatgattaatatcataaatataaaattatttcaagaaattctggttgctaaattcggaaacaaaataaataaaagtaataggcaattttactttataaatgtaacattatttaaaactgctaaaatcgcaagaatagatacgaatattagcttttttcgtgtgcggaatataaaaattgcattttaagtcaagttttaacgcgttttgcatgcatgaatttaataaaattaataattggttttattttactagctgtgcaccaacaagttttggtatgtattgagaataataaaaattttaattctttataagtttataagacctttcattttaatgtaaataagtgatacattattttatcagcaaataattggaccaaagacaatgatagtcatatttttgatccgaaaaatgattaatatcataaatataaaattatttcaagaaattctggttgctaaattcggaaacaaaataaataaaagtaataggcaattttactttataaatgtaacattatttaaaactgctaaaatcgcaagaatagatacgaatattagcttttttcgtgtgcggaatataaaaattgcattttaagtcaagttttaacgcgttttgcatgcatgaatttaataaaattaataattggttttattttactagctgtgcaccaacaagttttggtatgtattgagaataataaaaattttaattcttatatacgttatattgacaaggagtttcgttgctaaaaccattttctcccggccgaaggccgggagcgccctgaaagtagtggaagggtcttacaactttttgaggagcatccgggaaaactatagagaaaaattcagcgcggacgactgagtcccggggaccgatttctcactttttcttgcagtttagggcctgtaactttttttctaaaacccgaatcaaaaagtgcccgctgtgagggcactccccacaactgtcctctacatgctggtattttttatttttttattagagccaccccctggcctgcacgcttggctaattgaagtgtgctcaaaatgtacacttcagtaccaggcgaataactcgccaggggttgctttgaccgaaaaattgtttctgagcaaaaatgtgtagtatttgaaaggctatccaaccaagttttaaaatttcgaaaattttgaaaatttttcgagctaggcctaaaaaacggttttcgggtttttgaattttaggattttttaacgatttttcccagagaaacggagaccacttccaaaacatagtttttcgagctctatcgactggtatttttttcggaaaaatttcgattttttcccggaaatagaaaaaatttttggcctgagcgggacatttgagtcccgggtccataactcgtcaggggttgattttagcgaaaaattgtcttagaacatttttgtagagcattttaaatgctatcgaatggtttactacatgatgtaaaattttcaaaaattttcgagctaggccccctagaaattttcaaaaatttttttggggtcgaaaaagggtgtgaaaaatatttttctggggtaaaataaggtgctgagtacgaatatgatgtctattttaagtttcagaattttgggaattttttaaaaattctttattttttggcaattttttggccctcgggattttggcctaatatttgaaaattcataactaacctcagggtaagtcaattttcatacaacaaagctttaaaaatagagaaaaatcaggagaattttatgggatttatttaggttttctaacatcaatatgaaaaaagttattccagaaattctggaaattttagatttttcagaaaaaaattcgtaactgccttctgaaaagctatttgagaaaagtaaaatactacaaaaatccgcaatttttttctctataatataaattttattttaaatttttatcacatttttaaaaaaagatataaaaataaaagtgattttgtgattcgggtccaaaggggggagcacatggtttttgagtggaaaaatttttctcacaaaaatcttccaaaaatatgtctttaggggttatttgggccgctgatcacgaatacgtgatcagattttacttttgacatcgtcaagacctcagaatccctgtgtgattggggattctgaggcatcattttgaggggggggggggcaggttcgaatccggacggtgtaacattattttttttgtgcatttttacgttattttcaatgaatttaattaatttaaaatattttgttgagttaataaataaaaaattatatttaatttaattttttttttgataaataaattttataagtttaaattaattgtttttttaattgatagaatttcatgtatttttttaattaaatttgttaaaaatattttcattttaatttaatgaatttactaatcactgttgtatcaatttatatttaaagatttgttgtaaattaataataaaagaatttatgtaaaaaataacaattatcttttaataaagaatttcatatttttttaattgaatttataaaaattaatttcatattaatttaaatattcaattattgtacatttcaaaattctctttttaattaataaaaggaataattaatttattttttaaaatttataataaattgcattcaatttttgtacctcttctaatcactgttgtacctcttctaatcacagttgtacctcttctaatcacagttgtacctcttctaatcacagttgtacctcttctaatcacagttgtacctcttctaatcacagttgtacctcttctaatcactgttgtacctcttctgatcacagttgtatctcttctaatcaaagttgtacctcttccatttacttttgtacctcttttaatcaccgttgtacctcttctgaccaatgttgtacctcttaaaatcacttttgtatctgttctaaaatttaaaaaacggccgcgaagcggccgaaaagaacaacaaaaattagaaacgggcgtgaagcgcccgtctgagtcgatcaaaatttaataacggccgcgaagcggccgtcaaagcccaacaaagtttaaaaacgggcgcgaagcgcccgtccaaggccaacaaaaattgaaaaacgggcgcgaagcgcctaacaagctaaaaaacgggcgctaagcgcccgtccaaggccaacaaaaattgaaaaacgggcgcgaagcgcctaacaagctaaaaaacgggcgctaagcgcccgtataagttcaacagatttagaaaacgggcgcgaatttgtacctctccaacaattattgtaccttttcgacagtggctacacctcttctaatcgctgctagacctcttctaatcactgatgtaccacttctaatcactgatgaacctcttcgaatcgctcttcaatcgctggtgtacctcttctaatcgctgttgtacctcttcctataccttttctaacaaatcacgcaaaattaaaaaacgggcgcaaagagcccgaaca

SEQ ID NO: 7752 - DNA, 2020 bp, Heterodera glycines
ggcgtcagcgtcggtgggcgtttttccaagctcgaacgccttggtacggctgtacttgacaccacacgaattccatgggtttctataaggggccaaaaatttttttagcaatttaacgattttttttcaaaaataaactgttctaaaactcctctagattcttgagcaaaattctaagatttctgcctaaaatttggctgttatttttggtattctttttccttctacagaggaaattttcgttttttacgcctcgaagcgtcatttttaagctttgtcttgaaattcgtacaataattttagcttcaatcgattaaagagccacgccgattagtctcaaactctaaagtatcgctttaagcatatcgggagtctggatttgatttcccgaaacattccattctcggcacttactcgcaacgtgccggatcaggtcggccttccacttgctggtacggttacagtacttgcacttgaagggctgcaaaaatgaaaaatgccgaaattttttgcgtgccggtgccaccaccaaccaaccctttccgcggtgtgcacccgcttgtgccggatcatctccgacacccatttgccctggtagccgcacactgagcacatgcgcgtgcacacgtccggatcagtttccatgcgctgaaatttcgggcaaaatttaaaaattttccagaaaaaatcccaggcttttcctcctcgccttagtctcctgctcgtcgtccggcaattcgatggcctccgtttcgctttggtagcgccgcttcatcggcgtcggcatttgctccgcccgcttggccaccagtccgtccaatgtgttgtccatgttggccaccgggcggcgccggcggcgcgacgaattttggcccaccggcgggtgggccaacgcggcggccaaagtttggcggttggtgggcgcagcggcgcaattcgccgcgggggacggcccatcggcggaagagacggaagaagaagaagaggaagaggaggaagaagaagaagaagtggaggatgagaaaagcatctgaagagaaaaggagaagaataattgtgaaaatgattaaatatattaaaattaaattaaacttaattaaaattaaattaaattttaattaatttttgaattttaattggagaaaaggagtccaatagcgaaaattatatcagaaatatattaaattaaatttgaatacataccgtatatactctttttatatgccatggtatattatttttcaacctcttcagaaaggggtatataattggaggccggcagattaatggagactgggagattatttttcagctgatttatttagtggaaaatttttgaaatttttttgatcatgtcgccaaaaatgtcatcgcgtcaaaaaaaaaatgatttctattgcatttctgttaaacaacttctgagaattgaccccaaaatggcaaaaatgtgtcattttcttgcttccaatatggataaaaattgaaatttttaatggtgaaagatggacgaaacgatcacgaagaagccttttttattattgtgcacagattttgttcgtaaaatgagtcaaaaaattagagccataaaaaattggtctcgagtctcgggaaattttcggtctcgatagtgaaaatttactatttcgacatttttaggaaattcctaaacaaaaatgcaataaaatcaaaaaatacacccctaagaaacgacctaaacattttggtaatactttggtttgtcccccctatttttcaaaaaaaataaaaaaattttaaaatcgcttaaaacatctctcctggggtttttggggccactgatcacgaatccggcatccgtttcgaatttcgaaccccggacccaaattcgaacaaaaatcgaaaatttatttttcaccaaaattcacactgcagcgactcgtggtcacaaaagacgttccaaatgaaagaccgatggactggacaacggccaatagattttgaatggagaatcgcacgactgccaacgaacgaccatttcgtg

SEQ ID NO: 7753 - DNA, 2899 bp, Heterodera glycines
tatataattggaggccggcagattaatggagactggcatataaaaagagtatatacggtattctttgcttgttttttttgttatgtttttactgaaaattgtatttttgactacttttggctcataattttgccattttttgtcaccttttcggatttttgtcaaactattttcgcgtattttcttcactgtttcgttaactatgctgagatttttggcttcaagaagctaattatatccaaaaatgatcatttttttcgttaccctaatgcggaatattggcttgacagccatgcacatgttataacctttttggtaattgcctaatcgcgaagcaataatttaaatacagcttctaaacaagataataaattgtgaatgtaattccgactacaaacctttcgaggaaatggtcatttataaatttagaaatagaaattctaattaaaaccttcatttagttccctggctattaggtcaatatttagtattaggttattcatttcaataaaattatagaaagtaatttcatcagtaaaaacataacaaaaaacaaacaaagaataatcgaggtttggcaaaatctttgaaatttgcttaatgtagaatattttttcgaaatttcgatttctccacttcggccatctccaattggaaatatttttagacgatttttttaaaaaagaaaaaataataatttccttaaaaaatttaaaaagaccgttttttagggttacctttttaatttttattactttaaaataattggtcagtagatgtaaaaaataatgaaaatcaattttcatgtgtatattcgtcgctcaacgaataaattgagttgctaaaatcaataaattggcgtaacgcactgtcatattgattattttatacaattcattggcactaaaaatttagttttagaaaaaaaattttcattgaaatcattattttgcaaaaatgaattattataattaacattttttaataatataatttataaatttttgcatttaattttttgagatttaattctttagataatgcagaaattagtctttccattagtgaatctttacaaggacaattgccttcaactgatgcacgaaaagctgaaaaaccaacaattggacacttgggcacaactgaaaaatgccattttgaaagaaaaggaagcgaggtaaaaaatgaagaaaaattattattataaaaattaactttaaagagagcaaaaaatgaaagaattaatgagccaaaaaacaaacaaaattagcacaaagaggccgaaggaaagggtaaacaaaaatatatacaaagtattagatgtagaccaaaccctaattgttcagggaatcgactaccattacttctatcggtttgatgccaatgcgatcagttgccgccactgtccgtaccgccgaccggcgcaaaagaacttgaagccgaccagcacgttgaagagccatctgaagacgcaccatttgactgtgttggagcagtacagaaggagcaacgacattttgaaggaggacagcggaaaagagcaaaaagaagaaggaggaggaaccatcaaaacagaagcaaaacaatgggagagcagcatcaaaacggaatctttaggctgacagagccctaaacaaatcaaatttttaaaaaatcattggaacgcaaaaaacgggtcggtgtcgtttcggtgcccatgttttggtgccaggcccaagtttttgaactacaaattttttcattgtcaatcaaatccaacaatttcggtatcattcgaagcttaacatatttcgaagctgtttataagctatttgcttctcgattagacaattaccaaaaagttcataacatgaaaattaaaaaaaacccttaaatttagaacttttttcttagtcacttttttacatactaaaaatctttttgcttttttaagactaattgagcatatgaaggctctcgaatgatatcaagattgtttgaattggctaaaatataaaaagttgtagtccaaaaacatgagctggcggcgtaaatgggcgccgaaacgaccctttccccaaaaaaacaactcactctttctgcatggaatttaaattctcttgtaattcaagcataatcatttaaaaaaagacagtcaacattttcatttaaattagggttcagccccgagccctcgggggcaaaaagtcgggggccggggacctcggagggcgacatgtcggggcggggaggagctcaatcatcgggggtcggggaccccgatcggggaatgaccaaattttattttaacccaaaaaaccaatttttctttttaaatgctcgtaaatcaacctttttttaactttaatcatctgatttcgttagcgccactaagagtgagtccaagctggactttaaaccaaggtttccatttgttcttatttatatgaatgttctgattttggggtagcgatgatttcttaaatatacttatagtaattttatggcataatgtcactatttttcaagaaattttatggtctgacgcaaatttttttgatcttttgattcagaatgctatgaaattttacaattttgcattttcctccccaaaattcttaaaattgataatgggagactaaaaatataaaatttgaaacatttttgatcaaataaattgtaaaaataactgatttgaaaaaatgttcttatttttgagcctaaaatcttatatttcggggttggtgttcatggtggaagccctggtttaaaatacatggaaagggggaggggggttaaccgaaatttttgcgaacccgtctcaacatcgaatttgaccaccattttttgcggcgctctttttcaaaaaaacttttggtgaacagaagaggggatgggcggcggtgccgataggcgccgc

SEQ ID NO: 7754 - DNA, 1331 bp, Heterodera glycines
ccccccccccccgctcaattaacctcaatttgtatttattaggccccaaatcatcgagcaaaaatgcgttttctatgttggcctggtggtttaacgatcagaagttcactttcggttactttggcttcaaattgtccaatttggccgttgtcctccttcagctccatctgttgaattcggtgaatttaatggaatttccatttcgaatgacctcatatttagtattttgggcccgacgatggccaattgtcgtccccttgggcgctgaatgccctagccaatctttcggccgggcgcgagtcgccgcattttccgagagtgattttatttgcccccccccccccccctccctcttctcatcattttatgggccaccggtaagaatggagggctaatttgtaagtgaaaaataagtgagtgaaattggagtaaaggaaaaaattaaaaaataataattgatatattactgccaattgttcaaatggcctagtggctaatctccttgactttctacttctttcccatggttcaattcctctacagaaatttaaatattttgatttttttttcatactcatttgtttactatctacaaaatatgattcctctattttttaattgtactagcggggtcagcgccttcggcgcatcccccgctaggtagtacgaatgtgttatgaacaattatttttggagaaaggataaagtgtgaaattaaaaagaatgacttacttttaattgtgttcgtactgtcttgagcaacccaaagaacaacagatttgtctatacaaaatcaattctaatactatactaaatctaaatccaaggttagtctaacacatatctaatcactgttatctaataactctctgtacacgacattcttcacctttctctctaaatttccatcatctaatctaattctcaacttattccaagcccttgctctcgaaagagccacatacaattgtccatggctaaacacatctttcctcagatcaattccaacttgctcaagggtttgaccttgggctttgttaattgtcattgcaaaagctaacaccaacgggaattggtgcctatgcaggtcaaaagggtaatcttcagaacagcaaagcgtgatccgaggaatgtacacagtctgacctgccttgtctccagtcaaaatcttacacacaatcaaattcggttgcatttgctcaactttcattctcgcaccattacaaaggcccatttctatattcaaattacgcattaacaaaacaattgaatttttcttcagtctcaacttatgccgcggaaaccctgaagggtttaaagcattcaaatac

SEQ ID NO: 7755 - DNA, 2276 bp, Heterodera glycines
  unsure (1)..(2276): unsure at all n locations
ttcttaggttttncaaattttgttaaatatcattgaaatttaatgattcataaataattataaattataattttgtttatttatttaaaataaattttgaaaaattaaataattaaaatggtatttaatttaaaaatttaattgcaattgtactccctcaaaaaaaggtttttgtgtgttcgccgccggcgcttcactgatggcactgtcactgcttgtaccaatgttggcccaatgctgtggtggcacgcgcatggccgcgttcacttccggcgacaacagccccaacgagccgcccatccgcgtgtacccgtgcggtgccggcccgaccgggtcgcgcttccgcgttgtgcccgccaagttcaccggatcgcacaaaatttcgccgacaaagtaagtccttttcttgggcgggaagggttactaagaaaattaggtttttttatttttattttaaagtttagagtttttttgtatgagatgatcattcttagagttcgacttgggcctctggatccaagcctggataggtccatgacatttcggtaacttggattttttcctggacctagatttttctgaatttttgtccaggaaatacagaacccacgtggaatccaggtacacaaatccaggcttttttttcaaaatgtcgagctctaatgatcacaatgaaaaattcgcttgttatgacacttaactcatggcaaagtactgattctcaagggcgttcttgaaatcactaaaatctttacaaatgtattaccatttatatttgaaattcctcttaaacactgtctttttgatttgccaagatttatttatctaaattttgaatttaaatttagaaaaaaattcttaattttcgcataagacaatatcaggaagcaaccaatttcaccaaaaattatcaactaaataaaatttgtttttatattatttttaatattttatttgttttcaacttttatttaaaaattgatacttttcctaaaattattttaaaaacatattaaacataaaataaattttttttgttttcagtgccggccccgtgccggtgatggaggaaattgccaaggtgcagccgggctccaagaactccaaagcggtgtccccatcaattgatgaacaactgttgctggaccaactggtggactcgacggacgcaaagccattaatccgataaaggcgccaaaaattgaatttgaattttttttttcacggcggtggtgatgaggacgacgacgacgattggcattgggcacacaatttcccccccccaaaaaaaacaactaaaaatggcacaattccatactatttgttctgtgggcgagcgtgaataacaaaaacacagaccaacaacacatttaatcataatcaatcatccccaatatgtttgatgaatgaaaaatatgttttggcgttttgattaggtgttatttttgaatttcgaaatttgaaaatttaattatatggtaggggcacattgaatattcaaatgatcataaataagcctaccaacttttatagagggataatatgggccaaaaataaggtaaaagtcccaaaggatacgcagagataatgattttatatttttaatttttttgttattaattattttttaattcttttaacaaactttgatttctcataattattcgaaaatttctcactcgttattattaattattcgtattttaaggtttttatttttagcaaagttcaaaccctaataactttctgaatagtttgaaaacaaagagcataaaactcaaaaaaaacccaaaaaatttatcttcaaaaaagttaattattttcgtagatcactaaactcaaatgaacaaaaagttaattacacaaatttgcattttatcaacaaaaaaaagattttcgtgtctttttgcaatcataacagcatcatcaaatcacttaatcattcattcacattcatcttttactttaactttggtgactattagctgaatttgggtcaacataataaaattaatcgtctgctctcctgtccgatccggcacatcggcttttccggttcccttcagcggctgagtgggtcggatggaaaggattttgcgggaaaaattcgcgcaaaaaacgcaggcgccaccgtcgcccgagggcatggtgcgaccggaacaaaaagcctacgccgctttatccacggcattttccgagctttatccgtccgccattttttgcgccaacaagttaaattcagcgtagttacaaggcacatcatcaaattttcgggg

SEQ ID NO: 7756 - DNA, 1479 bp, Heterodera glycines
tcaatatgaaacggatgagctaattgcacgcaatttggccagtgcaattattgcctaattataaaataaaaataattaattaatttcagctcctccaagcagtgaaaagcaaaaaatgcgatctgaaacatatgggcacaattctgtactgtgcttcacaaaatcaggcattaaaaattttgtcatattattagcatttatttaaatttaaaaaaatggaaaattttgaattttattaaaaaccaaagaggggaccctttttggtttgatttaatatgaaaatttattccagggggttttgggggtccctgatcaccaatcgacacatattttatccaataaacgacttcctaacctaaacctaaacaaagaaaaaaatcataaaacaagaaattaagtcataaaacaagaaatttgaattttcgactttagttcaagttcgggtaagggattagatttggtcaaaatagatgtctgatttgtgattagaacaaattttcatacattattatcacaaaaattttgcaacccaaaagggtctctttagttttttaataaaattcaaaaatatccgcttttaaactagcgccaaaatttttattccaatttccaaataaaaatttcattttgcttaatgaaacgaaaatgtaaatttatattttacggctatcaatttgagttataaaataaaaaaatatatttaaaaaacattttaaaaattttatttcaaataataaatgtaaaataacgcatttaaaatgaaattgaattaaaaaaataatattttttttgccaggataaccgcaagtgttgctcgcatttgaatttgtcggatgcaaaattgggtgttggcgagcgctgcttgcgcttctgcgacccgggcggtgaggccggcatttcatccattgcccggtcggatgtcacgtgtctgttcaattggaatggtaaaaattaaaaataattaaaaaataaattgattttggcattaattaagaggccaattaattaattaaaagcaattaaattagtagagaaataattagtagataaaatcaaaaatattttttgactaaaaaactgaagaatttttgattacaaaaaattggttgttttttgtgcttttaatgagttcaattattttctaatcatttaacaaatcttgcaaattaattgcccctaattagcgctttgttaatttagtgctgatgtattgtcaccactcaggcattaaaatggtgtgaagtttgatgatcaattcaagagaggaaagaaatattgtaaatggtttaagccatcgaaaaatataaataaatttgatttaatttttttttttttttgtaattttatattttttctatgtccaattttacatctcattagttgtcagattttcaatgcattttatttaattgttataaatttgtgtaaattaattgcttccatattttattactatcttttttattatgtttattttat

SEQ ID NO: 7757 - DNA, 2271 bp, Heterodera glycines
cccaaaaaaggtgtgcatatttaatatttgcttaaataaacttaaaaagtacaataaacaaccaaaaaatggggtttaaaacttaaaaatgcatattttttattgttgttcgttgtatcaaaaacacctccaagtttgccaaatttcgaaaaaattctcattaaaaaaaaaagaaatgttcgcaaaaaaatgacgaaaatatttattgaaaatgccaaaatgacgacgaaaactcaaatttttcgtgttttgtggggtgtaatttttaaaaatttccaaaaagttgatctttaggggtgtatttttcgttttttttttcatttttcttgtgaaaatttccaaaaaatggccaaaatatggactaaaaacccaaaaatggcgaaatatggatttattcccgaaaacccccaaaatatggatttatatggactaaaaaccttcaccaaatcaaaaaattttaacgcagaaatgctatttttaagcccctttcttcatagcatatgcgcagaaaaaatatgttaatccatataatttacaaccctagttataatcattagagcttataaatcaagcagaactttaaaaataaaaatttatcaattaaaatattaattattcagattgtttttttttgcttttatgaattatcaaattgaaaaataaaatttttttatatatctggcgaaagcctgaaataatgattaaacactgtcaaaaatataaattttcgggaatttcttgggttttcaattaatttttttaatggactagcaaagtaagaatttttttactttataatttttgatgaaaaaaaactcttagattgtatgattatttttttcacttaagaaattccattaagaaattccttcatctcacaactttttcttttaatatttaatatttaactatttaatttattcaattttttttcaacattacattttggcatactgtcgccaaaacaaaattcaaaatcaaaaataattaacattttatcaccaacacatcatctcatctgcttgtgtgcccctttccactattcattcattctttttcgttcctctcatcatcaatcagtacgatgacggcattcccgggatcacattctgcggcacaaaattgggcatgaggggcctacgcgttgggcgtggacgaggtcggtaagttgggaattttgtccaacgagttggacgagttgggaaaaagggaggaggcgtgcgccaacgcggcgttgccggctgcagcataatggcaccgcttcgatggttgggtcgtcctcctccgccgccgcccttgccatagtttccgttgccataccatggcttgtttccccatcccttgccgttgcttgatcccggccacggtctccccggcgggtattgcggtggcttggttggccactgtgttggctgccaaggcagtggtgttggcctttgggcccgcatttggttttgttcttcatcctgttccgaatttggcccaccatcatcattggcattggcaacaattacctcatccgaaagttgcccttgggcccgcatttcgttgtcctcctcctcctcctcctcgaaggcattggcaaaaggtggggggagaagaagaagcaaaaggagaggaagaagaagcaggcaaatgctgaatagcctcattttgcggggatttcgtagttgggattggatttggaatgaaagtgattggtggagggatttgtccactcttaaatactccaaaattgatctggggatggagagacttggccaattttttggattttatttcctttgcaataaaaaatttatggattcataagatgggccaatattcgtttaggcaatttttgaattttaataaagaaaagaagaaataaacatttagacaaaccatttgaattttatcatttgcccataaattgtttttggacaatgaaatttattgttttttaatatattcatttttgcatttttaataaaaattatttgctaaattcaacttccaaatttgacgccaaaatgtagctcatgaaaacaaatttttaaataaaattacgaattgacgggttatttgatataggtgtccagcccgtaacccctacccgtatgagtcattcgaaaaattttggattctaatattttgtaatattgtattataaaatttttaatttgctattatttagatttaaatccaagccattttgccgttccgcttgtttatttatcaatattatcaacagcattgcaacaacagatcagagtgattttgtgaccgatt

SEQ ID NO: 7758 - DNA, 5836 bp, Heterodera glycines
  unsure (1)..(5836): unsure at all n locations
tttttacataattagttgaccatccctgattgcttcatccagtttcttaagacatttctatgtgttttcaacttttttgcaatttcattgtcagttattttggatttttcaattttaattcaaaataaattttaattttttcttctttttcttccttaattattttttttgcagcgaatttcaaattctttcttccaattcataattgattcataactcgtgccaattttcttgcaaatttcggcataattttggtcccattctttggttgaatattttcttttttgcttatattcatttgccattgaaatgagtttttgtaaaattacaattttttcttcatttgattttgttttgtaacttttttgtatttgttgattaagccgtaattctttaatccatttttgaatatatttatgatttgtgcccaaatttttgctatttttgtattaattttactccattctttcgctgaatatttttttcctttttgcttaattttttcctttattctataatatttttctattatttctctttttttagtcaatttcgttgtttttattctttttcttcccatttttttccaaatatttcaaaaaacctctattagaacggtcccccatcagctaaatttggattttgacccttaaagaccggaaaattttccgaaaaagtcattttttagtgtcacatggaaccaactcagaanctggcgcagtggcaggtcattccataggcaactcatccacaggcaactcatccacgtgcaactcatccacgtgcaactcatccacgtgcaactcatccacgtgcaactcatccacgggcaactcatccacgtgcaactcatccacgtgcaactcatccacgggcaactcatccacgtgcaactctctaggcattgagtctatataaattcttttatttaatcattctgatttttacaaatagcctctcatatgagtcgcaacacggagctgaaaaaaaaattggtctatgagggtcaattttactaggttagagaacacctaggagatacaatttattggagatgtgaccaatttccagcgttgaactgcccaaagtccgcaaaaactaatgtgtttaaggggtgctaggtcgtttcttaaaaactgccaagttggcgctacggtcattatgaactaataagaaaaccacaaaagataaattaattattttcatttttttctgataagcttattataattaatatttccctttgaaagttgcaaagaaatattgaagcacttattgtggcacttcattttttgacacatgctttgtagcaccagtaatatggttttgcaactttaaaaaggtttaaataaagtattttaaatttattatacatttttaaataatatagtcgatgattgctgttattaccatgatttatgctatataaacaaaatctaaaaaacgctacgattgcgacaaaagcttttgcaaatgtttgtatgaaagtgctgaatgttcattaacaaaagtctgttttatttgtattttaaatagtttattgtagagtgcccacgggaccgggacttggtttgcccaaaattcccggtcccgtggcactctagtttattttttagaatttgttatgcttgtcagttcatgtttttggtgaacactttaaagaataagaaattaaaaaagaaatacggatatataaaaacttatatcaataaaattttgataaaaatatttctctatagttgttttatatttgtagtttaattctcgcccacttggcaatttttaagaaacgccccagcacggctaaaattaatgcagaataattcaaatcttcctcaatgatgaatgggacttgaaaaaaaaagattcaaaatttggtgaaatattaatttaaaatttatgtgtgcaaagattactggcaaatgatgacattggattaaaaaataaataaaataattttttatgataaattgctcttcaactgtcaccaagttgtgccataattatttaaatatatatatatataattttaattttagctccaacttgtcgcactttggcgcgacattgccgttgtgtcaaggcctttccaacaaactgtgctgctcccattgggtacaaccaccgcttcaactgtgccaagacggaggctgaagccaactgctgacaatggtgcgcaactgcagctggcatcaaatggttttgtggcatgctggcgaacggaggagcgggtgccaactgatgtgcacgagacggcacaatttcggtatattttacggtaccgattcggcaaatgacataattccgacatattttatatcaatttcgggaatcggtacaatttcggtaatttttacggttccaattctcgggaattggcacaattttggtatatttggcgatacgaaattcacatgccttgggcttttaatttgtttggcaatgcattagctttactcctgctttgcttcctcaaggcttcgtcttttttccatcgctgatgacggcaccggcacactggttcgtgccctgcacaccaactccacctgccatttcttccggaatttgccggatcagcaccaacagttccagttgggcattgctgatgttggcacaagtgagacaacagtaacggcacaaattccaacgccgattacaacaacaccaatagcaacaacgacaccaacggtgcagagcagtacaacgggagcaacaacggatgtaatggtgctgaacagcaacaacaaaattacatttgacgaggatgaactggtgctgaacatcacgttgcagcaagttcatggtgttgaacaatttcattgggaaaaaaatagagaaagtcagcatggcattttgaaacagatggagcacccggcagaccaaatgccgatgcaatggtcactttgctgttctccgatggcaccggcttgtacatgttggacaagttggacgactttgtgatgctttccgagccgtccaaaatcgcatttgcgctgaacagctcccagtcgatcaccgcactggcctgtttgtccgagacagaattgttggttggcctatccgacggcgccatgttcaggctgaacatcggcgaatggttacggcattttattggtaaaaaaaattatttaaaattaaaataattttttttaaatttactgtcaaatttccgattcaataaataataaattatttatttcaataaaacaaaaattaaatctcattcaagtttctattcaacaaataatataattatttatttcatttgaaaaaataaacctaaaaatgttatatgcttttttaattgcaaatattaataaaaaaaaaaattacgattatcctattgtagtgatttgtagggatgggatttttaggctctaaaaactgccaaaataggtaggctttaggctctaaaaaaccccaaaataggcaccaaaaatcctcaaatttagggggtgtaaaatgacaaaattttattcaaaaaagtaaaaaaaaattaggccaaatcagtattgagataaataatttttaaagcacaaattcttgtcaagaacataaaaaataaattttggagatgaatttttgaaaagtttttcatttctgtatgggtgtatttttgaaaattttcgggtcgattcttagggggtgtatttttcgtttttattgcatttttgttaataattttgggcaaaacgccaaaatagccaaaaataggctctttcaaatttttttaggctttttaggcgctaaaaataaaagcctagaaaataggcactaataactcgaaaaatagcttaacaacagcccaaaaaaacatgtttttcgtgcgtttcggaccacggggagctcaggaaaaaaataggcttttgcctaaaaatcccatccctagtgatttgctataattttatgcaatgctaaatttttttttcaaatccttttaaaacaaaacttttggcattatgtgcatgtttttatctaggctccaacaatgtgaacccgtccaatgatcatcaccagcagcagttcatcaataatactatctcaccacaaaatgtggaacacattgttcatgttgaacggatcaaagcagcggacggagtgccaataacacaaattgttgtctcagagattacggtacttaataaaattttgaaaaaagaatactgtaaaaatttatttatttattttattatttaaggaacgaatttatgctgtccgcgacaaattgggcattatgcgatgccatttttacacctgcgaaaatgccacggttttaacgttgacaaattcgccaaacttcatttatcggctagccgaagatgcttggaatgggtagagaaataaatacaaaattaattaattatttgatctcggattcaattagaacaaataaaaaggcaattagcaacccaaaaaaaatgaatatttaattatctattttaatttaattggttttttagatttttatattatgccacaacggctggcgatgtgttcaccacaccgatgctgccgttggatgcgagccaaaattattcactgtccatcacgcgtcgggtcgaaaataattattaaatattttaaaattaattaattataaatttttacgtattttaagttagctgaattaccagctgtgaacagtttggaagtggatttggctgaacaaaagctgatcactgtcagccgcacaggacaactgatcagtgcgaattttttatttgtggaacataaattagggccagcaaaatcagtggaaaaaacaaattttattttaatacaggtcccattcttaccgatcacctattaaaaggctgttaatttttttagaaataattcaaaagcttttccaataaaaatttttgtatttccagtgtctttatcaatataggtttcaaaagggattacagtaactgagataccatatcctagcatattaagtacaaacataaattatgatgacaggtcgcgatctgatcaacggtacggtaagggacgagcgcgagagttggacactcagtgacgcataccgtaacgttgtacgcgcacaatcctaccgtaaccgactgttttggacgtcgtcaagctgcggtgactcacacccatgggaaagctgcttgttcagcgaggaatttgatcacgctaacaaggctgtacacctcagcaaatagtgcgtaatgagaaaatgataatttttatgttaaaattattaaaaatttaaattttattaattttgttaaatattttcaaatttttgttcgtaccacctgcagatttttgttaaatcatagatgaaaatcacttaattttgccaaaaaataaaccatacattaaaagcccaagaaaactaaaatttcactaccgaatattaaatgcttttttagttttttaaaactcaaaataaaaataaaaaacaataattttcgtaataaaattaaaaaattttcacgtatgattaattttccttaagcttcaaattttaaaaccaaaatatttttcattgttcgaaaatgttggctaaagtttgtatcgaactgttaagaatgagagtttttaattaaacatttctgatattttccgtaagcccgatgcgttttttaattattatttttgaaatttgtaaaatttaagtttatatcccgggccggtcaaggaatttgtgttgttgaagccattcagtgcgcctccatttatggtgccaccttcaaaagttggcttaataatgttgaccgattcggatgcattgttaagctggcgacctccaacatcattaccatttcaaggcaaatatttctttaatttttatcttataattaaattggcattaaaattcttt

SEQ ID NO: 7759 - DNA, 1400 bp, Heterodera glycines
ttcgggaagaatttgcgcaaacaatgaaaaacatgtatgaaaatacgaaagatatcgccaaagaagaaaaggtaaaattggataaagcaattgaaaatgcggcaaaagatgtaaaaagaaaatatatattgagaaaaaaatataatgacaaatttggcggttttatttcggcgccattttcataaagaattttggagtcataaaccgagctttttgcagatcatttctatttcctgtttttgcattctttttcttttaattttctttataaatttttttttaatttttaattttcgtttcgtgtttcgttttcatgaaaaataaatattttcgttttctttctatcggtaaaaggtaatgaaacttgcttatcatcaatggggagaagcaaaaaaaagtatcactgataaaaatttttattaattattatttaaattttatttactgaatgttaaaaaaatgttttaaaaaggaccaaaaattgcgaaatattcccaaaaagtcaacatatagagaaaaatgtccatatgtcaatgtaaaaaatcccaaaatgtgtaaaaatggataaataaagccaaaacttttttctcaaacgcaaaaaaagaaaaggttttcttctatttaggtcatatataatttagaaaaacatattcacttaactcttttattcgaaatattgtacaacaaaactgcgtcaacttatttaaattttaacacatttataaaaaatcagatatttggtttttgcgtttttttgcaaagctcccaaatttgcaccttttgtgaagtggccaaccacgagttatgcttatgaggggtctgtatcgttttggcgccgacattttggcgccagcccaagttttcggactataacttttttcattgtttagcgaatccaacaatcttggtatcattcgaaagcgcaacatgtttagaattatttcaagctattgcttcgcgattagattatacatgaaaattgcaaaaaagtcaaaatttttgaagttttttcttaataacttttttacaggctaaaattgaataagttatttaaatcctttgaatttatttgcatgaaaaaaacacttatttttaagactttcgccactattttacccttttgcgcgtctatttcgcctaaaattttttaagtctttctcacaaattgccatattttcgtgtttctcttcaacacgtgtacagcttcttcttgactcatagaaaactgcgatgtgtgtgcactgcacggcacaattttttaaatatgtgttggagaacatctaattaagtgagattttttgattcgttaatttatgtgcgactaaggaaaatgactctacaaatagcgaaagttgtatctttgttcctttttttaaataatcagtagggatgcgaaattt

SEQ ID NO: 7760 - DNA, 1565 bp, Heterodera glycines
taattggggacaaataaataatatttacgtaaggcctttttttgtgtgtttttcatcatcgtatgaagctcattaatatgtacgaaaagccaacaaaaattgccaatgacgcaaaaatattgtattatttggcattcctcacaaataaggaaggacactcatatattttcaacaaattttgatacaaattctcatattattattaatattcttgaatttaatttaaataattatgcgatgggtttttggatttattaagcaaatttttctttgaaaatttctttatacaataaaatatgaaaattagatttttatattttatattttccacttatagttaacttaacattttaaatatttttgtgaatttttaaaaaaatatttttttgtcatggaattagaaatttttttatctgtctgatgtttattgtatgtgactaattccactttaatatgagtaaaccaaatttagaaacatatttaaatgccggagaatttattaaatgatgaattattattatcaactgattttgtgagtgatatttattaaatttaattggcttacaaaatattttaccattaagttggctaattatttcaatcaaagtgtaaatgcatccattaaagtgccattattgatgactaatggcatcatttcattgttctgctttgttggcattttcctcaacgcatcgcttgtttatgtgaccacaaaaacaaagtatgaatttaatggtttttattttttataaaatgatttttcggaaattaataattacaatttataatttcaagagaacataaggagtgatttgcttaatcgatttaaaaaatcaaggacattatgtcaaaatgccgtttttcaggattcctaagggccgatttttaaaaattacccgggtcctgttctgttccgatctcttcaagttttacactataggcctatcaaaaggtaccaaaggccgaaaaaccctaaatcggaatccggaaaaaactttttttttttttgctgctttattttccattttttgaagagggccgacggtgtcttaagcacagtttgtatttttaaaaattatgagtaatttattaatttaaagaatttgaggaccaattttaaacaattctaaggcatcgcctcaaaaacgggttttgtataaaagctaaaatttcgttatgaaaatatttctcgtaagttttcaacaacaaaaagtcgagaatcgtaatccacaaatttcgctcattacttcggcaccacgcgccttttaaatttaattgcattatcaaaattgaacaattttgtttattttgcacactcattgtgcccttttgctggctttccattcgctcactgttatccccgtcctcctcggcatctctttcaaattcttgcttctcctctccggtgtttaccttgtgccattgctgcgctgttatcacattctgttggttggcttaatctgtgccggtttgtgcaccgctgcgcaattggccattggctacgatcgtttgctcagtattttggtcccaatatgggacagctttttcacagcgacgcatattta

SEQ ID NO: 7761 - DNA, 1753 bp, Heterodera glycines
aaaatttgcattttttgttcaaattccccttcttccaagtttccagcagtaatatttctactctttgttcccccccgtggttggccgatggacaaaaagtgaaaaaatttgctaaattttaaaagattttattaattttctcaaaagttatgacaattttccagtttttttggcttgaacttttgaaaaaattaataaaattttttgaaatttaccaagctaataacgcaaattaagggctatcgtatgattaaggtataagcagatgaacggcagcaaaagatcattgtgcattatgatcactttatgctttgtaaggacgggctatttaaatgccaattatttttttgcggtttcaatgaggccaaaaaagtaaattgacttacctaattaaagaataaataaaaccaactaattatatctttgtgtgttaggctggtcatgtgctgttttgacgacattgtgcagccggagattagtgcgtttatttaccgagaagggctgacaatttttgttgccgaatttgcgtgttatgcactgatttggctggtgattttatgccgaaaatcgcacggaaatttttttataaaattatttttaaacaccaaatcaaatgtttatttaggtaggaggacaacaaaaaaattggtgaagccgttgacatcgataatgtgcatcacctttttctgctacattcaggcaaaatataaaaaataacacagaaacaattgaatatttgttgaaaattaagtttttttttaaatttgttttggtgcttctagggacgtatttccatatgcgtatttgcatatttgtgcatacttcgcatagtgcatattttgtgcacatattttgcgatttattatatgtatatttttggtacacaccaattccttttaacgaaaataaattaattgtttttgtgtaaaaaaccactagaatttcaaatggctattaattaggtacggtactttttttaagaaaaatctttgacttttgaaaaatttgggcatttcagcatgaaaagacaagcattattttaataaaactttaaattttctaaattatattggtgaactttgaatttaaaataatttttcgccaaattaaaactattttaaaatgggccatttataattcaacacattttctttttcaaaatgatttatttatttccattttcttttaagggaaatctgtcacggattattttgccacacttaaattttgatctgcttggcattgagttctatgtgaagtttccgaccaaccttcttttcacgattgcttttagcagtaatgcgccatttctttatatgttcaggtattaaaaaaaattaaaattttaatttaatttatttattttattttattttatttgcagcactgaccatcaaaaggcattccgttcacaattcaaacggatctttggcaaaaacgaatcaaagcatttaattgttgcattcgctaattaatttcatcgaaatttttaaaggcgcttcaaaacaaaaacaaaaaattgactttcgattactaatttttttgataaaatttagcattaaaagctcttacctcaaaatcgaagctttgcgctgtctatagcataataattctgttggttttatcttcaatatttattctaagtaccagcttatttttattttaaaatagaaacagagggtgctatgacgttagtcaaaaaaccatcaaaataaaaaatattttgatataacttatctaaaaagcaacaaaa

SEQ ID NO: 7762 - DNA, 3778 bp, Heterodera glycines
tccttcccgcattttccttcactttcccatctctttatctccgttcaatcagtcattttcttatccatttcatttccatccttcgccatccgcgttatatccatcattcacttcattttcacatttcgttttattcaccaatacgtgtggtttaattacccaagtttgagatgggagaataaagtaattctggataatatttggtcgccaatgatcctgggagggcccgcccgtttcactatgccttcttcgccacacaattttaaagttgcaattgtcggcgctgggcccagcggtctcacagccgcaaggtcagcagaagagatttgcaaagattgggtcaatttcagacaagctctgctctacggctacaaagtgcgcatttttgaaaaggaacaaaatttcggcggcgtttggcgcctcgccatctcagaaaatgcgcaaagtgaattaattaattagataattaacaatcaatcaattaaattaataatagccaattaattaatgaattgattagctaactaatataataattccaaatgaaaggacggcccgtgcctttgcaaagtgtgatggactgctcaaaacagctgtgtgcctttagtgaactcgccgttgctgaacattttcccacttttcttcgcccttctgacgctgtcgcttatttggagtcgtacgtgcgaacattcgaattggcacggcacatgaaacttggcacggaagtgaggagaaaaaaatgggaaaagctcttccgttttgtgcgctttaggttaaaacgattcgccgatcggagtgttggcaaaagacagataattagcgggggattggcaattaaaccaatggattaattaattaatcccttttcaagccgatggattgtccaatgggcggacagtgaacagccgaacaacggcccatcggaaggacagcgactggtcgaggaactgttcgatgccgttctcatctgttcgggcgcccgcctaaggcggtggcgccccccggagtaccgtatggagagggcgttcaaagtcgaattcgaatttcctccgccaaactccgtcccctccctttgcttagggcacagttatccattcggaacagttcacacattcgtccgactttcgtggtcagactgtgtgcgttgtcggccttggtaactccgccgtggctatttccattgcattggcacacacagccaaacaggcactttatgagcttggctttttgtttccttatgcttcacattgcgtgagctgacctttcattttttgcttacattttcaggtgtttctgtgtactcgtcgtggtgaatggatattaccattgcttcaatccgacggacagaagccatgggattggcctttcagcagccgatggcatttttggggtcgccgatgggtgccgaaatgcctccgaaatttttgttgggaaatgagtgcccaatcagtatcaccagactgttcacaaaacaacggaattgggcgaccaatgcatcgattgctgaggtgacaccgctaaaagacttctgcggaatggcctggacaaaatgccaaagtttagtgccaatttgacatttggagctgaacagctctgcccactgcttgcttccggccgaattcgaattcgcccaaacattttgtcattgtccgactcgaatttggtcgaattcgccgacagaactgttgaacaacacgtggacgcgctggtcatctgcacgggtttcgaattcgactttaatttggtcgaacatggcaaacctttgcgagtgatgcacaacgatttccatttggtactgcggacaatcaaatccgattttcggatttgccattgccttcactttttcacagtataagcatatgtacgcgccggagttggcgccccaccacactttggccgttgtcggacatgtccaggcacctcttttcacacccttttaaacaattggattgcttaagccccgcgggggaagcatttggccaattgccgaactgcaggcgcggctgtttttccacgtgctcagcggacacacgcaactgccaactccctttttgatgaaggccgaattggagaaacgccgttgtgccgtgtccacggaaatgctaaagacacgaaggcacacacagacggtactcggcactgatcactttttccactcgacttctttcactgataattcattttccgcttaaggaagactttgtccaatttatgtctgaattagctgccatggtcggtgctcatccgccccctctcaggcgcctcttcggcaccgatccgtgcctgggactgtctttgatgttcgtctattcaattacttaaatatcccaaaatggcaaatgcttctctcccagggctggcccctgctgtagtgcccaattccgtttgaatggtgcccattctcggcacggttatgctcgtcaaacagtcatcgaggtgaattggcaaaaatgaaatgctcaaattggttgtactcctcgtcaggttgcccgtcagagcggccttttctctgttcggcattggcttaactttgcttccgtccacgagcttctgttcggctgtctggtggctcttttgttcgatctttttcttcgattccttcttctcttttttgcttgactgcttctcttctaaacttcggcacttttgatgggctatcttttgccaaatgtcccaatttgcttttgtccatctgttgcggtttctctcttttttcctttctctctctctctctttttctctttctctttcaacatattgtaaatcatttccattgtttttgattgaatgaaaattctcttaaattgtcgcccgttgggcttcaaaagcgaaagctttgagaatggaaaaggcgggggagggaccccattcagtgaacaacttcgatcagctgaatgaatgggcatgccgtcaaggtccggtcgatgtaagcattccttcgctcccccccccccccctccggcgatggctcattcgccgtgggaagggccgccacttacgaaaccattccatttgccgtccatcaaatgcggacacaaacggagtccgtccgcctttgttctgttgctcccggatcgtcttccccatgatgatgatcacttctcctaatgatgatgatgctgctcactttccctccccgcctcccattgtccctccctttcccctcattttcttaccgcccataatttgttttggcatttaattgcgccacaaaagcattaccaaatcaatcgccagccaaagtatcggccgaatgcctcccatacccaacactaaagttccattaatgctcatgtgccggtgtacggtactgttcctcggctactgtgttctgtgttacggtgccgacggctcaaaatacccaaatgaaataattgacacgccaattgtaagctgtgagcaggaaaatattgtggtcaaggtgggaaaatgggaaggaaattaaaatcaaattaaatgtaaatttaattagcgaaaaataaattaaattaattgcaattattaaagatacgaacttcgagtgccaatccttcgcatatttacgcgcaagactttcacgaaacggccaaatgcatgtgagaggaggggggggggggggggggagagaaggaattggaattgggaagagtttagggtccgaaatcagaacagaatcgcattcccacacaacgattgcggaatgaccagggaaagactggtgagaaaagggaaaatttgaatttaaaacggacaaaacgaacggggaaaacccggcaggaacaatgtatcgcatctgtct

SEQ ID NO: 7763 - DNA, 3377 bp, Heterodera glycines
aaagggtactgtggacggacccgaggtgagtgcagtacggtagcagagagtttaatgtttattgcgaaaataaattgatgaattgatactgcgaaagaataaaacacggcaatgttaccgcattatctacatattgtacatgcacggacggactgatttaagtacggtgtcaggtgcacgcggcggtggttggcgatacagtattccatgtgtggcaatgcaacaacgaaaacgtgggaattttagtgcagaattgccacgtggaagacttacagggcgacaaaattctgatcattgaccaaaacgggtgaaattggcacaaaacactgaaacgaattaatgaaatgaaatgttttgttcagatgcggcgtcgaccaatacctttttcgaacaccgcaatactcagatgatctgcacaccgcctttctggtaaatcggaaatgcaattcccaattggccattgcctcagcaatcgagcgtatttaaatttgtggacaaatcgatgacgcggttccgctgccaattgcgtttgtgtgtgaagaacagaggcaaaggctgcgaaaccattacggtaggagaacacaattacggtagaaggaaagagcagagaaagagagagattgagagagagatggaagagagagtgagagagagatggaagagagagagaaagagaagcccaactcggatgcttagccgccttccggttgtccatctgtggacgattcgtcctcatccaccgacgcgtcgccgtcgtccgccccttccgctgccgtcgtccattcgtccgtcgaacaacaaccgtaccgtccgcctccgccacagtcgtattctcttgacggagtcagtcccccttccggacgcattgaaccgccctcagatgccattgcgcacggcagaagcgtggtcagtgaattttccgaagtttaaatggttatcgaattgagctggctggactaaacgacttacttaaaattcaacataaattacatttgcttaggttagcggtggcactgaatcagcttcgacctcatcggaaccgcctaagcacgacgaagtcgaaccgccggtggggccgccatcgattcgaccgtatgggccgggcctctccggcaaatgggcacccggcccgcaaattgtgtccggaaaggcgtctgatcaggcggagaacagcgcgacacttccgtcgagcaggtccgtccgtccgacctaattaagccaaccggaaaacgtccccttcctccctctctctctctcatctcctcatttgtcagttatccttacctccaccgcgaaaggcgttcggccacattaatgatttacggcgtcgggccatcccaacggttggcacctccgccgttgggggcgcgtgccaaaagacattttggcaaactaagtggggacagcagtggcacggcggcaactttggtgaaaagggatgccatggtgcaggaattggacgtggtgggactgatccgcgtgttggacagcccggacgacatacagtacttcggtttgttgagcacagtatttattatgatgactcatagtctctgtctcgacttagaaaagtctgtgggttttgcggcttctcatattattaaaatttactcgccatttaaacttttggcttctattatcagccgatcaccaaagtggcgccgttgcacaacaaaagcctttaaacagcagcgaaatttcgccattttttgccggggacgacagattaaatgcgcagccgctgcagacggcgccaccgcaacgcattgtgccggtgccatcggttggcactgcgctgccccgacagattgtgcgatcggctgccattgagcagcgcctttctcagccaatgccacggacagcgggtaaagcattttttacatttcaatgattctttcattaatttattcactttccactccagcagaattgcggaattcaaatgaccaaagtgaacgcacttttccccccgaggggtcaatttgcgtgtcaattggggcttttcgtgagtttttgcgtcctttttgaaaaaggaaaaattctgccgaaggtgggctcgtgttcacgattggcactctcttcggcctccaattgtgcgccgttgcactggtgctaatcgattgctttttgatggacggaaaattcatacaccaacggttgcgaaaagtgttggacagcaaaggctaatgatcgaagcggtgatcagggctttatcaatcattgatcagatgcgactttgatcagtttttttatttattcttcattttttatgtctatttgttttttatcagagagaaaaaaacatcgaactgaaaatgaaaaatgaatgataaggacaaaaggtttaattgcttctttcccgaaaaatgccaataagccaatttatggatgaaagccaaagagaagtgagtgacgacgacggaagttctaattgattgattgagcggactaattgattaattgttagtggccgagcgattaagcggaaatggcagtcggtggaaaacaagtgaagcaaaagctaagctattgattcttaagcatttcagcgattgcccatccctacgacaaattaagtaataaacggagggagaccaatcaaacgattaaacaattgacgaatatatttgttttattcaaaaaaattgccaaatttgacaaatccatccatctgcttagattttttcgagagtacgacttttcttcggattgactcaaaccgaaatccaaatttccaatcccagcggttgctaggacgagggacggggccgaaagagagggggaaggaacgggagaggagtggggggggaggcatcgaatacgtggaggcgggggggggcgaggggaattcgcgatggatttatggtggcggcgtacttaaaagccgtgggttggcacaaaaggtaactaattgacgagccaaaaacatcggtggtatttgcaggcaaacttagcaacagagcatcaattgcatatgaaaatatgcaattaagctcaggtcaacacatgacaattaatattttcatgtcaaaatttaaggaattaattaatgagttttagagcaggcagaactctcatttttatgtgtataattaattttgtatgtaatataataaatttttgtattttaatttatatcattcaaaaataacagtttttggttttccattcctaaatattagagtgccacgggaccgggccgggaatcccggtcatccgaggtcccggattttgaaaagttcaggtcccggtcccggtagggcaaccgggaaccgggaaaacaagcactggtaagaatggaggtataagtgtgaaattagtgatgaaaattagagtcaaaggaaaaataaaaaataataattaatatattctttaac

SEQ ID NO: 7764 - DNA, 619 bp, Heterodera glycines
ttttttttgaagccataacattttttggcgaaatgttcaaaaaaaatttttcagtaaataatcggtcgaaaaataatccccccgtctccatttatcaccccgtatctaataatcccccccccctttctgaggaggttgaacaataatccccccggggcgataattagagcaaatacggtagttttgtggattttcatacactttctgcgaaaatttgaaattatgaatttaatttttttaaatattttaatttgcctttttaatttccttcgcttcattttcgtcgtctccgagtgcccaactcattgcttggaccttacgaattgcttcaacagtatgggcttctttgggatccggaaagaaacgctccaccatgtccggctttgtgaacacctatcaaaattgaaattgaattaatcctaattaaccattttaatttttttggccaaccgatctctcgtcacctcaatactttagcccccgtccccctccatcccacgaaaatgggatattaatagttattaccattttttgttaaacaattcacctgttgcattttctttgtatgagcaatagcaaatacatatggaggagtcttctaaaaatgcataattaaata

SEQ ID NO: 7765 - DNA, 4659 bp, Heterodera glycines
aaaagcataacagaaattatttctgtaagatttaatttggtggtaaatgctttcgagcaaagcatataaaccagggctgggtataactggattttcaattacagaatccgtaattatggcgattttctcagttacggaattccgtaatctgtaatcagtaattttcaaagatttagtttttttttaaaataatttcttaatttaatacatcctataaacagtgccgcgggaccgggaatcttgggcaaacccgggaccgggaccttttcgggttgaaaaaccgggaatttttggctgggaaaaccgggaaaaaaccgggactagtcccggtcccggtcaaaaccgaaaagattgcgccgggtctggcggtgcgggtatactccgcttaggaaaattttgaagatttgaatgtaatttgtaaaagattttggccaaaattattttttgtcagaatattaattttgaaaaaacttattttaacatttaggaaaatttattaacaaaaatgtaataaaaacgaaaaacacacccatacaaatcaaccgcaaaaatttcagaatatatcccaagaatcgaccctaaattttcaaaataggcctttatgaaagaaaaattttctcaaaaatttatctgcaaaatttattcatttatttatttgcgtaatccgtaattaagctcagtcctgatgtaaaccaaactattaaccctacctgcatacacgtttcctcggggctgcaaactttgccttgttttccttcactcttttcttgtttcaagtgtcggaaatatctaaatatgctttttacatattattcatattaataataaattttattttaatatatattcttataactactatatccatcaactttattttaaggaatttaacatcgctaataaaagaataaagaataaaattttaataatttttttaaaatttaaccaaataagatataaaagtcacaattttttggaataattgttaaattctgaaaaatttttatctgatatatatatatatatatatatatattacttttcaatgtcgtgaggcaatagaaaacccctctcaagtagttttttggcggccttaatatagtaaaattggataaatacttatataagttttttaattccggaggaaataaaagaaaatttcttttaatttttaaaattattcattattaaatttgaaccatttttattgcttcgatcacttcctttttgctcattgccagttttaccgcgcagaaacgatcatcgagtaaagattcaattttcttctttgtatcctcatccaaattatcttccgtataattcatgcgctttgctttgcgccaattggggtgtttttttaaggtgatctgtcaaaatgaaattttctaaataaatttacgctatatggttacatttttgcatagtttttacgctcttttttaattctgaatttttttaactaataaaggaacatcccaagctatcagtctggaaaatacatataaacgataaacattggatagaacatagtcattttctatcgtgaacttttaattttagcggtaaattttgcctgcttcaaaagttacagagcctcaaaaagtataggtttaagtgcttgagggcctttcccgactgcagagaagcgaaagagatagagcaaaatttgttggtaagttggttcatttgtatttttgggggtccgggttcaaatccaaagtgaaaatacataaatttgaattggatcttaaacaaattaattatgaaaaatacaattttatatataaattatagagtaaaaaaatatatatgttaaaagaaataaaaaccagtcattgataaatagagtaaattcgttataaagtgaaaaaaaattgaaaatgagcccataggccagggctgagcgtgcggaaattacggcctttttggaccccgtaattacggcttacgggttacggatttttgcgatttttccgtaatttagacccacaactggtactttggattatttttcgagacgagttcctgcaagatttttttataaaacaattttttcaatttttatttaaagggctaccgtatatttatttgttaacaattaagaatcagacttttctttataatttggttatttaagacaattgcctagaaaatagtgcaccccttttttcttcgcctctatttttccacatttacagattttggaaaattataacataaattcgactttaatgatccgtaattttcacataaaattaaccctgaaaattcaaaaagaattgatttttataccataaaaaatatataaattcgtctgaaaaaatacggaatccataattgagaaaagcgccgtaattacggattagggattttcgtaattgaaaatgcagttacgcccagcccttccatagacaccaaaattacaattttttaggctctgtaacttttgaaggaggcggaatgcagaatgcaccgctataattaaaaattcaatataaatggacctgcactatacaatcactatacaatgatatatcgtttatatgaattttccgagtgaccgatcggaatattggattcttcaaaatcattctctgctttagttccattattaatttttgcccccaaccgattcattcgccaaaatgtccagatgtacttacataggtcagcgccatactacgtgcctgcagcatatctgtgtagccgccttcagtaccaccgtgttgttgttgctcaaatattatcccagctgcaaaagtatgttatcaatattaatgtataaaacatataattattgtcatatttctctccattatagctgttatattccctatacaatctcttaccaatctttatatctatataatggatacactcctccaatgtaaattccgttgggtagcagtggaatgttgaacctcctggcggattggtgctgatggacatcttaataaattttattaattaagtggtcatttaattttccaggttgagctgaaacttattgaattaaaaaatgggtaacaaaatatagccctaagaaagagaccaagaatactgaaatataaataaaattgcaaattatgtatatgaatctttctatattttccaaaataataacttataatataaactttattgatttttaagtaaaaaggcctaccaagcagaatttttcatttcgctatttttaaactttttttacctagataaaatcattatttataaaataaaagaaaaattttaaattaaataccatattaaattcagttttgaatacaaaaattgctgtgctattttttatgatttttcataataaaatttttgctttttagaagcttgaaaaaatttcaagctgagcatttttagaataaatttaagagatattgtattttacaacatctttgcttattacttttataaaataaaagaaaaattttaaattaactaacatattaaattcagttttgcatataaaaattaatgcgctagttttttatgattttgcgcattaccaatcgacgaaaacaaacaagtttttgtgacatataataagcctttgcagaaaaataatgaatttgatatgaaacaccataaaagaaagaaaggaaattaataattcaatttattttacaatctgaaggattttttttggatttgcatcaaaatttgtcacagaatcatctgttaaaatgctaaagaaattgggtagaattgcaaaggcaaaattttaaaattgggcaaaaaagcaaaattaattaagaatttttatccttatttttcaattttaaaataaaacatctttcgtccatagtataatcccatcttttggacttttatccttatccgctttctttttatcatataaagtttaatattctctttaaacttacgtttaagaactgaaagtaaatctctccaatttcgttaatagccaagtgtgcacactcgtgctcggcaacttccaacagcccaattgcattcaattgatggtataggcaaagaatccaaatgaatctaaattttttcatagatatttaataaaataatgatttttgttttaaaatccgtcctgaatacgtatgaaattctcgcactctaatttcaaatttttaaaaaagttccaataccttcctttttctgaataagctttcttaactaaatataagcctcaccggaatattccacccattttgctgattttgtttgagaacgatccatctaaaaactaaaatgaaaaatcatttcaattacaataaatctctaagcttaataaagttatttatttagaaaatagaaatttcatatatcaaaacgacattttttaaatttttattagaattccaatattaaggattttaactaagttgttacctttactggctcttttgtacaaatgttcggttttgtgagcactgagataagaaaaaaagtgatatttaaaaatttgtatttttctaaaattaattattaaagcaagcgtataagtcgcagcagataaaccaagctgattctggtccggcgccagtctagtctaggtaatgaaaagaactcactacggtatagtagtgaaatgatctttctctttttaacgggattttatttttaaaaattaaccgaatttaactgtcagatttctcatttattagaaatttt

SEQ ID NO: 7766 - DNA, 907 bp, Heterodera glycines
  unsure (1)..(907): unsure at all n locations
aaaagaaaaatttaaaataaaatacaatataaaatcaggtttggaatacaaaaattgctgtgctattttttatgatttttcatattaaaatttttgcttttagaagctgaaaaaatttcaagctgagcattttagaaataaatntaagagatattgtattttacaacatctttgcttattacttttataaaataaaagaaaattttaaattaactaacatattaaattcagttttgcatataaaaattaatgcgctagttttttatgattttgcgcattaccaatcgacgaaaacaaacaagtttttgtgacatataataagcctttgcagaaaaataatgaatttgatatgaaacaccataaaagaaagaaaggaaattaataattcaatttattttacaatctgaaggattttttttggatttgcatcaaaatttgtcacagaatcatctgttaaaatgctaaagaaattgggtagaattgcaaaggcaaaatttttgcttgtaatagaagcttgaaaagaatttcaagctaagcatttttagaataaatttaagagatattgtattttacaacatctttgcttattacttttataaaataaaagaaaattttaaattaactaacatattaaattcagttttgcatataaaaattaatgcgctagttttttatgattttgcgcattaccaatcgacgaaaacaaacaagtttttgtgacatataataagcctttgcagaaaaataatgaatttgatatgaaacaccataaaagaaagaaaggaaattaataattcaatttattttacaatctgaaggattttttttggatttgcatcaaaatttgtcacagaatcatctgttaaaatgctaaagaaattgggttgaattgcaaaggcaaaatttt

SEQ ID NO: 7767 - DNA, 1455 bp, Heterodera glycines
  unsure (1)..(1455): unsure at all n locations
aagcgtataagtcgcagcagataacccagctgattctgtccggcgccagtctagtctaggtaatgaaaagaactcactacnnggtatagtagtgaaatgatctttctctttttaacggattttattttaaaaatntaaccgaatttaactgtcagatttctcatttattagaatttttaaaataactattgcttagagttgagcgggaccgggaattttgggcttaaccgggaccgggaccttttctggttgaaaaaccgggactttttgcctgggaaaaccgggaaaaaaccgggactagtcccggtcccggtcaaaaccgggaccttggtactcagttgtactcagttgtccgtgtccaggtcccggtcccgctgcactctactattgctgaattaattcactggtgaaaggcacgaaatccccacaatattttttatttttctgtgaaataacagcaactctttttacataatattcgaataataactgattaaatttgtaagccataataaataaaatgaaaatgattacccacatttgcagtaatttttgtggctctaacatcaaaaataaaaaatcacaccagaaatgattcattaccgaagcatttgtgacagcccattaaactaccaatcactgactaatgcatatattaactggcgaattatccttaactgatgtatgtctactgacggaatgtccattgatcgattgtccattgatgggttaaccgtaaaaataaagttgattttcaaaacattctagttaaaataaattcataaattatcaaatagaattatctttacatttttatgaatgaatatttattccattatttttttataaaataaaacaaattaattaagttttttagcaatttaaagtcagtcaccatagttttaaaagctattttattttaaaaattttgctgacgtattgtcctctagacggattatcgattgacgtagtctttactgacggattattttctaaaggattgtccagatgagattttccaatggcggattgttagagagccgggaaatatcggattcgagcattatcaatcagtcggggttcggagttttcaatttccacctttaaacactcggttaaaaaaatcgactatatttaattaattgattaaattttaattagatgttttgaataatataaaatttattaagttaatttcggaaattgatcaaatattttcttttccatgcataatgatttaaaataataaaatgaaaattataaaattcagataaaaattgattaatcaacagatgaaaggcttgaaaaggtgttgtgaaaattgtaagaaaaattagggccaaaatttgcctcgacaatatcaccaggattttccaatgtcacagcagggtacaaatcatcagatggagcacggaagaattcgaagttactggaataaagattttatgatttaat

SEQ ID NO: 7768 - DNA, 5338 bp, Heterodera glycines
  unsure (1)..(5338): unsure at all n locations
tttctgccgcacattttacaaatgtcaaattgaacctttccttttttgcttctccgaatatccgttttccgtgtatagttttgatttgtttagccaaggtatgtctaaaaaagtttaaaaattttatacaaaatttttaaatcaaaagcaaaacatcaaaaataattaattttttttaaattcttatgttattaatagggattcgttttttcggcacaaaaatcacgaaatagcacctaaaaaggcagaagtgaaaataactgaaaataggcacaaaaaccccgaaataggcaaaaaaaggcattataaaagtcatcgtaaacacaccaaaccaagcggaaaatgcatttttcgtgcttatctgtgcgtatcatgtgcgccaaattttacactttgcctaaaaatcatagcccttcaaattagaaacgataaaaataccaaattaaatttttgtttatactttaattttggcaactttggctcatagaaggaattttttttagcaaatataaattcatgcctggttatagaagatttaattcctatataatgacaattaattaaaataattaaaaaaaagtttacactttattaaaatatgttttaaaaagattaaatattaaaaatataatttaattagttttgaatttgctataaactcacccatttttcccttctccttgtaatcctcataaagatcgtccataaattcggcaaatgtttggacattgttagccaagttatccgagtcccattcgtaagacgaagtcccttcaaaaatggaaaaaccgatgaaaaatgcaaaaattatagcaaataaaaatttcggtttcatgtttctaaaattggaaatataagaaaacattgaagatattggggataactgcagaaaatttctccgcttttttnaaattgtccacttttttattgtcactattaatttttagtcacgttattttcaaaaattttgaaagggttcggccattagttgtaaggccccatatatttttattaggtattgcgtaaaatttcgaaaatttaaaataaagacggtatgtagagtttaatgaaaaaatttttcggcggctccaaggcaaagccggcgccaaagcaggtttattttatatttaatttaaaaaaaataattataaatttggttttatgtttaataataagaataaattttaaaaactaattaaaaaagaaatttctttcaaaatattaagtgagaggattgaaacttgtaaatttgaaaagtcaataaaattttaggaaataaaaaaacgttatttcatggcctaagtccagttgacccttgataaaaaggcaattagattttctctttggccttcttatcactttcttgagcattaaaatgaaatttttccagcaattagctggttttgagtttaatccctttttaattgatcaaggcatattgatgtcccaagctcccgctccaagtttgagaacgcgtaacgcccgcggagatactcgggaaggactggtcgtgaaccggagatcaggccgaaaagagtggggacggggaatcgggattggcttaattttaaaatggtggcttctgctcccgtcatgcccttgttttacgcagtccttctgtcattgtttgccattatgtccacgtggattataatgacaatgattgataaaaattgaagcccaaccaggcaaacgtgtgaatgaatgaatacaatttttgaatgcttataataataatgcattttttctttttcttatgctatttcttaaataaaaatgctctttttcttttccccattatatttcgcttatttaaaatactctttttctttagtgcctaataattatcatccttttgtgctatcctttctttttcttcattctttatgattgtttccatgtgatgtttgcactttcatatattagaattagggcttccttttttaggcaaatgcctaaaattttgcgcacttgatacgcaaagataaggacgaaaaacgcgttttccgcttggtttggggtgtctacgatgacttttataatgcctatttttgcttatttcgtggtttttgtgcctaaattgcctagtttaggctttttgaaaaaaatccataagaaaaatgcaataaaaacgaaaaacacaccccttagaaatgacccaaaaaaaatttcagaaaatataccattaagaattgaaaaaatttaaaaaaaaatgatcccaaaatttaatatatttttttcttaataaaaatttttggtttaaaattttgtccttattaataatttcatttgcaattgaaatatttaagtttttacttgtttaataccaaaaaagcgtaattaaaaattttttttgcctatttttgtacatattttaaggtttttgtgcctatttaatgcctatttcgcgattttttgtgcctaaaaaaggaagccctaattatcatcattgtgtgtatgaattaagaatgtccagcaggagaatatgaccataaatgttagtttcattttatttaaatttctgttttaattttattattttacctttattcattatttatatattataattaaacttattttcaaaaataaattcataattagggcagtcggtttctaaaaaaattaccaaatttcagactccaatattgcattattttcttttattctaataggaaaagttgatcatctgcccagaaacaaaataggaaattacccatttatctttatcagcagggattcttttttatgtaagaaaaatcgcaaaatatgtataaaaaatgctaaaatatgtatgaaatatgtacaaaaagaaccaaatatgtacttaaaatatgtaaataaaattttttaaatggtcttttttggaaaaaatcttcgtaaggggtgaaataactacaaaatgccctaaaaatgacctaaataggcttagaagcaccctttttactatctattttttgaaaaaaacgatttttaggggtatattttcaaaaaaaaatttaaatttttcatatgaaatttctatcacttctcaaaaatcctaaaaatatgtacaaaaaattgtgaaattttgggtttctttgggggacatttaatgaaaatttccttaaaaaatcctcaaaaatttcaaaatatgttcgaaaaaatgcgaaaaagtccaaaatatgtataaaaatatgtacatatgtaatatgtagaaaaatcccgaaatatgtaaaaatatgtaaataaaagtcccttgttcgcaaacacaaaaaagaaagtgttattcctactaattaggctattgagaatccagtaaaaaaacatgtatttacataaaaaaagaatccctgtttatcagtatacgttcagtcggtactatggaaattcaaaaattttccaaattattcttgaagaaattcgaaaccaataatatccactataattgagtttattcgtctttattttatgtatgactcaaaactttattttatactattttggcagtttttagcaactacaaattgcaccactattcataagttttttttacacatattttactggggtcacatttttgaaatttaatttattcgatcttttttttgtacggcattggcatttctgctaatggatttattgagactaatccaatcgatgcaatggaattgcggtggcattattagggcacgaggacacaaaaacaacaaatataaataatccacaaatgttccattcttcgcaagcaattttcagtgtacgtgtgcttttgccaaggcacgtcggccgcagattaaatccaaaaaagacactattattaattaaatggggggggggaagggattttcgccggcgaggcgataaaattttttgtattttttttctgtctttggcattcgtgacgaacgatggacgacgacggcacacttttcacctttctaatgaaccgatttatttctaggaagggagacaaagcttaggtttttgcataagaaaatttcaagaaaaatatattttttaaattttcagcgaatttatgggaaaaattattagtaatttatcataaattttcaaaaatccctaaaaaattgtttaaaaatttttttcatggtattttttttatgaaaaaatttactaaaattaaaaaaaatctcgaactgaaaatatttttaaaataaaatcggtaggtcatgaaaaaacacattccctggacctttcgggatcactaatcatccatcaatccggctaccgttcgttttcgctcaatcccgaaccccttaacccgaactcgaacaaaaaaacgaaaataaacattttcgtatttgtgctctagaggatttaatttatgtctaagttgatgccagaatctgattctacgacccggaaacccttaacacaattttctttgaaaataaaaaaaaatattagaaaatttgggaaatttttggggcattttaccaaaatatttaagcataaatttttatttttaaatgtttaatccattaaatttgtgcctaatgaatgtctgaatggaatgggctgtgccttcagtcacactgagcaaattttcatcattgaccaccggaacaacaacacattgcgaagggcaaaggcaaaaaccaacaacggcggtggcatgggaattttgggccatattcgccaaggtgtgccaacaaaattttgaattttgtattaggtttggtgtccgaattcgtttcaaaaaatccccaaatttttttttgtgaggggggggggctgagaattaataaattaaaaaacaataagtttggaggagtttggcaatgtttgggccaggataaccgaaacaaacccgagttccgtggcatttttcccagaatgtacagaccaggaacctctaaaagtttcctgaccctgttttgtccggtccctagtcacatcatgaggtgtcgatcgatcccatctctttgtcgggtcctaccgcgaaattccgatcaatccgatctcgattcctatttttttccattcccgagctaccccaaaatgcctaactatgtacatatgtattattctcctctaaaagcattggcccattcgccgcaagtgcacgtcaccgcgcattggctgttggcctccagcaaaagtgaaaatgacattgttttggtgggtgttagttactgtacttatttttttaaattgttggcgttttgattgtgccgtcaattcaattttttgcgacaggttggccatttgaaaagcaatgggctgcacaggcgacagcgaagaagcagcagcagcgatgtccgcttcattgagcatcgggcaaaagcgcgtgtgccgtcggtggatgagccaaaggacaattaggggtgggttt

SEQ ID NO: 7769 - DNA, 5453 bp, Heterodera glycines
tgttgtgtcataaggaaatgccacaagaaaataaaagagacaatgaaaatgccaataatgttgtgtcataaggaaatgccacaagaaacaagaagagatgatgaaaatgccaagaatgttgtgccataaggaaatgccaagaaacaagaagtgatgatgaaaatgccaagaatgttgtgccataaggaaatgccaataaacaagaagagatgatatgataagaaatgttgtgccataaggaaatgccacaagaaaatagaagagacaatgaaaatgccaagaatgttgtgccataaggaaatgccacaagaaataagaaaagacgaggaaaatgatagaaatgttgtgacataaaaaatgccaataagcaagaagagatgatgaaaatgccaagaatgttctgccataaagatggcttaggaaaattagcggcggatttcacagccgaacagatagacaatgttaattgtttatcgccaaattcaaattaaaaattaatacttggcggcacaaagcggcgctaaacgacgaatcattcattcatttcccgtgttggcacgatttttaaccgaggacaaatttaaaaaaaaaattaaatcaattcgttcacatatgggtacaaaatttacaaaacatgattagtgggtgtggtaaaaaaaagagaaaaaagtctgtgctctgatggaggtaattaaatttttgaaataatatataaagatagggatatctccttagccgggcggaggtggaaggcacgagaaagacgtagagagaaaaatgaaactgaagagaaaatgtgcgaaaacgagagggcagacagtcacagaaagaagagagaaacggagtttgccaaccaccttgctaattgggggtaattagcacattaaaatacatttaaatcataagtattatcctgttttaataatttctgtcttaataaatattattaatttaagaaatggaacaggaatttgacctaaattaaagctttagtcactttaaccagcatatttaaaagatgcttaatttggttaaacaaggaagttataaaataaattaaatttatgattcaaaaatgataaaaaacaaaatgaaaacctttaaaaaacttaaatcccaaaaacgaacaaaatgaaaagttttaaaataatttaaaattgtactttaacaaatgaagaatttaaaataaaataaaaaaatgtatgcaatatttttgtgaagtttgtctggatcattaaaaacatgctaataatggcaatatacgcaaaagcatatccccggggaaaatcgggaaataaattcttttttctttttctaatgaatgttctgccatttaaaaacgaatgtcaaacatatcacccagttcatctgggttaggccacttttacaacaacttgatcaggtcaatcactacttcatggtgaccggaacaccaaaatacattgaaactcgggaaaaatttcgaaaaaaattcccagggggttgtaaaaatttttctataaaatcagtaggccttatccgatttatccattcccattcaaagttcatctcccttcctcatcaaaattggttataagtgaaagaaattgattgatgaaaatctggctgaacactttatttggaaattgaaattaatttaatttcaaaaaaagtttttctttttgtttatttctcaaaattttggcgcatcaaatcgaagcgtaaatcctccggtcggcctcggcggcggctgttgttgagcacggcccccaccagcaccaacatctcttattggacgacggttctgctcacttttagctggccactaaataaaatatttaattaaaatatattaatttttgcataacctaaaaaagtgcgaaataaaataataattttcatataattattaaatttaaaataatattaaaacaaaattttaattaaaacacaaaaaaatattaatttaactttaacagaatagagaattttaattgtatttttagtgcaaaattcacagttggaaatgtggagggatgtgccggttttgggtcgttgttaaaccatttgctgaccaccgccgtctcggcgtccaatcgttttgacgggttcagcgtgagcagtcgaaaatgggggaaaaagcaattttttttcattaataaaaatgattttttaaaaatttttatataagaatatgcacttgttcagcagctcaaagccgtcatcatcaggcagctcggcggcaaatttcttcctcaactgattgtacggtgtgtccgcaaaaacgccggttttcatcccaggcaattccatacagccgggccaaatttgctcattgggtgtgccgacttcctttgaacaacaaaaaataagtgtaatttattttggtaaaatatattatttttgactaaaaaaattctaaaatgacagacaaatttaaaaaaaaaaattttttttatggatttaaaataaatttgataattttttcagtgtagaatttcattttccatcaaaatttgacaatatttaaacagataccttaaaaattttctgcatttgatcaatttcggtgcggcccggaaacagcggctcaagcttcagaaactcggcaaaaatgcaccccaccgaccacatgtcgacaggcgttgtataaagctgaataaattgaacaattaaaaactaattactagtaatataaagtaattttttccgttacaacgcttggacactcgtcaagaaaaaataataatctcttggcccaaaaaagccatacctttgtgcccagcagcagttcaggcgcacggtaccacagcgtgacaaccaccggcgtgtacggcttgatcggatcgccaaactcacgggccagcccaaagtcgccaatctaaaaaaaataattagattgttttcaaagtttcaataagaaaatttctgaaatatttgccctcttcttattttttagaaaaaaaaatccggaatatgtaaattatatttttgttttcagaaattttcatagtctattctgaaaaaagagcgatagagccaaccaacctttaatattccttgatgggacaacaacaggttggacgtcttcaagtcgcgatggatcacgtactggtcatgcatgtacaaaacgccggcaatcagctggcgaagaagcgttttgacttgcgctttaaacaaaaaaatttgtataaaatttttggtaaaatcttaccaatttttttttggaaaaaaaaaatcttaaaaaacgcacgaattgtccattttttgttccgcgatttcatcagctcaatcaatgccttcacatcgtgctccacaaaatccattaccaagtaaattttgtccatgctcgagccaaccacaacttcctgccgattttaggcgtaattattattttttttttttgcaaaaaatgtagaaagggtgctcacccgaacattgacaatgtttggatgcgctccacacttaagtaacatgtgaatttcgcgcagcgatgtgatcggaaagccctggtgctccttctccattttaagtcgattcaacgccacaatttcatctaaatttttttttttttttggttttgctacacgcctaagcgaggtgaaataccaaaaaattttaatgagtcatttaataattttaaaactcaacctattgaaaagttatataaacaaaaaattgatcccaggttttggtgtaaaattccctgacaaaagttagcaaagcaattgctcacgcccctgatttttttctctcgaaaaattgggcaaaaaacggactaaaaaataatgccctatttttagttatgaattttcatataaaatttaaaattgggacaccaaaaaaatatggtggtcatacccacccgtccgtttgttctgcgcccggtacacaacgccaaaagtgccttccgaaattttgttcaagcactcatactcggccacacttcggcacccggaaatgcccgggtaatagacgggcagcatggacaccaaacggcgctgatatttgtcctccttttggctgagcatttcaggggatagctgcaaaaagtaattttttattttgaaaatgaaatttcggtactttactgttttggagtcgcagggcaaaattttaaaaaaaatcaaaaaaatgccagcaaattcacaaagcacgggcagcattattttgggtacacaaagtcaaactgaattgtgtgaatttgcgcgcttttttttgttgatttttaaaaatctttgttgtgcgaacccaaaaagaaaagtaccggaatttctcatattttggtttcacatcaccgccatttttcacggcgatttatatatatatatataaaaaaaaataagtttttagattgggaagtgtgcacatcaagggtaaccagatttttagcttattttcgagttttaaaagcataaaaaatttgggcagaaattagtatatattaaaaaaaaattttttttaatatatgacaaggtctatcacaaacttcaacccatcaaactcttccaacaaccatttgccctttctcaccaatgccttctcctcctcggtcaactgttcaaactctttgttctcgatcagctcatcatctccaatgtccatgacatcatcctcctctccgtttgtgttcgccccgttcatttcggtgtccaccgtgccagcccgtgaccgaaaatggcgctcatccatgccaaaatctgaaaaattgtggcaaatcagtgtctgggccgcaaatattgggctatttgaatgggaaaaaaaaaattaatttaacgcaacatttcggaaaaaatcaaaaaattttaatggtaaaaatgccaaaatatagtcaatataaaaagttaatgtattggatatttgaaagtgacaaaacaatagaaaaatgtcataattgcatttaaaaaagattgaatgaagtctaaataaggaatttaggtgctaattgtaagactattcatttcgtgtgtattatttttcaaaattttttttatttttatatccgttattttgtattcgaatttcgtcgaaaaaaattttacattacttttttatgatttaaaaattaattttccaattaaaatggaacagcgcacacacacattcttccatgatcagctcctgtgggtcactgctcatcctggtcagtgctgcttggtgttgttgttggggcgattgtcctgttgctgctcctccttctcctcttcttccaccaactgctgctgttcgtttttgctccttttcaccccgttgctgctccttctcctcctcttcatccgacataaatgactcctcttcctcttcatcctcctcctcctccggactgctttcaaatttggaaaatttcttcctcttctccaccgttctcttcctttccttcttcttctcccctttcctttcctcatggtcttgcttcactttctctttgttgccctcattacttccgtctccgcccctccctttgtgactctaga

SEQ ID NO: 7770 - DNA, 3111 bp, Heterodera glycines
  unsure (1)..(3111): unsure at all n locations
ttttatcccactaaaattgggccaaataccccacaaacaagaggaaaaaaaataaatttttataagaattttcctcaaaaatgcaagtggtcaaataacccgagatagataagaacatagttattatgtataattaacataaagtatcagtgaagcatattttcatattcaaaaagtataaattcaaagttattttttgaattttatgtttttttcttctttttcaatcatttttctgtttttctgtaaagatgttttgcttttgcatgcaaaaattctttttaataaatagaattttaataaatttaaaaattgtgttttcttagttacaaatgcaatgatttggcggcggcaaagcgcatattgccaaattgggcgctcgaattcaacaaagacatatcgcaaaagcattacacattcattagcgacaaatttgcatcagaaagcggcgacatcaaagcaaattattcaaaatggtttagcgccaacaaattagcagacgaatgcgaactgtcgcacgcatttcgtatggtcagcattggcggaaatgtccagcaaattaatgcggtcaaaacggtgtttgaccagtgtttgttaatgaacacacacgcatccatgttgtacggcgtatatccgcttcatacttctgctcgtaagcctttttcttctttttttctgacaaaaacccgaaaaattgtaaattttttgtcggtttgtccttctaaaaatacttttttattttaaaaaggaaaatctgcttgtaagcccttatcgattttttaccgtaaatcctgtaaatttatggtcgctctcctttttatgctttttaatgaagatttttttttgaaaaacagaaatttctagcaaaataaatattatattttaactcttttaatgatatttttttaattttaaaaataaaattaaatttcgctttttattgaaaaaaaagaaaattccaatctaaattccgttaaccttggattcacaatttcctatttcgggattttttatgggattttttttatggggatagcccaatgttcctttcctggatttctgagattttgtgcgattaaagcgaaaagttaagattaaggaaatcaagaaagtgctaactgaagtatttcaatttttagatatattaaatcagaaaattttttctatacttgtgacgggaatgttttcaacggaattgtccaaaagatcgcactcatctgaatcgttagaatatactttctttgtcatcaaaattttggcatttgtccatcaattgaaagataaaaaaagtgccaaaaataaaattgaaatatgttggaaagttttatccgactcgggagaaactatgacatcaaatgaatccattgatgtgcttaaaccaattttggcagaatttgaggatcaatttggtggcaccaacaaaatgccaaaaaattatcaaaatttgattcaatcatatggcaaatttttaatggaatttttacatttggatgaaaaatttcgaagtgaattttatgaaaggacagcagaacgtgaaaaattgatgaacatttttttgattgttgacaaggaaaaaacatttttggacaaccaattttggaaacattttgatggttggtaaattattaattattatttttatttaatttttattaaatttttaagttcattcaacagaaaataatgttgaagaaggcagcagcaatagcgaaataaaattcatgaaaaaatacaaagaatgtccaaatgtaaagcagcctaattttttggaaaattcagaaatagctaatgagggtaattttgaacataattgcttattaattaaaaaggcagattctgataatttttattctttgataaatgaataatttattggtttcaattttcattaataaaatttaattaaaaatttttaagacaaagaagcacatgccctgatgaaatcgtacattgatttaatgaaaaatgcacaaaatgtgcaaacaaatggacaaatgaacaaattgacagaaaatttggaaacgaatgccgccgtttgggttagcaaagagcaaataaacgaattgctaaaatttgacgaatcaataaatgacaaaagtgaagaatttattgaaaaaattagccaatacaaaatggagtggtacaaaatggcgacaaaaaatggacaaaatgtcgacaattacaaattgttattttcattttacaaatttttaaacacacttattgaggatgatgagttgaagttgaacaaaaattggaatttacatgtgaaaaatttgttgaaatggtcaacaaatttgtttgaaacggtcatattagaaaaatttatatatttaaaataattaaacattaaattagacattgttttgttccacgcatttgagaaattaaaaaaaatcaaaaacaattaaattaattataatgaaaattttaaaattaaaaagggttaatttttcatgaacattcaatgttttattaaaaaaatatatttattaagaaattaattcttcgggttcttccaatttgcgcaaaaaacacctgcgcattgtcagatgaaaaaatggcagccgagtttaagcaaaaaatgaaaaattcgcaaaattggaatgatcaaattcatttccatgcactgacccaattgatcaacaaatttgacgaatttacacatgttttgtgctatggaagtggagaaatttcaaacaatttgatgagggaacgacttagtttgattgtgccagaaaaagcattcggtgccattgaagcatttcatcctgaaataatgggttatcgtaagtaaaagaaagagaaaagtgttaaaaattcattttaatttgcattcttaatggttttaaaatttattatccaaatattcaaatatcatgattaaattataatttacttttttatcatttatattttgctaaaaatggctgagtatttaatttactaaaacattgataataaattttaaaatcttaaaaaatggaaaataaataattgaaaattcttaaaatttttatggtatttattgacatactttgaccaaaattggtaaaaaaaaaatgaaatttctggaaaaatcaattanaatttaatcaaaagatcaaaaat

SEQ ID NO: 7771 - DNA, 3916 bp, Heterodera glycines
ccaaaaattcggcaccattttattcaaaaaattgttgaaattaaaaacaaattttacgacggactccgagcagcagaaatagacgcatcaaaaatggcgcaaaatttatgtttgatcttccatttttacatttttcttacaaataacattgcatatgttgaaatgacagtggatgaaattgacgcatggaaagcaggaaagttcaattaaaattcattaattaattagttttttatgctttttaatgacggcgttgcgattaaatgtagcttagtaattatatatttttatataaaatagcggtttgaaaatcaaattggccactttactgattttcaaaggcctctaaccggggtgagtgagccatctttgggccaaatcactttattttcattctgcattgttcattgattgatctataaatattcgttctatttataaaaatcaattagcccctcacctatattagagctaaaatccaaaaatttaataaatttaaaattaatatttttaaataaaatttaactttgggattttagcatgtgacaatgaagatgaagtgaaatatgcatttgaacaacaacggatcattaccggagttactcatttggcatttttgcagcgtctgtttgaaccaaagcccgaaaatgaatgggttttggccaaaattttggccattcccggggccaggacgcgtctcctcaaaatggtcaatgttcagcaagaaaaacaagaccgcaaagaccaagaacagcatgaacaacgcatttccattcaaacggtgtcattatcatcatcatcatcatcatcatcagaattgaatgttatgaacgaaattatgaagttgtgggacaaatgttttgagaataatattggtaagtatgaaatagtgaaacataatcataattggtgtaataataaaccacaatagtctcactcgacaataatgattttgaaatttttcgatttttgaccattatttttaggaccattttttaaaacaaaattttcccctatccttatactcttagagtgatcaaaagtatatcaaattttatatgaattatattgaaggggggggggggtcagaaaaaaatggcccaaaatgataaaaaataacttttaatttttgatttttggtgttttaccctatttttagcaaattgttggaatttttttgagaataattttttgtacattttgacttttagacacgttcagcaatgtaaagttgttgtcattatataaaaatattttgttcggaggcgaaccaaatattgcattatgccaaattggcgaactgttaaaagcggatgtgatcgtttttgctcagtggatggacgacaaaattgggatggcacggcacacaattgccaacaaacggttggcaaaccaatggaaaaagcaaaaaagaactttatacgatgtttttgatatgatttcagacgaaagcgagctgattcatcggtatgaattaacaattataaaattagaggattaatcaaacgtattttaaaacgaaaactttaacaatttccgaattcatttgacagttcgggattattaaacaattcgaagtaaactctacgaaagtatgtgccaaacccaatccagacagcctggatctcttacaaatttatccctccccaggatcgagcacctaccgaattttaatttttaagatttaattaaacaatattatgaattttagataatgactcttgtatttgtttctttattgttcttagtctctttgcgtatattttctaaggcaaaaattcctttactactttcccagcagatgggctctattttaacgatccatcggggataggctaatgagggagggaggggtgaaccttaatagagtaattaattagttctattattaaaaattatcattattacattattttctaaaattaattatttattatttttttaaattttctcggcttagagtgaagcggtactcaattggccaatggttcctcagcatgaaaaagaattatattgagataaataaaaaaatgtccgatgatcgaaaatttgatttaaatgttgcggaaggatgggataacatttttccaaatttattgaacattgacgcgatgaatattaatcatgaaaagaagaatgagtacaaaaaatggattggccaattgcacaaaaatgcaatcatcaaactgagccgggaggacaatgtttttgcgcaacaattaagaaaaggtgacaaatttaattgatatttgaaatgagtttaatcttttcaaatttatggaagaaaaaaaattaaaattttaaattttatgcatatttaaaaaaaattgttttctttaaaacagagaatttatttttcaaattctttactgttttttctaacaatgagaaagtggaaatattctgaaattttatttatttatgttttatgaaaataatattttttatttattaaattttaaaaaattttaaatttagaatattcttcttctgaaaatgttttatttcgacggtttcttgttgatttggttggagaatcaaaaaatgatgaagaaatttggaaaacaattcaagttgataagtctgatgaaattgtcacagaaaataaattcaataatttaaatttaattgaaaacctttcgccaaaaaagggaaccaaagaaaaaattgtggaaaagtcaaaatgcaaaaataaaaaaccaaaaaagaaaaataaaaacacggagaatattaagaaaaatgaaaacacatccaaaattgaagacgcaattgaatgtgaaaatgaaattgaaccagaacaaattagcgaaattagaaataaagctaattcaaatgaagaaattgatcatattttctggggaaaatcacccaacaattctcaaacaaaatttgatggaataaaactggctaattttgaagatgaaaattttgtggccaaaattttcacacaaatttttgaaaattttcaaaagaatccaggtttatacagttcttttttattttattaatttatatttttaagataattttgtgggtttattttcgtctgctcaactgttacattttggcatttatgccaacgaaatttgtaaccgaataaaactgatcaatcagctgaaagaagcgctgcccgaaattggaattgatcacattgaaaacattgaaaatgaatgggatcaattgaaaagtgtcgatttgtcatcattaaaaaattgtaacaaattaattacgacactttttctgttattaaagcaaattgttgcaaaaatggacaaatttgaagtgccaaatgagcaaattgtaaattcaaatgaagaaaattttgttaaacatttgttaattaggcaaaaatttgccaaatttattgtcgaacagtatgagaagcacaattggtcaaatttaagccaagaaaataaaattggcataatgaaagcaatttttgtggatgaaaacattgatgatgaacttattgagaaatatttgctagaaagtatcaaaatgtttataatgaactatgaaaagtttaattcgcaaatcaaaatgggtaggacataattaaattaattaattatttttatatattttatatttaagataaaaatatttttgaaatatcaaaaccaaatcagtttatggagcaaaacgcaaaattatatttcgaaatttcaaagggatggcaagaaattgattatgatgagaaaacttctaaaactgtgaaaaaattcaataaggtataaaacaaaatttatttgtaaatttatattattttttagtttaaaaatgttatagagcaaaatggatacagtgatgatgatttaactgcaaaatttaagaaaacaattgaattaaagagcatgtttgaacaatgggtaattaacagaggatattttatatttaaaatttaggtttattcaaa

SEQ ID NO: 7772 - DNA, 5850 bp, Heterodera glycines
cgccgatcacctcaaaaatgatggtggaaaatagtgccggatcagtgcatgttccattaacggttgatgtgatcagactatgtgacattgacaatcacttaatgattaatgtgatcagaccgtggcattcattgactaccccatcaactaatttcaatgtgatcagacattgcgattcagccgggccctaattcacccgcggtgattggccaaagatgggtggccgattggctgaatgggcccagaggcgacgaatggacagcggcggaggagcagagaatgttcgaatgggagaaggatcggagaaacgatttgagaaatctgtggcaaaattgggagaagtaaaacaaaataattaggcaattattatttaaaaaatcattttaattcgctcaatttggccatgcttttgcattttgttttgattttgttcactttggcggctgtccatggaatgcccatttgtgcacattaaccggcgattcgccctccaaaatgcgttctgcgatcgattcacaaaagcactttaaaatggtaagtgttgcttaatgtttgcttgtgttttttgttccgacactgattcaatccgctaattacccaccgcttttgcgcacacaatgtttggccgtcctcgccggagcagtgcctgctgtccacgatcaaaatccagcgtcaatttcatcaattgccaaatcaattatgtttagttgctttcactaattagagggcattataatttttttttattaaaagttaattatgcgcaataaaacacaattagtttgttaatgggaaatgttttccaaatttggcggaatcgggcggccgtttaaatgagcaatcattgggaggggaggagaagatcatgcgcgagcgaatccataatcaaacacgcgaatcgactgatcaatcgatcaattaattagtgataattaattaaataattaatgaggctgaaatttaaacgcattaattacacaataataagaaaaagtgtcagatttatcagtttttccatgaaaaatacaataaaaaagttcaatagcattttgtttatcgtcgcaataattttggataattgtcatcactgatcagtcactcatcacaatgttttgggttcgttttccgccttttgtccgctcgccgccttctctttctttgcctttgccatttcctaatcaaaaaatatttatttatgttttttaattttggacattaaaaaagagcgaagtcaatcagagagtgaaatggaaatgccaatttctgggattatcaaaatccgcttaaatgccacagtatttaaatgcccggcacttttgttgaaattacggacaaggaattggcaaaaccaaggagggacaaatgccgtgccaattcctccgatttttcttaattaccttttgttatttttttgctcgtctctttcatcctcttgctcagatcgaacacgagcaatctttccaaaagtttgacctgatcctctggcaaatcaaacacgttttcgtacgcgttgttcgtgtaatacaattggctgaacgcttccaccttgttgttcattttgaagttcaaatcttccaaaaatttgtccgccatttccagcatttcctgtgccgtggtgttcttctgtgccatgtccgcatcctcactgtacagtttcatgtcgtccggtagactgagcaacgcattggtatctgcttgattgtagtggttgtcccacagcagtgactccaattttggcgaaaacaattcgggaagtgtgctgaggctttgcaactccacaatctccagcgcttcttcgccaaatgccaaagtgttgtcgaattttgcaggcgtttttttgccgtgtgccgcctcagtttgcgcctcatcttccgctcttatggccaccgcggaacgccgcgtcaccggtgggtcctccatcgtcattacatccttcaatgacttgtacacatgcccttggccattgtccacgctgttcgatctgctgctcatgctgaacctgcccgaattcgacctgcccgaattggacccggtcaacagcgccgcatgggtcttcatcaactcgtcgatggtgctactgttccttgccctcttctgacttggctccttcacatcgttctttccgccacttttgcttgcttcgttcactttgtccaatgtccccaaattgccctcatcagtttcatctcctgctgactcttccgtcgtttgtttcgcctttgtttgtgccgttttgtcgggactgcccaactttgatttttgcttattgtccgaatttggcatatccgaatttgttccgaagtccgtctgtttattggtgttcgtcttggcccatttatctgagtttggcatgtccaagtttggcatgtccgaattcgttcccaagtccgtctgtttgtccgttctgttcgtgttcgtctccattttgttgtccatttgtgttcccgtctccgttctcccccctcccgcgcttttgcctccgtttcgctcaagcattagcaaattaagcagcgtcgactgccaaaacgacttaaattgaaaatgagaattcaaatccaagttggctttttgcccacttttaagcggtagctgtcaaacacacattttgcaaatggtccgatgtactttgaaatgacctcgggaccactaaacttaattaacttaaataattggaattaaaaaaaaatttctttgctaaatttaatccaataaaaatgatttgaattattggcactctttataaagtttatattaattttttaaatcccctcgagcgaaacttttttgaccacttaaaattttaaactattaaaattttcccaattaattaattgccggtccaaaaaatgacgttttggcgaagagttcatttttcattttgtttttgaaatctttggcccttttgttctttttcatgttctcttcgtccgcgtgccacagtttcttcagcttttctattagcttttcctctgctttcgagcttttcgagcttttccattctttttcgcacttttccttctgttccttacagtaacccatcactttgcttatcgtattctgagggtataccgcaatcagcaggtcgatcttctccgatattgtgttcccttaaaagtgccaaaactatgtattaaacacacaaaaaaaatttttacccggccattctccaaaggttgaccgtgtgaaaaatgtggtcaaaattgtgaaagagccgaaaagtgccaacgagcgaagcgaaaattgtgccattttgaactttaagataactgaaactttggaatttttgccattttcaacggataaagtgaaatagtttggtgatgtgtggagttcgacccgttcctaggtccccagtattttttagtctttttcaaaatgtcttactccagattaggtaggtggtgtacatatataaaatgtaaatgctttcatcggttatcctattaaattactttaattggggagataaaattgtaaaatgatggcatcgctggtgaatctgcctataataaaagccttcccctcctcctccttctcttaattcatataattgcgccaatgccgaaaatggtgacgtgaaatgcgtgggatggcattggcatgaccaatcgagtgattgtaagggtggcgcatgattaagctgaaggcattgccattattaagccgaagccattggcatgattaggctgcaggcattggcatgaaaaactgaggctgctggcgttggcattggcattgctaaggctatgccaatggtgttggcattgatatttttatgtttttttatataatcttaaagcagggctggcatatatgctgcttgattacatttttctgcaaattgaaggggctgattattgtagctttttgggaaaagaaatagcaaaattgatttttattaaaaatttatttaatataatttttattttattttttatataagaaaaattgaaaatgaaaaaattattttaacaattttttatgatatgcaaagtgtgtgcaaataaaatgcaaacgaaaaactggaaaaggaggacaatcgaaaatggacattggaatgcttttgggctttgcttaagtcagtcaaaagtcgaatggaacgacggattttgactcaaaaagtgactcatgattcttaaagactgatcggctttctcaaaaagagtaacactgatcgactttctttctcgctgatcagtcagttgttctgtccattccattctcgagaggttgatttcaaattgatctcgacttatttagtcggcattttgtctattccaattccaatcttcgattgatgagcataattttacggtgcttttctctgattccccctcccctcttttgtccattctgatctcttctctctctcctgtcgtcttcctctctcttcttttatttctgtctctcactttttcttattttctctcgctctctctctctctctctcggtctttctgtctgtctctctctgatcatttctgatcaatttcgctcgttctggtcacttctttgtccgcatatccgcgcttgtccgcgtccgtctcagcgatgcgctgaccgcggaatggggcagccgtcgcgcggcagcaaagggggaagccgaatgcgttggcgaacggttggggctcggcgcgcccgcggacgcggaggcgccgggcggcaaacgccagcggacggagggcgcggaaggcgaaaaaatgggcgccgtggcggagccgggcggagtttgaagggactgctgaaagtgtaaattgaaatatattatttaaaacaattatttttccccctgtttttcaatttttagacccccccccccattttcacccattttgtcgctttgtcagtcgaagtgccggcacttccgctgcgccactgcactttggcactggtcatcttaaagcagcagggaaaagcattggatcagctgattaagcgagtgataataggtgatttttgccaaatgatcagacgtctagggccccccaatttttgccaaatattacgtcaatttttcgccttgcgaaatgcataaatttgtgtgctttccgacccgtttccgcgccgcggtgtccgtcacgtatttgagcagccgttgcctgcgtgggtcgaattcgcgttgaacgcgcgccttgtcgctgggcttggcatttcgccacaaatactggacaaacaggcgcttctgaaagtcaggcaatccgcgcggcgaccgcccgccaaaggcatcgccatgcgccacggacgacgtcggctccgaaccgccagtggccgctgaactggtcgaagctcgtgggtgcagctgctgctgactgggcgggcaccactgctcggctatgccggcgccgctgttgcgagcgcgggacggtgaccggcgctgatccgtcggcgccgccaccaccgcacctgagccctgaccgatcctctgtaatcagaggaaacggcgatttttttagcttttcatcttttcctaattaccgaaataaatattacagtatccgccaataaaattgactaaatcacctcaatcatcgttacaatgcggtggaatgaagtgcatgtgcgccaaaatgagtagaaacggaccacactgaagcacagtacggtaaagagggacccgcagtgcggtaattggctacagtgtgccaataatactgtaacttgccggtaaacatcgcccaaatcgaccgtttcgccccgctgcgcgtcgggcccaaaacggcgaagcatctgttgttgttgctgaaaatgtgatgcggaggacagcggaggggaagtggcagaatcggaggatgtgggaggcacctgggaggaatcacacctaattaattagctaattataattaccgggac

SEQ ID NO: 7773 - DNA, 992 bp, Heterodera glycines
  unsure (1)..(992): unsure at all n locations
tggggcagcaagttgttctcattagcattccttaatgagtttaattttcncactttaccatcactgccgccctcgaaattggtggcagtgtcggctgcgtgtggtgcgggtcttccaccacaagttcgagctgttcagccattttcggcaccggcaattcgggcaccggcgtcggctcgggcggcggtggactcggcgaaggcggcggccgaggcagcgaaagcggtggcaattcgacggcacgcaccaaaggcaccgccggaggaaacggaaaaacctaaaaaatggaaaataaaacaaaaaaaatatttggcaaaagggtaaagcgagcggacggacagaagcaaatgctaatgaataagcagaaaaaattgcaatttattttaaaaatagtttagttagtggagttaattgtcaataattaatataattaaaataattaaaattaaaaataataaaatgttaattttggtaattaaattaaagaaaacgaacgaacccatttatgttaaacagaagcggggcacgacttcacaatagcaactgaacaaaaggttaataccaattaggcgcacaacacaaacagacaaaggaaaacggtagtaaaatgggcgggttacggtacataaatattacagtaagttaaataaattgttggtattaatacaacacaaaagcgaattaatcaatgtttaaagcaattcttcaaaacaaaaaataacaaaaagtaaaaaaaataagatgatgtaaaggatttgaaagaaaataaataataaaaaacaaagcgaatattcataattaggcgacaaattgagccattaatattcttttgattgttccgactgattgccccaaaggccttctcattagcaaatgattatgctttggtttatggttttaattttagtgagcttatttttcctgtgctcttcctcctctcccattgcttcttctgctgcttatgcgcccgctttgcttttaggtcgtcactt

SEQ ID NO: 7774 - DNA, 4631 bp, Heterodera glycines
  unsure (1)..(4631): unsure at all n locations
atcaaactgattccgaacataagcatatagttcagctgcttagggtaagaagaaatgaacatgtgaagtttgactgcgaatggaaatttcaggatgttcttatcagtaccaagatgtcagctgcagaattcagtgcaaagttgcgagaacttactgcttctaaggtataggttgtaccaaatcagtatgtgcttcctccatgcttgtgctttggtttccagtttagcgtgaattatttatgtttaggacagaggcacattgttgccttatctgtcttcggctctaccgttgttgcgtcagtctgtgtgcaatgatgaacaatcggagcttctacaattactttctttgaagtcagacgattgcgttagtccagttaagaaggccgcaaatgtaacaaagaaaacgtcgaaaagcttacaaatatattaaaattatagtcaactgatgttgagcggatgtcaaaagattttgaggaaatttgttcaattcgtgaaaaatgcaatgatggcaagaagcgtcgattgaaaatacgactaggacccgatgtgctagtcaaccgttctttgtacgagttagcagtggatccgcattctaggtgcacggaaatttcatggaccagtaaaacaaagcgttttagtagctacacaattccatccgacggagctagcagcaacttaattccatccgacggagttaagcttgccctttcagcacaggtgattacgaaatatgcttgattgcttttatgatgtttattgtttagcatctgctaaatgaatgttatcataaaatgagcaacatttggtggatcttgtttgtggattatgcagatttctcgcctaatgtgggggttggcttgtcatcccacggggtgggtcgcctgcaggaggaacttgctccggcccaccccacggggtggggcgcccagcgaccaacccctctgtccttggggctagaccacgcccacttggctgggcgacccctataaaagggcagccattttgtctcagtgatcattctcaacaattcatttttgttgtcatgtgggggttatgtgggggttggcttgtcatcccacggggtgggtcgcctgcaggaggaacttgctccggcccaccccacggggtgggtcgcctttcaagtgctccagtttctttaaattttttagattattaggtgatatgcgtatgcttaaagctattttaacagccaatataccaaattaattattgactttattcatctgtcttcattacaactgggttttcattgtagagaatttaccatccgaaggattttcctccgactgtatcatttccatccgacggacagacaactggtacaactattccatccgagggcagacaaacatgcaccgcccgcataacttgaaggaagcggagggagaagtgcagaaagcaatgtaacaacaaaagcaactgtattcttaacactcgtttcacgcttccagtttcatcgctgctgactgttggttggaggtgttccgattgcttccacgctctcaggttggccttggtattgcgaccatcagtcctcgctttgaccgccgagtggacgaacactttaaaacgcgcaaatggacctttggagatcttagaattggcgtcaaagctgggaaaaatggcacaaaggaagtggcagttgtctatggcattagaaacgatttgccattgcctcagcgtccgttaccaagcaaattggttgccttcggccggatttcaatcaggtcatcgacaatagaattgctttacatgcgcttgcctacataacttttgtctgacttttttaccaagcaaattggttgccttcggccggatttcaatcaggtcatcgacaatagaattgctttacatgcgcttgcctacataacttttgtctgacttttagttactttgatcccagtgtgttcacttttatcggactattcaacaaccgtcttcctcaatcatgcacagcaatgctcgacatatccaatgaaaatgtgcacattttgcggcacatcatgcacagtatttggccaacgttcaaagatgccgtcagtgcattgcgcttgacaccgtgttcgtttcgtcttttgcgccgatttgccccgaccatgctttgctgttgtccggggctgcagagcattggtttcaattcggacattttgcccgaattcccggccgatgacagtgccatggtgtcggatggacaagcgttggccaaatggcttttcactccccgtcgggacaatgtgccaaataaccttctgattgaatttgccaaccctgtggtggtgaagtcccaatggtcggctgtcgaagcgatcaaaacggtgcgtaaatccatgaagtgtgatttttatagttttactgttttagcagtttctcgccgctacttcacgtgtttcgttcaaacttacgcttttgaacagacagtctgctgactcttcggaaactgttgtgcccattgttccgttcgagcctttacataacgcggccacgggggagcaattgacactggaacaacaagatgcaaatatctactgcattgagcgccttccgattgggggcgacaaacatgattgggtgacccacatgcttggagagcttaacaagaaaaaccattttaatttgttctttgatgaaagcggcgtttcgctgtgattggctagcatttattgttttatttattcgctgcttttatgtctgtcccatgcacccatcattttttttgatacaataaagttgtcactttgctatcactgttcctgctattgaatggtgaaaaaatccggaatattttgctctacaaaaaagctctttacaccatttaactaccactgtttcataaaaagctatggcccgaaaagtcatctcgaatttccggaccaaagggtcccccctttgggtttcaaattgagaaattttttccttccaaaactgccttaaaatgctttttctgggctattttgggccgctgttcacggaaagctgtatgtgaaattgtagctaacacatatatacttatttttttataatttctaatatttttgatttaaaaaaaatccatagtgtagggtgtagaactgtataaaatgggtgaaattgcacaacgaaggctggttggatggcgctgaatttggacagaaatgcattgatctcatgctggtggctaatgatgcgcagcttcagactcttgaaatggaagtgcgaaagtttttgcggcgcgtgtgcaatgtttgtggcaagttatgcaaatgtgagaaaggagtcaatatacacaagacaaaaacccataagtgattatcatttggtgccttgtttgttgtttttccaccgcacaatatttattgtttttcactttacacgtttataaaatttttcaatttatccatttgtccgcataacattataaatattgcttaatttaaacattgatatttgctaagcttattttcaaaagctaataaataattttgcaattcttcgattcgtgggggtgggccgcctataggcccgtcccacggggtgggtcgcccagcgaccaacccctctgtccttggggctaggccacgcccacttggcactttttaaaattttgccggtgctaattgctaattttgctaatggatgtcgtaaatccccgtcaaaatcctgaaaactacacaattttcgaaagaaaaatgcattcattcgattacataggcaaacaattttgtgttgtggcgtgggtttgcaggagcacagcttgttccccaaatcccattaacgattttaaaaaaatcattaaatttctcagggaatttcgggcaaatttcaaacaatttattacaaatagagctaaaatttttagaccccctaagaatagaccccaaaaattttcagaaaatttttttaaaaggcatttgatcactgatttaattatgatcggtcggtcatttcttaattaattcatttcttcttcagctttggataaaaatcaaatgttttttttaattgctcacccaatgcaattagtgccactaaaaagccaaatgaacacattgttacaattgttgttccaattttcatctttcttctgctgtagcttaaccgccgtggtctccgcaattttatggacataaattctccgaattgaggggtaaattttcaaaaatattcttcaaattcattaaattctattagaatacatctaaaatggctaaatacggtataaaaactcgttttaaaagaaaaaaagctatttttaatgaaaaccaacaaaaaaaaccgaaattcctttttgcttatttttgacataaattaaccaatttctaagaaaatttaaatttaatcaattttttcgacaaaattttgttaaaaaatgtctttttcggaaaattttccagtctttggggtcaaaacggccaatttagctgacgagggccgttctaataggggttttgtagaaaaatgccaaaatatggaggacataaatcgcgaaatatggaaaaatatggatatagaaatccatcttaaaagcttcaaaccaagctaaaaacatgtttttcttgcgtgtccagaaaaaaaatatggatttccatataattggaagccctagtgatcccagtgatcccgngaaatccctgc

SEQ ID NO: 7775 - DNA, 4488 bp, Heterodera glycines
  unsure (1)..(4488): unsure at all n locations
acttaattttctctggaaaaatgtgcacttcgtcattttgacacgaaatccatnatgactgcagtcggctgaacacatcttttaaatgctgaatgtgatcagtgaatgatcggcttgcgacgataatatcgtccaaataagccgtggcaaaattcaagcctgcgagcattttgtccataatagactgaaaaatgctgggcgccgcttttactccgaacggtaaacgttccatggcgaaattgcctttgtgggttgaaagtccgcacaatttctttgactcgtcatccaattccacctgaaagtacgcgtccttgaggtcaatctgcgaaaagaattgtcctccatttaacgtcgcaaaaatatcttcaggaattgggagcgggtgttggtagtcgatcaatgcatcattcaatcccgttgaataatcgatgcaaaggcgggcattcccatccgcctttttcaccaccaaaatgggtgcggcccaatccaaatgttcgacttttcgaatgattccgaggccttccaaccggtccaattcacgttcgatgacttcttttgaatgatgcggcaccggtctggcctttcggtaaattggcgcgactccttccttcagtttgagttgtgccttttctttgatgcaatggcctagtgcatcttcgcaaacacccggaaattctttccttaattccaaaatgtgctttccaatttgatcggtggctctgcaggaatttatcacatgctcgctgatccgctgcttaatgccatccaaaaatccaaatttgtccattgtttggcggctcaacaaattaagcgaaccacgcttggccacgtaaaatggttcattcgcgatcaaaattcctccaaattcaaatgtgccaaagccttttccgatgaatcgaatcggcgttccatcgaaagctcttccaatttcagtgcacttctagatcggtgggctcccagcctccagatgtgagtcttcatcaacgacattcacatccgatccagtgtcgagtgcaaatgcgatcggcttttggttgaaccgaattttggtcctcagtgaatcggcgtcatttttcgggtttaccataccgatttgtaaatgaccaattcgcttgttgcctaaccattttcctttggtcttcaaccgccattgttgcacactttcacattgcttctcaatatgccctgtgaatttgcactttcggcattttgctccaatgaatcggcattcgctgccccaatgatcggcagctccacaacgccagcaattcttgttcgcctgccgtttctctggcactttggcaacttgcattttcggcgaattgttttgctttaccggccgattcacggcgttcacgttcctccaatttgtcggtgcttcaatcgcttttgcctccacaattgttgcctgaaaattaatcaggtcttccacgactccgtcgtaagtgatgttcgccccgtccgctgaaagcttcgacaaaatcctttgacgaagtgccgaatcgttgtgcgacttcaatgccgtcaacaacattagacagttgaattgttctttattcaattcactgaatttgaaatcggccagcaatttacgatgcctgttgataaagctgcgaaaatcttcgccttcgcttctcaccgctttaaggcactcgtagcgatcaatgaagatcgattgcggtcgggcaaataacttttccattcgctggacagtcgcgtcaaaattgaagtcagtcactgctgatggcagcactgaacggctgtactcactgaacgccgcttcgctaagcttgttcatgagtgccttcactttgatttcgtcggcggcatttggcgcggcgcagtcaagcgcaaatttgaagcgcgaaatccattccgtcactcttgccttgtcatcgttttgctcaaatagcataatgtcggggagtgccggaatcgtcgtggccgcaactgctggtctagccgcgttctgtgtttggtaagtcagcaattgttgtaccaattgttgctgttgcgccaatgtgtccattaattgttgaattgtcacgttttggttggccattattgtcgaataaccgctcctggcggaacctcaaccgcctgggtttcttggtttttgtgttgaataaaaccgcgcctggcggaaaccgcaaccgtattggtatcttggttttttttgttgaatttcacgattaaccgcgcctggcggattaatcggatcgacgaatttggcttgttgaaaataaaggtgcctcctggccgaccttttttttgcagacaaattcaataaattgcactcagcaatttattcaaataggcgctgagctcaaatctcacgggcgtcgccaatttgttcggtccccgaaatgtcgaagagacgaacaaataaacaaatttattgaagacaaattaaaatacaaataaatatgtaggaggacggcggaggagacaaattgggaattgtgaacacaaaaatcataaactgaatgaatgaaatgaggggagggcaaatggtcacaaatacaatcaatagaatgtgtctgacagtgaaaggtcagacacaccaaataacaacaaatgaaatgagtgaatgtgtctgactgggaatggtcagacacaacaaataaatggaaatgaaacaaattaaataaataaatgtcttatcgggttccacccgaacagctctcgtgggttctgcccgacgggctcattctgctcagtgatttcttctttttgctgttctgtggcatcaacccaattttgtatctgtgcactcttccgtatgttttaggggcaacttttaattgagtcccattccaattcacccctctgacttcctagtgaatgggtctcgcggtgttaggtcaaacctaaaaaaagaatcaatggggtgaagctaaaaagtatcaatgtgggcaaaccaaaaaatcaatgataataacctttaaatttaattattatttaaatattttttgctgaataagatcataatttagctcaaacttagtcaaattaaacaatcttggtagtgagtgataactctatttgtactctgctatcggcatgtcaggcgaaacaacggcacatattggcgatcatttcgtattatttcgtcatcatttcgaccgtttctcctcaagagcgaatcgctatcagtgcggccttcactttgctggacagtaccactggcttcagagtgcgtactgtttctgccaatgttctgttttgggtccgatcactgcagtttggcattcccaagcgccgcaccggttcgacacacggagaacggcacaaaattcatgatcttcctgatcataagcacacaagacgttccagccaaaaaattacttaattaatgagaaaaatgagaacaaaatagagacagaaaataacaaacataacgccacataaattaaaattatttaaattaacaacaaagtcaacaaaatacatatccaacatcccggcatcctgagaaaaagcgtccctgcttttcaacgaaaggtcggaggtttcgaacggaacagtgcggcacgcctcggcggttccgattcctttttcccgaaccagcccaactgctacgaacaggaggacgatcaatgttcggcgatgggcgatggttaggccgattgctggagtagggccggaagtgcagatttccaaaatcgtgattagcagctctacgagaatcagccatttctcgaagagtcagtgagtctcgaccgactatgattaggatcactttcacacgggttgttgagaccacaattggtttgattgcccgtatcacatcagctagctttccctcttttggtctgatgtgagtggactgatcaaagaagggctggagaaggcttgctgacaagtctccgaccagtacacgcgggtgcagtataatttggtcagccttatgcactgattcagcacgaaccaattccagggtccatgccgattcgtcaaaaattggcttccactcttcttggttcattaaaataatcatttttagagagttccgtcagcactttttccgcctgtattgcgcctgttttgccaatgtttctcttccgccgcttgtcgttgcggtcgctcccgcaaatggccgtgccttcccatcgacggtcaacgtgaccaattcgtcctcctccgcggtgactgtcgttggccaatggcgcaatatgcacaaaataacgagcatccaaagcatggccaacggaggccgaacttttgccagcattgggcccagcagcagccgcatatgagaaggccaaaacggaggaatgaaccagaaatggaatcgaatgaacctgggaagactatgagggaaaaattatgggacggaccgggtttgaaccggcgtctctctggctttccggacaagtgttctatcagccgaactaccgactctgcccattccattaattttgcatgaagggttttccagaaccgagaatcgtaatgacagatatgaatgatattggaggaaactaa

SEQ ID NO: 7776 - DNA, 2388 bp, Heterodera glycines
atcattctttaacaattgtcattggtttcttatcttgataaatttagtttcctcaaatttgggggagggggtgtaaaattgcaaaatttattttattagttgtttctagaaaagatgtactatttccggtcagataattttgtacctttactgttatcaaataatgcttttaatgatttctcttctaaaggatatttgtcaattatttattgaatatagaaattcaatgttatcattggaacagaaaatgaagtaataaaacaaaacacaaaaaaaaattatgttacctcaaaaaatttataacatatctagaagatgtaagcaattaacgagagaaaatctattttaacttacataagttttatataaatttaatttcgcaatttataaaaaaataactataagtataaatgacgattttgatcaccatcaaaagttgtgtttgcatgaattatatcagatttctctgtgctttcaaattcgagattcaaaaagtggtgctaaagacatgaccatgactgtataagcaatgaaaatcatttaaataattagtttcctgcaatatcattaatataaattattacaactcccggctctggaaaaaccttcatgcaaaattaattattttaacaaatgaaataaatatgggaaatgaaaaaattgtttaaaaatatgcaaacacttggcacggtgatgggcagcaaacaagggaaataaaatcaatttaatttttgaaaatatttatgcctttttgcgaccaaaaaatgttgacaaaggcattaattagcacagaacagcaaggaaaaaaagtagtaaatgcctaatacctaaattcaacagcatattggcattttaattttaaacaaattttgttgatggcaattcataaaatgccaatgtttgccaagtcacaaaattctctctctctcacagccgtgccaccctctcaaaattggcgctatttctaccacgcgtgctctcctttccgtgccatcccaaatttggtgggagtgccatcgccaccccattcattacccattaccagtgccaacatccgcttcactgattacaattcaaagttgcatatatatatgtaaaaggagagcaattaaaaataaaatatttatatttaatttctcttaaaactctcatccctcataatgttttgctactcaatcccatcatcaacaatgcccctcattgtgctgctaattgctttcctaataagtgatgtcacttttgcaatggaaaatgaaaagaacggttcgtttaaaaagcattatttgtaagcataaatattattctttaaatatttaaattcacaggaaagccttctgctcctgctgatggtaaagctccttcaccgtcgtcggaacctccgcaaaatggtattttctgatttgtttcacctcgctttttaaaaaatattatttttactggcctccaaaaaataggtttaaaaaatggattaattaaataaacaaacattttttaaaaatttatcggtttaagataagttgctttttatgagccaataaaagtaatggtaaaaataaattataaaaaatatatttattaaattctgcgttgtattcttggcgaaagggccaaaaacccaaatcggcccaaacaaaataatttacttttgtaaaacttttgtatttgtttggatttataatttctggggggggggggcggggttcgtattcactaatcaggaaacggaacttatttgaccaatcccgaagccataacgagaattgacaatgaagaagattaattttttatttgaatttatgactcaaaaattgttaattgaaaacattagaacatttccaatgtgctttttgaattaatttttttggcttgataaaacgcaattgattttataaagtgaattttttatttttaaattcgacaattggggcttttgagatgggcagaatacggtcagggtcgttttcgtactagctggacttttgaaatgggtagaataggcatgcagtccaaaaaataaaactaataggacaaacagtgaaattccgcgccaagcaaactaacgttttaatggctaaatattttcttgccttggtaaaaccttttatttaagaaaatttctcagaaagttcttttgaaactccgaaagcaccgcttaaaggggacgacgaagactcatcacccaagtgccccggggctcccctaaaagcaacacaaagtaagcacaattgttaaaaatggagcagtaaataaaacacgcattaattaggtatttattatttattccgattaaataatatttaaaccaatggtttattggtgccattagcaatgaatgagcagcataataaaagtatttgttttaagagccttcagttgaatcagaaaaag

SEQ ID NO: 7777 - DNA, 1487 bp, Heterodera glycines
  unsure (1)..(1487): unsure at all n locations
agagcactaaatnttgctatcaaattacttttggatggtggtgctacgtcttgaattagttgaaaaatagatcaccataatatgatcaattttaatcattttcccttgaaatatgtactattgaaaacagtcatttttgagttgtccaatttttcatcctctcttgctctgtgggtataagacgtaagcctaccattcaaaaggcaaatcggttgcaaattgagtgatctttccaatgggccaactcaaaatttctaaaaaaatataccaaccccctaggaattttttgaatatttttccgtagccattttcggggtttcaaatcaccatgaagaagtaatctgatcaagttgacgcaaaagacttttttatcagcatcaaaaattagctcagcagaatttttttcagaatttttccctgtataaaattgagttactgtaggataaatatttgttaattttggatcagaattttgaccatctctcacctggttgaccatagcacatacatttcatatttaattcgggatttttttgcgaatgtgaagctgacatatgagctattaaatgaatatttgcccgaaacgcatcatttattaccgtttgtgaacgcagacaaaaaaaacttatagcccaaaaacttgggctggcaaccgaaacgtcgaccaacgccgaaacgacccttttaattcggcggtgccgataggcttcgccgggggaattttgaaatttccgtcactcgtaattgcgtccagtcctgaccccggtgctaggacgaagttacaaaagtatcaatgattgaaaaatatttaaatttaattattattttattttatttgctaaaaatacgtcataatttagcttaaagttagtcaaattaattaaatttggtattggaattagtgagtcctaaatttttcggaattttttgcttacaactttttgtaaatgtttactagattaaaaaaaaaattatactatagtagaggataggtagagctctacctttcaataccaagattaattaatttgactaagtttaagctaaattatgatttggccaaaataattgaaattaaacttttgtctttgtgtctttacacttcgccattcccccggctttctgctggccattttgtgggccatttcaataaattagctgcccaatgggaggctatcatttggaagatggttgaccacctgttgctgctggcagtgttagggtgaaaaatgggcgaaataattgtcgaccgttgtaaaaggacggagaatcattcgtccaaaggccaaaaaagcattttgttggattggattggaagctaatccaaacagcaacgcctctgcagataggagaaactgaagctattatcggacgggggacagcagctcctaaatcctttacaaaattaagggaaatttcgaaaaatttaaaatttatttttttgggcaaaatatttttaaaatttaccgcccccccccccccccccc

SEQ ID NO: 7778 - DNA, 3565 bp, Heterodera glycines
cccccccccccccctcaaaaaatataaatttttgtttatatcagtgtcgacacaaaatgaaactgttgttctacagcctgctgttcactgttttgctgctgtttgctgactatgcgtttggatacggtaggtgaactacggtagggcagcggagggcccaacatttattactgtagatttaaaagggctaacaatgtactgtatttcaggaaaacagcccaaaactgggcttgagagacgccctcaatggggcctggagttgaatagcaaagccgacggtaaacttgggcagaacaaattctgggaccgctacgggcgtcccgcgtcgcacggcatttggcacggttcggtggcccttctgacgcgaaatgggcacgagtgggcacgtgccaaacagcaatttggacgcattggccatggcggcggtttcaatggacagccgggcaaagggacacgcgaaaacgagatggagaagtacaagcaggagcaggcggaaaagcagaagaaaaagggtggcggcagcactgatcggaaaagtgattgatgtcatggaaactcataaaaagacttaagctaggcctaagctttaggcttacgcttaaaaatcaggctttattttgtaaaatttttattgtacgattggccattgactcaactgattagggttggttgataccgtacccgctaccatcaaaagcacccatttttttctctactctgaactcgataaaaacgttctcgagatgaccaaacacaatcacttattttaactttttagtttggtcagagaatttatttatcaacacattaaattccagtaaataattatagctttacatttatttatttttttgctaacattgcccttttccgtcgtcctcgtcttcgtcctcctcattttgcattccgattggcacaaatgccaaattcgttggcactttcaaatgcgcaatcactttgccctccgtttccaacagaaattcaaaattgaactcacccttacctttaatatgagattaaatttattaaataagaaaataaatttaaaaattcactctgaaattttaaattattttaaaatataaattttaaattgtttttttattaaatatgtattgacattcttacagcgaaaaggtccacaaaagggatgccgaatattcgtagaataattatttaactaatcatggaaattcattgatttattataccaaaaataaaaaaatgcataaataaagtaaaagtgtttgaaagattctttcaaaaatgataaataaatattggtaatgatcagtgatcaatcgcttttccttccctttttaatcggtcaaattatcgtcctcctcctgtgccattttttgctgttgaaaatattccatacattttgcatccaactgaatgaaattaattagttaattaaatccaaaaatcgctaaaacaaatagaggacgtcgctaaatcattcaatgttttcgaagccgggaattttagctcagcccaattttaatcaaattttaattaaataatagagaaatctttggccctattaattatataaagaaactgaaatttggttgtatctgaaaaagttatgaaggctgtcatattttatggtcattaaataaaaagaaattatttattgctcaatgcccatattgtttaatttgattaagttgtgctaattttcccggcgcggaccctaaaaatcttatttttcttgagaaatttttgcttcaaatcgctaaatttggtcattttttggacaaaatttgttaagtatttgaattaaaaattataaaaattttccccggcggcgcctatcggcaccgccggacctcccccgccatgttttcaaaaattttgaaaaaacgcgccgcaaaaaaaaggtaaaatttttgatgaaaatcattgaataattttttaaagcaaatatgtatttaaatagatcaaaaaattttttagtcaccttttacttggttaggaatttaaaatttagcctattaaaatatttagaaaattttttattattttttatgttttttccgacttccgaattccgatttccgacgtttttggggtcggaattccgatttccgacttccgaaaaatttttgggcctcggaattccgatttccgaaaaatttggacccccggaattccgatttccgaaaatttttggggcctcggaatgcaatccctgagctgcacagaactgcttttcatttatggaaacagtaacacgttaattacggataatttttaattatcgaaataccaaattatcgagtttttgccattttattttatttttcataccttttttggttttggttcgggaaataatagaaactatacctcaataaaaaaagttcccgtgaacgggaatttagaaagagcgagacgggaatgggattcccggcttttcccattttaattaaaattctgataaaatcaaaagtagagtaaaaatgaggatgagtatcaaaaaaagggcgcctctatttttggagaaaggtacaaaatagagattctagtgacgaatagtgattttaaaataatgggagtttgaggcgcgattatcatactctttctaagtatagtaacctttcatttagtgtccgcaaccttcgttgtcagattggtggagctacttttgtttttgatgcggatgtattgccttcagatcagtttatgatcttgtaagttaaaataataattggaaattttttttctcaataaaaaaatttataaattattatacatacttgcaatttttcaaatggaatttttttttatttgctccaattcaaaaaagttatggccattgaactataaaactttctcgaacattttgttattttggtgcatcagtgtgataaattcctaaatatctcagtcctcgtcataaaatattgtttaagaatgggaatgaacatcatgttactaaatgcaatcaacgttgatttgcctaaccgcagtgcatttgttactggtggtcgatcaaagccatttgtaactgaagtaattttttatttgatttttgctgtaaatttattacctgcgccagttttaataatttttagttttaatttaaaagaaaattttcaggaaagatacacaaaccgatgggctactgttttaaaaattgaaacacttcaggaataccatggtatatagaaaattctcatttcattattacattcctcaaaatgagttccataaaatttatctaccattttacacctaattgaataagttttataaaattaaaaagagacaattttctacaaaaatgtgtcgtaatataatttttttctttttctttagaatggtttttttcttttttaatatattttttcatcggaacccttttttgtgtttttaattaagtttattcgtgatttctctataatttgcgccctttctcattgctttttttttattaagccattgctcgtgccgctcatcaaaattactcctttcacggttttacggatgatgttcgtttttatcaacaatttttgatgagacgagagacggagcagttctacaaacaatcgtaata

SEQ ID NO: 7779 - DNA, 1946 bp, Heterodera glycines
aaaaattttggacccccggaattccgatttccgaaaatttttgggggctcggaattcgattttccgaaaattttggggccctcggaatgccatccctgatatgtatgtatgtatattggttccgaattgccaccatgtataattgtcatattatcactaataaaagaaataaaactaatcatttgacttccgcttatttcctcttcaaaaaccccatggaattctgtgctcagcagatgaaaaaaaactataaatctttcaaaaatagctgaatttggtgttttctcaatgttttttctcaattgtcaatatttgctctttttgcatttaaagatcccaagaccataagctttcggttgacaccaagaatatagacattgatcaagtaagaagatagtaatggcctctttgctttaagcgacagagtttttggtagattattttttttaataacaggttttcacggtttacatgtaatattagggattatctttatttttattaattttttcgtcagaaaaataaaagtttaaatttttttcaccatattggttttgaattttctattatttattgacattttgtggatgtagtttggctttttcttttttttttatttattgatatgaactgaggatgatcacattggtcttggggagtatgagttggcttacaaattagtgcaagttcggtttttattaccaaaataagtgctaaaatgtgaacatttatatgataaaactacttaagtgatataacggaaaaaataagtcgaaaaatgcattaccgtatttgctaattattcttatggggaatggtaaaaaaactgaatgcatgtgacaggattcgaacctgcgcgggaaagatccctttgtgacaggagcacaacggcttaaccactcggccacacatgcggcgataccgtaggcacttcggcatatggtaacaatttaatggaccaattagcaaaaaaaaagaaaaaaattggtgataaaatgattgagttgagaggaaagcaagcgtttgtgatgatgacaaattaccgatggacaacattcgtcaaattcacacatcactcttttttaattgatgtgtatacatacagccacggcaaaaagtattgcagcaaaaaaattttttttgaaaaatccgattttatctaaaatgaatgggtggggaaaggtcttaattatgcaaaagaaacatcaattagtgcgctaataaatatccaaaaatcggcctgataactccttttgtcgacgagaaaattgctcatgatcaaaacatcgcaccttttgggtgggaaaaagtaatgcagcaaatgtttaatcgacccaaactcaattttatgaacgtggggggcccaactgacgggttccgtgctaggcgtttcgtaacgccattttaacaattttttcgacaaaacatggcataacttggcttaaaggcaataaaattttacattcttggtaccatttaatagcccaccatttttcttattagcctgcgaaattaaaagaaattgtcagctttagaaaaagtagtatgaaaataagtactatttcttccataacttatgttaaattcatacttttgcttttttattaaattaaaatttaattctcgtggaaatttacgatttattatgccaaaaataaaataaaagcatgcataaataagtaaaagtgagacaatggcattcgaatttcggaattgaaagctttcaaaaatgataaataaatattggtaatgatcagagttttccttcccttttaatctgtcacggcaacagctttcttacggcggacccccagtggtttaggaagcgcaattccattcttcttcagcgtgtagacctttccagcgattttgactatggtgtccttcttgctcttcaagtcgtacccactaattatcctgaaataaaattgacatcatcagcgtgg

SEQ ID NO: 7780 - DNA, 4272 bp, Heterodera glycines
aatcgatcagtgcgcttttgctggcgctcgaccactcattgaccatccctttttcttggtccaaatcaccgcttccgatcttttggccaatgacagcaaaacaactgatcaaagcaatgaaacgaaattatttggcattacaaaagtcagttttaacgcataaaataaagaagcatttccaaatttgaaacgaatttattacttaatgaatttttacgctttttctccaattatcaaaacccaaaacaggtggcagtgattattcgaccaaaaaagggatgtgtaaacgaccgaaaggtttatttggcggaagcctccgctgatcagcaaaatgatgctcttcccgccacatttgcggatggatcttcagaaactggcgctattctttcagggaaaaggtcgtttttcaaacaaaaaatgcattaaaatattaaatttttattaattaaatttttaagtgtatttattatttttcatatttttgttccattttagagctgttgaaatcgtccgaagtacaaaagaaactgcaaagatcagtttgaatcatatcgacgcgcaaatttcaatcatttccattggaaatcttttcttcaatgtttttgtccgtcttcgttctccaaaaatagaaaatgtaaaagtaaatgcacaattatatacagtaattaatagtaattaattccttttattgcaggcatttcagtcatcgctttgtgtccaaaattgtccggacggcgcaaaaatggacaaatattcggcatttttaaacagcaataaagaaaataaaggtgtctatataattttttaattttttgaattattaaaaaattagaattatgctcaaaaatcgtcggtgaactgacagcaaaagatggcgaagataaaagtgccaaccgacgacacaattggatcagttccatctgtgaaaaggatttggcaaaagcatcggcggcaaaagcaacaaaaaatgcttttccaacgacgcattggcttaattcattgatttacgctgctacggaaattgaagttgcttctgtaaatggccaattttacaagtaaaataaaaatctagttaataattaatggacaatgcaaatttttcgacagaaattagaaattatcaataggaaaattttacaattaattacagaagagcattgatcagtctgatcacttttacatcgtattttgaaactgatcattgtcaatttttaggaaacaaagaccattttattacaaaaggccccaattatttttcactttgattctttaaattctataaataaactatttgtgaaaaatttataattttttagcgatagtagacaaacgatcgacaaaatctttgatggtgatcctttgtccaagaatgacaaagtgtcgcctttcattgattctgggcgtttatctgacaaaaaagcgatcaatggccatcaaaacaaagccaaagaatttgaatggcttccccattcgaagcacaaatatttttcttcaaaggcatacgacaagtcattatcattggcattgccatctcttctcatattcttgcaaatttgttttattatttattatgtctattaatttattttaacaaatttattttatgaatcttttgcaaatatttattattatttttcaaaaataaatattttttctttaaaaagtcctcttctgtctcaaagctccgtttttcgttcatattaaaggtgaagaaaaagtaaattttatcaattgagaaattttttatttgaaaattatttttaaattttccataaatttccatacctaattaaaaatgataatgcgaaaaaatataccaacagaaaaagacaaagtattttttaaattatgtctaaaaagcttcaactaacataatttattaagcccatctgccgaaacacaacccgaaaatacattaattaatttatggacaaaacattttttctactctaatgtccttttcgattagcaaagtaccacaaataaagaataattacaaaaagatttaaaagtacaaagatcgattttcattttcaaaggggaattgtactcgaaacattcatgttcacgtttctgaccacgttcacttgaacatttccgattctgttcagccattttccgatcagaggccattccgcgaactgtttgcgaaacgcgaggcgataatccttgctgaatttgaattgaattttcaattgctgaattttaattgccattttattttcccgtcgcttttccctttgccccggcacctgaaaatgaaaagtaacggcgcattgctactggcggcaacgcaagtcaaaagggcgaggattgatggaaaaacatggaaggtgaagaagggctgtgatggcatggaagaagcgagcaaaacaaagacacaaatgaaaaagtaagagccgacaacgaaaagcataatggcggacagcgacttgaacaagcgatgtttgtccatttcggagcctttagtaaaaagacgacaattaattattaattaaataattaggaagcaaaattaggcaaatgcctacattttcaggaagtgttaatgctaaaataagcaagaaaaacaattttcacttagttttgagcttatatatttataaaaaattttgtgcctaaaattgactattaattaattatttaattaattactaatttaatgcgatttaacgctggatttacggaccactcatttttttccaacggaaaacgagcacaattgcaaccaaaatataaaataagaaggaagtgcagtcaatcagcagcccatttcgcaacgctgtttccgccgccatgccaaaggcgaacgcgtcactgttagtgcacaaaacgggcctaataaaaaacaataattaattaattaattgattgatttaattgaccaatccggatatgtaaaaagtgcccaattagcagccatcacaaccatataaatgctgtaaccgaaagtgacgaaaagcatcggagagatgtaaagaaggagatgtttctccaaaaggttgcaactaattgatccattaattggttaataattacacattaattatgcaaaattaccgtaacggaaagagaacggcgattaatcggtcgaagccgacaaagaaaacaatccaaacggaggagaaaatgctcaaatttggcagaagttggaggaagtaacaggtgaaaagggagatgaagttgtggccagacaaagtgacgacaaaagtgacggagaaagtgagcaaagaaacgatgtcgagcaaagaaccaatggccaaaagggtggagcaagtggagcggagactccttggaattcgggggggggggggtacaatgttttaatgagacacggaaaaaccaaaatatacatacataaataatgacatcaaagtcccaattccgaaaatggaaaaatatggccaaagagtctcaaattcggtattaattaaaaaaaaatttctatattaatgtatttccaaaaatgaaatttctggatacaacaaaaaaaggtttcttgattcattttagccgggatgttttaaatgacatttgacaaaggcatcttttgctaattatgcaattaatatttaaaattgacaaaattaacagacttctgacaaatgattgtgtgcaaaagggcgccgttgaagaacaaaccgggcaaagaaagaagccaccggaaaagcgaggaaaagaacaactccacggagaacactccatggccaaaccgagcaaatgcccaaagttaacgataaccaataattgaattaattaattaaattattttaccgggttttccatggaataattttgaaatgacatttaaatggaaaataaattgacaaatgaattctgtcttttttgaaattgacgctaccttttgaagtggttaaactttgcttacggtttgtgctaatcacgcaattttgttgattcttggaactttattgtaataattgcgtgattcgaacaaaatttcaaaaaagaaattaaataatttggtacaaattttttcagcttttactttttccatacaatatgttaaaaagacgtaaattaattaaggtgtaatgaaatttaaaaagtatatgttctgattttttaaattttcttatttttgtgttaattcaatacgatctttcatatttttactaaaagttttaaatttttgaatgttttaagaaaacatttttacatgcttacgaaataatcatcatttatctaaaatattattattttagcttaattcttttaaatttgaccaatttttcatatttttcataatga

SEQ ID NO: 7781 - DNA, 2745 bp, Heterodera glycines
  unsure (1)..(2745): unsure at all n locations
accaaaatgggagtcccaggttcgagtccagttcatgctgtagctgtattttgatatttttaagagaaaaataagaaaagtcaccaaataattttaaaaattgtttcaaaattttaaacatttatttgccacttgtaatgaaaaaaccatcaatcctcgatcagtcaacgatatcgacgtcggcatcttgatcactttcttcattcgttttgtgttcctccgcttgctcccgtcgttcctcctccgcttaattagttggataacatttttaaatccccttctgtcaacccaccagattcaattcgttcagataaatatttttgttttttatccttataaaactgattttcttgctgtttttattattatctcttttcttttgccaatttgtgttctttttttccggtccgtcccttccgctgacatttgccataaaacactgaacaattcgaaaataaaaataatttcttttcgtctccctttttcgattgttctcattatcagcactttgataagcaatggattcggtttgaggaaaaaaagaacgttttatttagtcaacattttcaaagtgttgcattattcgaccgattgagaaaggactaaattcagaaaaatataattattgtgaaaaataaatattctccaattaattgttcgttttacccattgtttttccgatttctgtccaaattaagcaaataaatgtctctcaacaaagaaaaatatttaaagtaaattgcgcattttttgcgttggttattatttccaagcaaaaatgttgccttcgtaattttctttttccatttgcttacttagaaatgcttttccgtcataaacttttcgttttgctaaattctgtcgcacttttctcagtgatttcctccgctcatttgcaaagtcattgttcgtccggttggttttcgcacaaaggcaattgttacaccgtaagagctaattacccaattaacattttttaaataatatttgtgtttatttaaattccctcctttttaaggtgatcgccgggggatggagtgcaaaaagtgcaagtgcaaactgttcaattgcaaatgcgacactaatcaccccaaaaattatcgaatcggacgaagaggaagccttcctcagaggcaattaaactgtttttcccaagaaaattaaatcaaatattttcagatttaatttcatttaatgcacccaaaaagaatggccaaattttggtgggagaaaacattgacatttttatatgcagaaaagcaatgggaaaatattaacacaattttaatgtgtcactttattaaataggtataaaaagtaattttaattgattaattggactgaaaagagagcaaaatcattcatttccataaattatgaagatccgtaaataaacaaagtgagaaatcgaagaaaggacaacaacaaatgaatgaacggagagagaagagagtgagtgatcaatcttttgtcaatcacccactgatcagtccgatttaattggccaaaaagtgtcggcgtttgttcacttcgccgcctgctgttgccgactttgcaaaatttctttccgcgatgcttcctatgggcaacagaaaaaactttaattaaaagtgaaatgaaaaagcgaaaatagcgccgccctttccttttgaattggcgcggtaaaatagagtggaattaatagggaattactcacaattagtcatttcatacaaaaggcacccccccccactcatttgcaaatgtccctaaatgatggggggggggggtctaaaagaggagagagagggtgtcgcgacaaagaattggttaatccaaattttatttttcgccatcgcctggacctcttttctcctcccttaaagtatgaatcattttaatgggaattgaattaaaccatgggaaaggtgccaagtttggcgcttattggcccacctgaagcagtgccgtgtcaatgccatccgtcggaaggtgaacatagcgaatgacggagccacggacgaagcaatttttcaccgaaatcatgtggggatgcctgcgggggaagttgtttaattcccataggtaattcctttaagtgcttatggcttttcatttaaatttgtaaatttgaacggattttgcacaaaaaaaggaattttatgaaatgtaatttgttaaacgtaaaaattgaaaatcatctgcacatattctggggtaatggcgttttcccagccccaactcgttttcggagtttgaggcaaaaattgactttttataatattcaatttgctggtccctttttacctgtcaacgtccgtcaccgaaatgtcgttgattttcatgttcaaatattggtctacagaatgtaaagtgccacaaatactgaaaagaatttggaatgaaatcactgttttttaattccacctgaggtcgtttttcagctcgacgatcacttctctgccgaccatcgacttgaaaaaggagaagaaaagcatttgccaagttacgatttaaatgcctttgttgtgaaaaatggttattatgatcatttaaaatggaaaaataaatcgcaaattaaacaaaaataaataaataaatgaaaagagcaagaaatttgctttattaaatcaaaattgaaaaaaacaaaataaagaacccaaaaacaaaagcattatcaacctttttaggtcattcgtcgtcacctttccaccaattcatttccaaataataagnngcaccggtgaaaccgacangagacaatgg

SEQ ID NO: 7782 - DNA, 1086 bp, Heterodera glycines
tttcaccgaaatcatgtggggatgccgcgggggaagtgtttaattccatagggtattcctttaagtgcttatggctttcatttaaattgtaaattgaacggatttgcacaaaaaaaggaattttatgaaatgtaattctgttaaacgtacaaattgaaaatcatctgcacatattctggggtaatggcgttttcccagccccaactgttttcggagtttgaggcaaaaattgactttttataatattcaatttgctggtccctttttacctgtcaacgtccgtcaccgaaatgtcgttgattttcatgttcaaatattggtctacagaatgtaaagtgccacaaatactgaaaagaacaataattaaattataacaatggttcaattctaaaattaaatataatttggaatgaaatcactgttttttaattccacctgaggtcgtttttcagctcgacgatcacttctctgccgaccatcgacttgaaaaaggagaagaaaagcatttgccaagtcacgatttaaatgcctttgttgtgaaaaatgtttattatgatcatttaaaatggaaaaataaatcgcaaattaaacaaaaataaataaatagatgaaaagagcaagaaatttgctttattaaatcaaaattgaaaaaaacaaaataaagaacccaaaaacaaaagcattatcaccttttaggtcattcgtcgtcacctttccaccaattcatttccaaataataaggcaccggtgaaccgacagagacaatggccaaaagaattcgcttccgaacctcaaaattaaaacaagaaaaaattaccgccgaaaatttttggcggaaaatcaatgcccacgtggaactaaaccatctgacaattcccgtcgataattccgattatgctaatgccgaacagtctcgtgtccccacctgtgtgctcgccctgctcacgccgatcaaattgagtggcctcagcggcggcactccgtcgttggcattggcgtgcgtacatatgaccatgaactcagagtgctgctcaggcggcggtctccgataaacaaatagtcacaaccgaacttggcaccgtcggc

SEQ ID NO: 7783 - DNA, 3937 bp, Heterodera glycines
tttctttctttctctctttttctctctctctctttctctctctctttcctatcctctcatttctctctctttatctctctctctctctctgtcatctctcagtcttcccctctttttctatcgttaccatttcccccttctcaatcgctgtttatcttccactctctctttaattgtcttcttgctctttctcgtttatcttctctttctctctatctcttcttctctttctctctcagtctctctctctctctccccttccttcctgaatctctgcattctgtcccctctctcgcttattttttcatctctctctatagttcattcagtcctgcgtgacaaccgcacgcgttacccactctacccctccccacccgagccgacagagaaacatacactgcactctctcctctacccatcctttctctattagtctccaattatattttttaattttctgtttctttccctctattaaaacaaaacaccactttaggcacaaattcaaaagagcaaaaagtgggcggagcttcgcctcgcttaatatattaggggaatatattaggggatttctaattaatgcatttttgaaaatctccaaaaagaatggccaattaattaattatttgtttaagacacatttattattttttaggaaatattggttcgcaagcaaaataatttgttgagaaatttttcaaaatagaattaaatttagcactttttgaaccagaaccccaaataaaaaatagaggtgcgccgtgaaaaacccccaaaaatggctattaataaaaaaagctaccaaatactcaaaaagtgttaaatttatggatgatcttgggttttctatgtgttaattttactatttaaaattttatttatgtcttcaaagcgcaatatttataacaaaattgattgaaaattccaaaatttttcccggctgcgcctatcggcaccacttcaaaatttgaccaaataattagtgaaatcagcaacaatcgttgggtccatttgagaacaaaataaacaatcgatctttgaggaaaataagccaaatgataattaatatttttaaaaaaagttctcagactttttcaataagacttatgcgcaatgttaaaaaaattaaaaataattgttaacactggcaaaagcagacgttgttttatcaatttttgggaggaatactttcttatttatataatttttttaaaattttcattagattccccaaaagacgggtccccaagttgcaaatccccaaaagtcgggtaatccgtggtggtcgtaaattggtcgtgtgagtatttatgaataatttgacagaaaaaacgaaaggacataaaattattaagaaaaaacggaaaatccacaaattcattaatcttccaaatcgatcaaaggccaattggccaattccattttttgcgtcggcctctgtgccgacattcccggagtcgattgatttctcggcggaggaagttgagatgacggacacagcatcctcgtcctcttcggcatcggtcgacaacaaagctcttaggaaatgaagtcgaactgcttgttggttggtcaaatgaacgagacgtccattccgtcgaggaccgcctctctgagagcgaacagggcctgtcgagagcttatccaatttctctctttctctgttcagtccacccgaccaatgcctcttgttaacggcatattggccgatttgttgacaaagcaatgtacgcagttgaccggacgaaacccgtttttttggcgacagtgaaccggcagaaagcgggggcacggcagggcgacgaggcgaggcggacggaggacgacgaggaggagacggagttgacaggcgtctggcggaacgaaccggcgaggggaaaagcagacggtgacttggcgggcggccgatttagaggtgacggcgtcgacgggcgcatgacgggacagaccggcgccggtgagggtgaaagctgacggcggcggtggggcgacaaaggaggggcaggccgagttggacggcgaatcggagagcggttgggcactgcggagtaggtcggcgagagtgtcgtctttccgcttgtgccaaatcgttctttgcttgtttaagcgccgcttttttcttgggcaaactcataattggtggtgatgagaataagggaaagttggaaggaattttggaataaaattcggagaaatgaacggcttaaataggctccgaccggtaaatcggccgaataacaacttaatcataacagtgcttgaacgaattatgggaaaggtcgaaggtggcggaatgatcggaggtgacgagtcactgagaatgagcaaccgccgaaaggtgaattggcctccaattgcagaataatttgtaaattccaatcgctttgcaaataaatgagtgaatgaaaggtcgaatatcaaaaagcgacgtaaaaaattggcggaaattgtgctgactgatcagccctcccctcaacgaatggcatggcgagagacgtccaaggtgccaagaaaggtcaaaattataatcggtgcagcagattaggcacttctcagggtttgcaaatgctgatgcgaatttcgaatttcggcattggcggttgttttttgctgagtcataggcaggcaggcacaatgaacatgattgccgtccgagagggcaatcgaggtggttggcaccggtgccatttgtaaattgtatttcgttcgggataacattagggattttttggagaaaaattaaagaaattcaaaaaaaaccgaaaaatcgaaataaaccgaaaaattttcttcggttttttcgatttcggttttttcggttttttaaccgaaaccgttcgaccgaccctcttgtccggtctttacaagaaattccttttaaatttgtgatttaaccatttttttgttcatttttccttgagaaaatgttttttttattaaaaaattatttttcgtccatattttcgtcttttggcatttttgttaactaaaaacccgtatcctattctagctattgttttatataaattcttttaatttctaatgattatttcatcttttattataatccattttaccattattttatataaatgttacaaaatttgctgacggattgtccggaagccttcctaaatccaacaggacattccaattaagataaaaaatggccgacaaaactactattaatcttattcttcaacgacttgaagtgattgaacgtaaagtcaacaacaacaacaatgccgttccagttcagttgaatgaacaactgcaaagcattgttgaccgtttgtgtgacatcgagcggaaaattgacaccgcaaacaacaccaactgcaacgcgacggactcggaggacaaagagcggaagcgcagtcttgtactgatcggccttccagaatcaaccaaggaaaagccgacagaacgggccaaagaagacgccgacatggtgtccaacgttttggacgctttggatgtagaagtgtgcccacagatggtctaccggatggggcgccggaatgatggcaagcggaggggctctcgcctggtcaaagttgtgcttccggcgagcacctttcaacgcttcgctttggcacaatggggacgacgccgaaatgtactccgcgcaaaaaacgaggagtgggatcggctgcttgttcgaccgtcgttgacgaaagaggaacaaaaggcggaacatgaggcgcgtgtcaagaaaagggaggagtacgaacaaaaacgggatggagtgacaattcgcggacaaaaaaacaattgaggtcacaaaattttgtcgattttttgtatttcaattcaagaagtttagtaaataagttagatgatttaaaaaatttaatgatagaaaacaaatataaaattattgctatctcgcatagaaggttgagcaataagttagataattcgcttatagtccaaa

SEQ ID NO: 7784 - DNA, 4195 bp, Heterodera glycines
acattccacatttttccagggcttttcttttcggcggttggtggaatgtataaatcacaatttaaaacatcaataataacgttgaaatgaaataattgaggtcatgttgctctcaatccgcgccatcatccccatgttgtgctgctccaccatcttgtggaggcggaggttccggcccaataatcattaactgtggcggaggaagtgacggatgtagcggagggggagtatgcggtggcggtggaggaggatgcggtggtggaggagggtgcggtggcggaggaggatgtagcggtggcggaggatgcggtggtggaggagggtgcggaggaggatgtggcggtggcggaggaggatgtagcggtggaggaggatgcggtggtggaggagggtgcggaggaggatgtggcggtggcggaggaggatgtagcggtggaggaggatgcggtggtggaggagggtgcggaggaggatgtagcggtggaggaggatgcggtggtggaggaggatgtagcggtggtggcggagggtgcggttgtggtggaggagggtgcagtggaggatgcggtggcagtggcggaggatgtggtggtggttgttcttgcggcggtactgggggagggggaggaaacgccatcggctgctccggaagtgattgttctgctggagggggtggaagcacaggaactgtgcagtcggtcgctcaagtattcggcgaattactggtttaaaataataattactctgtcttattgttagtcggacggggaagtgccctccgccggtggttacgctcagccatcgacggaaagttcggcctgtacagcaggcgagggttgttcagagggagaaggagccccccagcctgaacaacaaatgcccgtccaaataaccaatgagcaaagccaatacccccaacaacagccgcagcaattgcctcaatctccttcctccgattctgaccaaaaagaacaactacaaccagtgccggtttcaacacaggaagagacttcgcagcaagttcagccagcaagtccagtggcagagccatcggaggccgcagaagcagcgactgaagtgccggcgccgagtggaagcgcagcgacggggtacggaggcgcagaatcgccggcagccgcgggcgaccgattgcaggaagtgcaggaggagccaaacgcagcagacgaattaagtgcaacgacaaacgaagtccaaaaaccaaacaaaacaatgaatttggataattttgacttttctcaacaggaagaaaaaagcaaaacggaccgaacagaacaaaaagcgaagcatcagcagaccacggcggaacagtcgccaattggggcggaagcgacggcagcgaatgcatcggccaaaacgaacaacgaaaatgccgatttattcgtggaaccgatagacgtcagccaactgcaactgaccaatgacacggagtgcaacagcgaagaactgaggcggataataaccaatgttggtaaaccaatccaagggaaacaaatgcgatggggggggggtagatggccattttacgatgaagaattggccaattcattttgtaaaaatgcctaaggcccattgtttatgctacagaacatggacaatgagctgaatgttgccaaacggtccatccaattggctgccgaagctcggttcggcggtcgcttcgatgtcgtctgttcccaccacgacttttcttacataacaaacactgtaagacctttcattggcacgttcaaaagtgaaatgtcattgcaccaatcacaggaattgtggtgccaagaaacgcgggaaacgacgagttgttatgcgtacagacagttggggtactgaactgaccgacgactgactgacggacggtcaaattaaatcattttcattttgcatatttaaaagtccaaactgaatttgctcatctctttttttgccaaaataaatgttgtgataattttattcgattaaatggttttataatattcattttgcaaaaccatttcccgaacggagcaaaaactataaaaaaggcaatggcacactgaaaaatgaagaaaattaaataatatgaataaatgtgactgaaaatatatttgaaaataatttgtcattttatatgaatttgataatggagaattgagagaatgttttgtcccgttgccttccgctgaaagcccaccgcttcgctccgttcgtcgctacgcctccgttccgccgggcattgcctccgtcgcctcgtcacttttcgtcggttcgtccatcgcttccatctcttttatttccctggtgctctatcaaaaaataacttttaaataatattttatagccaagacaattttgagtgggatgggaagtgaagtggtcaaaccgccgggggccttttggtgattatcttatgctaattaaccgatgagccatcccaacactccttttagcgggtgcttcgttgttgagtcaattatttcatttcattttgcctattaggcactgcttcctcgtcccatataaccgatacatttgccaaaaaagagaagaatcacctccaaaaactgttggaatttcaccgacttgcacaacacttcgttgttaagcacaaactggagaaattcttcgatggaattccttcgctcggcaatcgtttgagggtcggtggcaccaaaatatttgggctccgcaaaggaagggaatttgcccttcagataaagctaaaaaagtgctaaaggtttcagaggtcaaaaaacgcggatttataaaccgatcgatgtatggaggcgagggttgagtaaagggcgctcaactctttgtagcgagtgatcaaaccgaataaccgcggctcactgtcaatggaattgtgcggtgtggccagaaaaaggaaaaggtacaataaaacgagtcgcagccaatctaaccgaaatctccaatttgtactcaacgtggccgaacagtcggctcgtgggcatagtcacatcgacgactttgggagaaaaaccaaaatgctttctttccatataaaccaaatttccgagcacagatttgcagccagtttcatccggcaaaagagaatacatttaacaataaatttgattattttatcaaaactatttaattaaagaattttaaaataaaatagtttaagttggccaaatgcttttaataattattattttagcatcttttgatgcacttccgaatgtttaaatgaaaattaataatttgtttctgttaccccggagcagaagatcagaacgtacaaaaaaccacagaaaaagtcctcaaaattgcagcacaaacagacgaagtaagtacggcatttgaggtaaccaatgctattttcttgtcattctaaagattttgctccgctaaaccaattgtgtcgctattctgtcggcccatcacgaattcgtacaaaggaagaaatttgggatggattcagacgattcagagcaggcaaaacgaaccataatttttggtttagttagaaaattaccaattttaatttaggagacatcgtcagaattatcgacgaagacgaggggaagggatattttgcgcaaacagttgcatttatcaccgatgactataccaaccaatttgcgatggtcatttggcttcttccgaaactcagccgcaattcatttccaaaaccatttgagtttaatgccgacagatttcagcatggctttggtttgtcctttttttgaccattttcattttgatgaattcttttcagccgaagaacgccccgtcccaatcaaagcttgtaaaaagattcctatttcgaaaggttttaaacttttatatttaggtgaatttataagcaaatgtccgccgttccctccttacaaaagaaaatggacgccaattaatcaaatcttagctcaaaaacgcagcgaaatcactcgaaggattgaggaaatgaacctcaaatgacgcagagatataattttgtttattaataaaaataatttttgaatttttagatttttaaaaaagttactgaattcgttattacttttattttacttatgttctttgtttaaatttgtttcagatggtatccgaggaaaaggacacttctttagtcggggtgacagaatgcagaataaaaatttccaatttttctccatttgctgggactgcccaattgaaaaaaatcatccaagggtaagtcatcttatggacatgcact

SEQ ID NO: 7785 - DNA, 1115 bp, Heterodera glycines
ttcaaaagaaattgacgcaagcgcacgcaacgaattctttaattgcgaaggaatccctccctaaaaatgttacttttttgtttatttgtttttcaatttactcccttttccattaggttcttccctctccattaattgaacaatatcgcaacaaatgcgaattttctgtcggttattcgtccggcgacaaccgttctgcggtagttggttttatgagtggcaaaatggcgaacagacagtccaatgttttggcgccggatgagtgttcgaatctcacccgaaacactcggtcaattgtccgccattttgaggcatttgtacggaaattcggttcgaaattcgaatccgtttttcattatcaatattctttgttttcacaggtgaagaaccattcgacgaattcgaacggaaaggcttttggaaaatgttgactgtcaaggacttctcgggcgacacaatgattatcgtgacggtccatccgcacccgaacagcgaagtcgggtgggcccggacaaaaggcgaaagacgcacaattcttttttagattaccgataatgccaaaacaaagctgagggaattctttttgccttcggatccgttcagagatgaagcggcacagtttaacgtcacttcgttttactggcaagaacaggcaaatgcgggggacgagcgcatttacgagcacgtggccggtgagtgtaaaagaaacgccatccgtacggattggcaccaatttcgactttcagggaccccctttgtctacgagtcccttctcggccttaactttcgcatttccccttcgacatttttccaggtttttatttatgatcattttaattattgcaaacattttacaaaggttaacacccgtgccactgaaactctttacgaaacgattggaaatttgttgggtttgcctgcagcacaaaaaggggacatgagaaaagacggaagcacgcaactttttaccacggaggtaaaaataatatttattggcttgtttaaatgctaattgggatttttggggttcggcggtgccgataggcgccgccggggaaaatttttggggtttttaatgaatttgttaagaaaagtccaaaaatttgcgaccccca

SEQ ID NO: 7786 - DNA, 1268 bp, Heterodera glycines
  unsure (1)..(1268): unsure at all n locations
ggggggggggagggcccccccccccccccccccccccccccnccctaanaaatgtatgctatacattgtagagacattgacaatgaatggtagttttcctaaataatgttgttcagaaacggcctttcgttgtcttggatgtgtgctgtggggctggcacggtctgtctttttgctttctcatttgtttatttttttttgcattataagtcaccgattcccgccgaacttcttttgtctccctctcctctcccaattcctttttagtctcttataaaaaaatagaaaagattttcactcaacaattggtcttcagatcagtctttgtcttatgcaacgcattcgcaaagcaattctttcgcttccttccgcttctctctgtcccatttccttcggttgcgttggcatcgaattgaacagagaggcggtgagagatgcgcgaaagaacgcatctgagaatggtttcgacgcaaaaaggtgacgcaacttattttacagctcaaatgtctgtttttgcttcagttgcgtttacattgacggcgaagcggagaaaattttcaaggaattggaggcaattaattgttcattttaaaaccaatcatcgaatttgtttcagtaccacatgcctttcggttgtccattaaatagttcacaaattttcggagtgattgacccgccgagggcgggagtgtccgacaaagtgatcatcggttgcaggagggtaagggcattggtcatagtgcagaatactcattccattgaattttacgcgtcccgtgaaattttcagtttacaatttattaatgggacgcgtaaaagcgtgttctgcactaattaacccaaatgctaactaattttgtttaaaaattcgtttttatcaagctcaactctctgcgtacgctgtgctatgtttcctgcgacccaaaagcggcaaccaaaaatttaattgatttatgcagacccccgtcaagaaaattcgatggcgacccatttcgaattgttgacattcaacccgttgatttgttcccccagactgaacacgttgagtgggtgatcaaattgaagcgatagttccacttttattgtactcttactttaataattttttaatgttcgttgttaacgatttattcgcgaaaataaaacaaaaattttaagttcgttggtacagaaaaggaaataacacgggattaacatatggacattccgatatttcctgtacgggtccaacgctaacggttcagccatgtgcgaacaaacaaaacgaca

SEQ ID NO: 7787 - DNA, 3558 bp, Heterodera glycines
  unsure (1)..(3558): unsure at all n locations
tattatccccaaaataaaacttcaaatttccgtctgtccgttcacctttctgattttgatcagcctcctgataattctttctgacaaacctcaggtgatcagttttatggttgtgatcaaaaatgacgccaaatttgttggcgttttgcctttgtcccatcccccaaataaagtgccaatttttcgtctgtctgatcactaatctgaattctgatcagccttctgacaaatcatcaggtgatcagttcttgggtcggctttttcttcgacgtccgttccgtctctgcgcgcattacgcttggcgtttcgtcactgcttgcgttgacgtttcagtttggcaatgtgctacggtatgtgccaaaaacggtatttaaattggggataaaatggcataaatttttagaaaataaatttccaatgattaggaaaattccaaaataaatacaaattttttacatttttagacatttgccacgggtcagctacataaaggtgagcaaaaagacctgaaaattttgaaatttttcattgtttttcagtgccttgacgtgtggatgattttctctgtgatttttatttttatgtaagaaaaaacaatttaaattaatttttattttataatattttaggacattggtggaattgtccatcatatgtcaagtgagtatttgcggaaattgagcatgcttttttttattaaaatgttaattaatttactttaattaatataaattattgaataaatttaatattattaaaaataatttatataacacttttacaagaaatttgaataaataaaaattttaaatttattactatggtttaataaaagtctgcacaaaaaaaagattaatatacaaaaaagcttattttacttaatataaaacattttcatttttaacaaataaattaatttcatgaaattttttttgaaaaatattttcgaaaaattaccaataataaattattttccatggccaatttgttgttacagttaaatcgctgggaacgcgagcgtcaaatcggctccaaagtgctgggccattggcttaaccaaatccgcaagacgcgcaagcagacagggcgcgccagcgattacagcggtggcagcggcgccgatgggtcgggcgccggcggcggcatccgcaaacgctttttgctttcaccgctgaagcgaagtgagtgcgtcgggaccacggtgatgccgtgttatgcggcacggattttttttgggggagggaagcgaaatagtttcgcgattttccgaaatttttatcggcattggcatttgccgcaatttttttttggcgcggcatttaaatttctgccattttcagtcactcattcgccgtctccgtccccaccgcctcgggcacaaattcaaaatgcgctttcgatcagtcgcagtgcgacggccacagatttgccgtccaaagaaaagtgaaattttgaaatggaaactggttcattaaagctttgaaatgcgatttttctattttgggtaattagtagagcccgaaatttcaaatttgcgaatcccgcgggatttcgcacaaaaaaaacaaaacaaaattgcggatccctctgcgggattggaactcaaaagttttacgggacgggatccccccaggactaatcccataaaatcccgcattttccaaaaatgcgggattgcggactgggatcccgccaaatcccgcaccgggctcttgtattgtaattgttagttacaaaattaccacttaccaattttacaacataataatattttttgtagagtagagcgggaccgggaattttttgttttgctatttatttaataaaatccaaagttaaagctaagttaaattaattaaaattttaaaatcaaattttcttcagtcatttcaaacaattaatcatttttggaccaaatcatcgaatattaatagaaattcagatttgattttcacatcacttttttcggagcgctttttcaaaaaacttttgggaaagaaggggtcccggcggaggcgataggcgccgccgggggaaattttaaaaatttgggtgcaatttgttaacagattttcaacaaaaaaagttggtttttgcgattattaagctcaattggtaggattttcatttgaaaaatgataaaatatgtatcaatttaaaaaaaactatgaggaatcatattttgtcgataggaaagccatgagtatacaaaaagaaaattcaaaataattaaatttctgtagagggattgaaccaggggaaagaagaagggaaagtcaaggagactagccattaggccatttgcacaattggcagttttacttttaaagaatatattaattattatttcttaattttttccctttaactccaattttcttcactaatttttgactcagacccccattcttaccagtgcttgtttttcccggttcccggttgccctaccgggaccgggacctgagcttttcaaaatccgggaccgggacctgagcttttcaaaatccgggaccgggacctgagcttttcaaaatccgggaccgggaaccgggaccgggacctcggatgaccgggaattcccggcccagtcccggtcccgctctactctaattttttgtattgatagtaaaacagtaaaattcaattattatttatttcttgaaaaaatatataattaaaatattcattatttaaatttaaaaattccatcttcttttcctccctgttttcaggtcacctccatctccaatattgggacgtcaaatgtgtaataataacaacaacaacaataacaacatcaccgccgccaccggaggcggcgaaagtgaaaaattttcaaaaaaaaattttaattcgaaaaatttttcttcagtgattcgcgtctcgtcggtcagccgttgggccacttttcgcgagggatttgcagggggtaaatctttggtcttttcaaaaataattttttaaaaattgcaaattttttgcctaaattttcagcaggcggtggtgacacgagaacagcgggcagcgaagaaggtgaggaaatttgggcactattttaatttttttttaaatgtgccgaattttacatgaaaagccatgccattgaggcgccaaaattagtaattaaaaattcaaaatatttgccttttttcctggatttaaaaagtttttttcgcaagaattggcaacttaatgagaaaatttaaatttaaaaattcaaaattattaaatatttttttgcagcagacgatgcacttttttcatcaaatgtttgttactttttttatttatattttatattaatataattattaaaattattatttttaaagcatttaaagaagaaacttattaaaatgggaatttttatttaataaatgattgtttcaaataaatattttccgatttttttagcgaaagccccgctttttgaggacaatttggcaccagctgaagaagctgaacccgtgcagctcgaagcgcgaatggtccatcncttcggtccaagtggcccgcaaatggatgagtgagcagcggggcatttttaaatattttatt

SEQ ID NO: 7788 - DNA, 1601 bp, Heterodera glycines
  unsure (1)..(1601): unsure at all n locations
cgagatttaaatcccgatctcgtccgggctctaatactcatatttaagtgacattttgcacaaatttaaatatttatcccatttactcaaaaaaatatttccatttttacataaataatttattttcagttctcttcccactttcctatttggtgttcaatttgacctattgcatttattatttgggaaagatcggcaggccgctgtgaacgcaatgaacaatttgtggtgcaacaacacccatttgattagcgaacattcgcttaaactatcattttattgaaataataatgtattttggaattcgttcattgttttttctaattatattttaaaatttttaaataaaatttgattttggcctcctgttgttttttctttacctttattcctcttaaaataggaagggaacgcttattattgcaacaaaatgcacaatattgtatgaaatgtgggtgttgtgaaactatgaaggtttgatgatggtataacatttaaaaggcacagggaaaaaagccaacaaaaacaacaaaatcggctcgggaggagggggaacggaggtggggaggacagacagacaacacatcgccaaattatggacaaaaaaaggatgaaatttgagaaattagaatcaattccgttcgttcggtccgtcggtcagtccgttgccgttgttattgcacttcgggcggaatgattctgttgttgttggacaagtgagcccaaatttggtgacgtggtcgacgtgtgcagccgaagccatgccggctcattgccgacggacatcagaaggcgctcaaacggtgccgaggtggacgagccggccaacaactgcttgtgcttcttgcgcctaaaggaatgcattttttaataaaatttcaaatacgcaataactaaaaatttattaacatcgttattttcaaatattttggcttgaggagggatactgatgcccggggcgacgacttttttttttgcgttcaaatcacttttttgcggcactttaccaaaactttcgggaaagaagtgaccgggctgtgccggtgccgacaagcgcttgttgacggaaaacagagaaattggttttggactttcacaaattaaatatattttatccctagaaataaaaatttttttttgtttccctcacttttcatgcacattgagaatgagcaaatcgatgacgaagttctcgtataaatagcacagcacgccgctgagcaacgccaaaatgagcaacaacagacggtactcaatgtacgggattgggtctgaaattttggtgacaaaaattaaaaaaaaaatggagtgcccaccaaattcgagccgttcaatgaaaaattcgggtggctggacacagatgaccacggacaaaatagcaactaacagaagcgaaatgcacaagggcttgttgctgaaatttttaagtaatttaaataatttagtttttgaaaaaaaagggaaattttttaataaatgagattggaaaaagactttatcattgaatgaaacacaaaaactattgctccaaaaagagcttatacaagtgngatcccattagtcatgaaaaatcacaacattagaaaccatgacaaaaaaga

SEQ ID NO: 7789 - DNA, 1771 bp, Heterodera glycines
tctttggtactatgagtattttactatacccatatacccactgttgtgcgtagttgtccacgtaagtttggaagtcgtttggcacagtttccggcacacacaacgacgcaattttctccggtgcgcctttacagtactgcaaaaaaggagatacagaggaatacggtatcatcaaatggtgaccaaccaaatggtgaatgtgtgagtcctcgttggggttgtgtacaaccacagccattcgttgaagggatgaactgcaacaaaattgggatatcggggaaataaaaaaattataaaaattttgagttttttaatcttttaattacacccacctgaatgtaaactgtcgaatgatcgccaattccacgtcggactcaaccgccgagtgcagtggcggcgatcggaccacggtgggctgaaatattgcatttttcaaatcaaaatttttggtttttggcagcccaatgttaaaattttttttttagcttttacaagcaggtcacatccccacctgaagcatgtcgtacatggacgtctcgtccaccaccgcactttcggtcggttcgtccatgatccaaccagttttgcggaacagcaccaggtccaacgggtccccgttgagctccttgtcaatgctgtacaaaaaagggggattattttgtgaaacaatatataaaaaatcggcacattggtgggaaaaaaagccaaaaaatttatttaaattcaagatgatgacgcaccgagtcagactgtgacaggtggcaaccgccttcagcaactccccattttggggcagttcatctgtgcaaaagtcgtgcagctcgttgccaaattcgcgcccaaactcgcaattatgtacggcacgcaaacagttaaagtcgaggctttaaaattacgaaaaaaaatccccaaattttcaactaactaacccatcctccgtcagtgtgccggtcttgtcaaagcaaacctacgaaatatttattatgttttttatgagaaactaatctataccgtattgatggcaccgcatgtgttaattgtggagggcgaaatgcaaaaaatttgttttgccctcagacgcaattgggccgcaaaaatgccaatgctcatggcggctgaaaagggggtagaataaatgatcaatactagcaaatagccaaaattagtttcatacaatactggtaaaccatttttgccaatttttggaaatcaaaatttgtcgaaaaaaggtcgccgagacaatactgggatataggtattcaccacaaaaaaaataataagattttagaaaattcaagaaaaaaacacaagttttgtctgatttttttttataacttcagcaacttttattttctgtaacaactaaattaaaaaaacaaaagaattttttaaaatttttcttaaaattttgaaatttttttgttttatttttgtgcggtgacgttatgtcccggcgatgttttggggtgtacccaaaaaaccgtacctggcagtgccggcggcaccacaatggtgatgatgtccagcgagcggatgaccattttccacaaggtggccccacgggtgtacatcaccaccacggtgtacaggaagccaaacgcggcgattgaggcgagaaagccgacaaatttgaacaggtccttggtgaagcggaaatccacgggtttcgggtacatgatggagcggacgagttggcccttcagcgtggaataggcggtgcgcaacacaaacgccttgacaagcgagggggagggaatttattaaaattcca

SEQ ID NO: 7790 - DNA, 4396 bp, Heterodera glycines
atcaattttgacatcaaatcaccagcaaatgttgattgcactgacgtgatgaacaaagcagggcgaacacgtagagaagcttgaaaaggggaaaaaaagagagagagagggaggggaaagatgcactgacacgactaataatttcacccgcccaatttatttcaaaaaagaatttgcaaaaacattcccaccaccccaactgaccgcaaaaactgttgtgttgtgtttgttgctgctgttgttggagttggcttcagttgcgttgggcccacgtgcggtgataaaaactaaaaaagaaaaatgcgattagcatggtaattaaacttaagtgtccaaaggtcagttatgtacaacaaatccaccatgggttcggtccaactcgacggttagtgaattttttctgcttttttattacttcaaaaaattccaatccaaattttatgtcggtagaaaaagcaaaaagcgatgggttaaaacataatttttattttggttaagggggcatgtttattcataagtgcagtttctcaatatttcggaagcccacatgacactttttttcgatctcaaaaaaactccaagaaaaattttaaaaatgttttctaaaaaaattagggatggcagcggaaggaacttgtcaatccattgacaaaacaaaacaaagaaaaagcaattttgcaaaaagtcgaaagtcttaacgattttatgctgattgtgagaaaactagaattttccagtgccatttattgttttcccaagggggaaatgctaaccaagtgattgattggtcaagtcaattatgttacattgttgtacatgggacacgcgggttcaaacccatttgacagtaatacttttattacattttattttttaattggaaaagggaatttttgttttttgaattttcctaacctgtaattgcgaatccgctcctccctaaacggcaccaccaccaccaccatcagttggcaccgtcgacgatgacaaattggcattggcaccgctgctgctggcactgtgctgcaactgctaagagaaaatgggaaatatttaaaatgttgcgaaataaaccaattcactttttgataaattatcaaacataaatcccatttcacatagttatccccttgggctgtgctgattaatcactaattaattaaataaaaccatcccaccaatccatcttttttggtcactcacccgtgcctgtgctggctgttcaacagaatgtcgtcattgatgctgcttgatgttgttgttgttcaccaccaatcatcagcaaaatgtttcaccgtcacactgaccgttcgttgtttatgcgctaaacaattttaattactataataaatcgatcgattttttatcaaattttcaaaaaaaatttttgaagctaaacaagccaataaacatcatgaaaattgttaacggattctcaaatttgatcaggacctgactcggatgggactaagttgtccgggctctcaaaaaatttagtgaaaataattattttacaacacttggggactcggtttattcaaggctttccttcccctcacttccaacaaaaatgaatgataacatttttcgaaattcagaaaaaaattttttttggcaaaaaacaatttattttgttgtttttcaaaaataaatgcccacccgaatggagagcaccgcgtggtccgccgtccgtgccgttttcaccccgtaaaatttgtgtttgccgtccgccgtgccgcattcggcagccaatgcgagcacttgtgccattgtgttggcttcgctgcggcggcacagttcgatcagcatggcaccgtaaaacaattcttaattgtaggacacattttaatgagccatcactgccatttggtgccggtaatttcatgagtgagagtgtaaatgatttatttattcaaaatgatttttaaaaaaatcgcattttcatgcggcggcactcaccggaaacacgcggcgacacttcgacacaaaaacaattgtgcttcttgttgttgtcgctggcactgccaaagtccactcaaccaagggcaaaaatggcacggacaagcgaaagcacacctgaaaaagcaaaactaaattatctaattgaaaaaatgatgctcggcgggatttgtaagatgtaaacaaaaaagggggtggatgttcgaatctgtcccacaccataaacatttttattcatttttctagtggggcggatgggaggaaggacagtttcaaaaatttctgtttgtctcaattttttagggttatttctagtggttatccccaaccacgacacttcaaacctcaactcgggatttgggttaaacacacatactcaccccctaagaattgcacattttggtagcaaatagcaaaaaataatacaaataccgcgtaaccgagattgaataaataatttttttttatgaatacgaggttagcctagcaaaatcccatcctacaaaaactcgttgctcttgtcacctgagatggcatccgctcgatagttttgcactttcacgaattgatgggggcgttgtggcattgccggccctctctccgccggcgccgacaaatgccaccgatggaatccaaccggtgaagaagtcgtcctccgaatgggtgggagtgctgctcaactgttgcactccttgagaatgaggggaacacattttgtgggagggatggaaaattttgtttaaaaaaattcagattttctaaatataccatatcctcccgataaaaatattggctgtatataaagccagcgttggctttattttaggaaatcaggtagaattccaaataacaaaaaattttgctctaaaaaatctacaatgaaataacttttaatatgagaaaaaatcactagaaaaatttggatttattttaaaacttttccaatttcgatggggggggggggaatcacccccttacccctggctacgggcctgaaactttttttggcccatgtcacaggccccaaaaaagccaaattccgaagttttaaaaaaacaaaaaatttacctgaccacgtcgttgaccatcaaatgcagaaccgatgaccagaccaattcgaccggttgccgcagctgaacatgaacatggcgatgcggatggcacggcacgacaaatggatggagacggagtcgtgcacagcacactgaaaaatctgcgcattctattggtatggaaaagtttcgtgtccaaaaatcctcttctccatttaagcagaatccgtggccggtatggtaaatatttgtttttggactggaggtggccctggtttaagcccaccaagggtcgaaatttttaaattagttttttaaatttatttttttgggaccgctgaacccatatttacctatttgagtacaattctaaggcaatagcacattttgttgtaatgattaaaaccgaaaaattcacacgatacatttgaagatgggaggggaggggagggggggataggattttttgcgggttgattggcccaggttatctgggcactaaaatctgaggtgcaggacacgaacctggcggccttcttttggcgcaattttaaccacacacaccgaaaatagaaaattgtaaaaaaaagaaaaaaaaattgaaagttttgattgagcgttgtttctaaaaaatttttatgacgaattaattaccaagttgttcaaaacttttccataagcactggaatttttttccctttaaattacctaattaaaattttttaaagttttctttcaaaaattttcaagtttaaaaaattcaagaagggggggggggggtgatgctagaaataattgacataaaattttaaaaatgcttttttaatggaggttgttctccaacaaacaacacgccgagaatgacgtacccccgactttttgtcgcgcagcttcagcccgtccatcgaaatgttgagcaccacgcgcggctcggcttgtgcgacccgctggccttgacgctcattttggccagtcgcatggcttccgcgcgcctcggccacgtcgcatttgccgatgaatttggcctatttgtgaaaaagacaaatgatggaaaaacgtttggcaaaaaattaaaattacgcaaaaaataggcaaaattataaattattacaaaaatgtgaaaataaactaaaaataaggaaaataaactgcataaaaataaaaaatgtacatgaatttataacatgaatgattttattttaacgaaaaaaataatttgttttgttaggggtttcgaaattagcaaatttttataaagtagtcgtgaagaaaacccgatgagaaaaatttccgaccgacccccgatcgatttgagagaaactgttttcctgttttgctgactgaatgaagatttttcggttccgatgttatttgagaaagtttgg

SEQ ID NO: 7791 - DNA, 4114 bp, Heterodera glycines
aaattttttcccctttacaggcttcacgaggccacccagtcggacgaggctctgttcaaccgactggtgccgaaaaacaaggaaggtgaggctgagagagtttactagtgctgctcgagagtctctactcgagaaaagtctctggttttttgggtctcggtctcgagtctcggggtcaattctcagtctcgggtctagggatcaaatctcggtcccgaatatgtgggtctcagtctcgagtctaggaatcaaatctcgatctctagtctagtgaaattttcggtctcgagcacactaagagttacaaggattcaatagaataacaaaaattttggattttgatcgatgatctaagcttgatcatcattttgatcggacattttacagaaaaaaatacattcttataatttgctccatcatcatgtttctgatcagaccagcatttaattaaccattttatttagatcattttttaaatgactcttaattttgtccatattctgatcaaattcagctgaacattttgatcagatactttgatcatttttcttaaaggttcattgatcagatttgtctctgatcaacacacattggtccgatcattttgccattttgatcacacaattttccacactttggcacaggaaagcgtccgctttgcgatgcgcaaaagcgtcgcctccaacgcttgggccttccggcggttgaggacgcggaacagctgagcactgatcagcgacgacagtttgcccgactgaatttggaccgtgatcagatctatttgggccgtgtggttgatctgaatgatcgcatgttgcgccgtgttgaaattgggcacggaccgcaagagcagaagcacaagcggaccaccgaatatgccatcaccgtctcatccgaagtgcgttcatctatgccgtgccaaccttgcacataaaaaatgaatgaaattttagaaaatataaaaatgatgaattccaaattgtgtccggaattccaaactctgcagtgattttttttacacaacctgttacactaacatgccgtgccaatgtcggcatggattgtttttttttgtttggctcgagactctcgaggcctaattaacaaaatttcaagaaaacaattttcagccgtttttttggatttttttttgttgaaaaaactaactaattcatccaaaaactttctccacccctctcagctaatggccattctggcccaatgcatggggctggcggatttgcgcgaacggattggcaaaattgtggtagcaaatgatcgggacatgaatccgataactgcggacgatctttgcgttgccggcgcgttggctgtgctgatgaaggatacggtgaagccaaatttgatgcaggtgggctcatttttacgtctaatttatttgtaattataattaattaatttttgtaatagctgattaattaattaacccaattagatgtaggtgtaaccgctaaaacaaatataatccatctaattattaattgattatataattggtctaattaaataattgcagatgcatcatttttttacacctaattaactaataataattacttttcttaaaatatgtaatagctcattaattaaccaatttgcaagctaattaaccagaaattactccgtgtaatagctagttgactacatataattggtataattcactaattaattattccgtttagacactcgaagggacgcccgtctttgtatgtttttcattttcattatttaaaataataaatcgatacggtatttgattactgtcatctttcttctatttccatttattgtttctctaaattacggtattttcctcgaatttccatgctcgaattgtggcacgaccatcaatttttctttgaattcaaatttttaaggtccattccggtccatttgccaacattgcgcacggtgaattttctttctgatcaatcgatcgaaaaaatctttatttttattaattaatcaaaaatattttgcttaccgttccgatcactttcccatttgtacgcctcagggaacagttccatcctggctgatcaggtggcactcaaattggtcggctcggatggctttgtgatcactgaggccggctttggcgctgacattggcatggagaaattcttcaacattaaagtgaaaattttttaaaatttttcgacattttttgtgccccgccatttcagtgccgaacgagtggcctttggccaaatgccgttgtcattgtgtgcgtttttttatttttcagaattttaattatgtgaatacgttcccaactctgtgcaatttcagtttttggttttaaaaattctaaaaaaaaaaaattccgataaaatttctcacatttctatgaattattttagaaattttcgaagaaaacaaaatttgaaaattttatagagaatttaaagaaaatttgataaatttgtttttttttttgaaaattcggtaaaaagtgaattaatcttttcgattcttaaaattgaagttttatttttttcccaattaatccgaagaagagttcgcttttcttgagtgctttcaaatgctgctttttcagtgcgacggtgcgcgcattgaaaatgcacggcggtggcccgcccgttgtgcctggttggccggccatttaattttcaaaaaaaaaaaaaaaaaaattgttggcatttttttcaggcaatccgctgccctttgaatatttgaatcccaatttggagttggtggccaagggttgtgacacaaacttgcgcaaacaggtggtcctcataatccttctgtggtaccaaccaatgttgttcgagagtctcgactcgagactcgaaaaattctcgggtttttgcggtgccacgaaattcagcaggcccgtcgccagaaaaaaaaattcggagagggaggggtggggggaatccggagttttttgctctttgggcctaaaagtctaaaaaaaaaaaaaatttttctccaatgttatttttaaattttcataaccaggaagaaaaagtaggagagaaaaagtaggaatttgtagacattttcaccaaaaaattattaaattgcttgaaattttcaaaaaaaaagtgcctatcttacaaaaaaattttcaaatttttgtatttaattcttcggtgagtgactttttgtggagcatcaattcatttttattgttgaattagtaaaagcttaaaaattaaattttagtgcgtttaaataaataaattttgtgtcatttccgatcgaaaatgcgcaactgtttggcgtgccggtgctgatctgtgtgaacaaatttggcaccgattcggacgacgaattgggacttgtggtggacaaagcacgccaatttggtgccgaagcggaagtttccgatcattgggcccggggcggcgctggtgcgatcaaattggccgaaacgctgatcaaagtgtgccagcggatgccgcctcctgccaagttgggccacaacaatcacacctgtattatccctccggggcataaagcagaatttgtgcccactttgtcttgttggcgaaagaccacaccaaagttggtcttttgtacaaattttgtcgggtcatttgtccaaattttgtaacacttttgctcaggttcaatttggcattttgtcccatgtttaagttagaattttgtccaattttacaactaatttgtccagcactttttgagaggcattttgtcccgtgttgcccctttgtctttgggtttcctttttccaaattggtcgcttttccaatttattgaccatttgtccactaaaagaattggccttttatcccattatgaccctttgtcttgcggtgggggacctcgttttttgttcaaatttgccttttgttcaatttttgtttttctcccatcacattagacattttacctcattttcgaccatttgtccaaattaattcatttgtcccccccccccacccctggacagatttctgtactcattggaggagtccattgagcaaaagtgccgcatcatcgccaccaaaatttacggtgccaaggacatcgaattttcggacgaggccaagcgcaaggctgaacaattcaagtgccaaggcttcgctgggctgcc

SEQ ID NO: 7792 - DNA, 3440 bp, Heterodera glycines
  unsure (1)..(3440): unsure at all n locations
ggaattaaagtcactaaaaatcttcaaaaagtcgactaaaaaagtcataaaaaatcgccaaaaagtcacaaaaaagtcataaaatacgcaaaaaagtcacgaaaaatgaaaaaagtcctgaataatttatagaataacattntaatcgtaatttttaggcacataattttataaataggtacctaaaataggcatagaaaagagattcttccaacaattaagaaaaaattcatccatgtttcattgtctttttatcgatccaaattttatttttctgaattttctttgtatttttcggcattttcttcgctaaaattcaaattttgccccaaaaagtcaaaaaaaatcacgaaaaaattcgcaaaaaatcaaaaaagtcataaaatcctaaaaagtataaaaaaagtcacaaaaaatgcatgttagaggcttcagacaaagtttagaacactttttaagtcattttaaggccatttagagtcagcaaaaaaaaaagtcatttgacttaaattcccagccctatttattattattcctttttttaatttttgaatatttttcttcaaaatttatcactaaaatgtcaaacgaagaagaaaatgttgaagagcaaagagagttttcccctcagcaacagcagcagggcgaacttcgctatttccacgagggatttacttatgtgaaagatcggctcagtgccgacggcacaaagttattttggcgatgcgggaaaaagattagttaatgggtaaatattaattgactcattagtgccttctgttttaaacgatgccaaacgcatgcaatgggcgcatttggacggatgccaaagacggcactttcctttcgatgaggacgaaacattcgtgcagagaggggagggaagacacggacgaagccgactcccacggggacggcaccgggcctatgacccaaagtgccacggccattgtcaaaggtccgcgggagggcgcggcacagcgcaaacactcgcggcatttgcttttcactctcggaaatattcactttcctttccaatcgcttgtctcatttcgattcaaagtttctttttgggatgaaattgctgaaatccctcccttaatttaaagaaagagtcggtactgaaaaagacattttcagttgaagcgggcgacagtttgaccaatgccattctgggcattttgccccaacaatcggccgacgacgccgaggctggcagcactgggaacggaccaatgcattcagcggaacatcaccagcacgagacggaccagcaacagcagatgatctcttcagggacgggtgccgcgtcggtggaaggaaatgccatcgccgcgggggttcggcgccattctctgctgggaccgattccaatacgttcacagcaacagcaatccgtcgaaggccaacagtcgaccattggccagccgatggtgcgcaatttgccacctgcgactgttcgcactgcgaattttgcgcaaaatcatccggtgggcaagggacttctgaatgttttttggcaactgtgacttcgtttcgggaacattctttctcactgtgccgccccatttcaattaattaattaattgagcagcaatcgctcgtcaattcgcagcatccgaccgtggccaacaattgccattccgagcagcacttcgccggtcgcaagaggcgggcattccctccgccgccgcagtcgtcggcactgccgctgaacggcttctcaaattgtgtcggcgaagacggagaaacggtggaacttcgactgaaacgcctcaaatgcgaactcattgaggtgggagcagcagctaattgtgagagaaacaccacaaaatggcattaagaagcagctaatggaattggggcaccaggaggagtggcgactgaagcaggaatttctgttggggcgacagacggcggcgatggaaaacattgtcatccaactgagacagataaaggagaagctcaaatgattaactgaccttcgggctccgaattggcatttcgccgtgccacaaatccacgaaattcgcttaaatgtcaaattgccactaataatttatcacaacaaatttgccttatgccagtcacttcattagcatcagatgcattcagcttgtttaattgaatgactcactgacaattagtaaggcgtttgtccctccctcgtgccatcttttccctcgagtgcttttgctaatcatcccgacttttcgcttgctcctctgctggtgattgttgtgctgataatatggcgatgctgctcccttccgcatcattaatcacttctgatttgacatcctttcatttgctaattactccccccccccattcgttacgcctcaattccttctttggcgtgtccccccttagaccctttcattaagatcattatcccaggctaattgacgacgcattgattatatctgaagaagcgtcccccacccctctataaaagaaagcgagtaaagtatgaaaattgatatttgaaaacattcccgaagtgtgaaaaatgtccgacctgcccaccggtactgtaacggtggcggtcattctgtccgtcatttctctcagtgccattctcgtcggagtgccgctaatgctcaacgatttggtgaaccttcagcttgagtttggactgaaaagccaagcgcacttggacatgagcaacgttttgtggagagacataatgaaagaggtggcgacgattggccaatgggacaaaagggagcaaaagcagacgatacggaagcggagacaatgtgcgaaagggacggacaattgaccactcgaaacaaatgccgttcagacggaagcggaaatatcggcggagggggcgcgagcagtccaagtgccacttgccctcagggagcgcgaggggccccgggagtgccgggggcaccgggagagccgggtcaatcaaagccaagagcgaagttgctaacaaagaattgcctttaaggccaagacggacaacccggcacttcgggattctcgggctttccggaggattttgctcacgtgtcgcagtgccccacttggtgatttatttcgccatgacttaacctgtgtttctctttgttaaagtccaattggtccacctggccccccgggatacaaaggaaggagaggctttcgcggtgaaaagggcccaatcggtacacatttaaatagcccaatggcgtcattcaattttaattttaaaggacctcccgggtcgcctggtcgcgatggccatcccggtgagcagctaatgaacggattaagccgtgtgaggggaaattgtactgtttttttatcaggtgacgaagggcccgaaggcgaaattggacttcacggagatttgggagagcctgggccgagaggccctcccggcgagacgggcattggatacgcaaagggcgagccggggcccaagggagagcacggacagccggggg

SEQ ID NO: 7793 - DNA, 2296 bp, Heterodera glycines
  unsure (1)..(2296): unsure at all n locations
ttttcagcctccgccctccatccgcccgtttcggcgcgtcccgtcgctgcgccccctccgccgtacgcttcgcaacgcgccgcttctgcgcctcncgctccgtcttccttcgctgcaccttccgctgctgttttccctccccgttcttcttcctataacaaattggcacttgccgccgcccttcgcacgcgacacctttaagacattttgagaagcgaaagcaaaagcaattaatattttaataaacaattagttttatccatttgaattactaaatgaaatagtctttttcactttgtaagttcggctaaatacaaaatgttattttaatttcactgctgctaatgtatgaatttattctgacttcaataaattctttaaaacaataaaaattaataataaatattaaaatttgattggttttgttcggccattggccaaaacatcaaaaggcaattaatttttgttttgttatttgtccattcgtcgccacttcttccgtttttcttttgccattcgatggcttttgccatcgttttgtttggctttgtgtcggcttttcttcggttggctttctttgtcctttcttttcgcattttatgttggcactacgaggggagaggtggccgttaaagcgatcgtcgtttggcggtgtttttgctggccgatggatgccattagcaaagtcggggccaccaatttggcatccctcggcgtcagtttggatttgctccccaattgtccgaattttcgcttcgccataaatttccgcgcattttcgggcaccaaacggagaaaagcggagcgaagttggaagttgagcaaagcgtacagaatggggttccaaatcttaacaaaaattgggggggggggacaaatggctaaaaaggggacaatttgaaatttacagtggaagtcatcgcaatggcatgagtgatgatcccgtacagaaactcctgctctcggataaagtaagggagaaggcccaagtcgcgcaaaaggttgaacagaatgaaccaaatccaactgaaatcggcaaaaaattgccaaaaatttgctaaatttggggggcggggaagaaattgcctgagaacgaaggcacagaccctaaaaggaaaagattgatcaattaatggctgtgggagatcgtacatcagaatgaacatccgattcgtcctttgccttctccgatcggccatcgattggcgatggcgcagccacgaattgcccatctttttacggcgtagcaaaatgttctaaattcgttagttttgactgatcagtcttctgatcacttggctgattcgactcactctgttcagccgaaccgaaattccgatgtaacaaatggtaattatgagcaaaggcacgaagaattggacaatctttcaaaagtccagaatagcgttgttttttataaattaaagcttttttgcctaccaacagaagggtgccgtaaatttcacgatacaattcatttgtgccccaatcttcaacgcaaaattcgccgcagtatccctccatccgcagcaatttttgtgtgaaaatcattgggaaactgacgaacattgcgaacaaacaaagaatctgttggtttggatgggatgcaaattgagataattccgtttccctcctcctcaccgggataatgagcaacgcgtggttatgccgaagctgattgttgagcggaaagcgaatgagcaaaaaacggtcgacagaaattgcggcgaggacaaaaatggaaaagcaaagggatgtaccctaaagggacgagggagggagtggtagcaaatgacaaatggcaaaacaatgccaatgccaattagccaaaaagtactgaccgcggtgaaattggccaaagagcaaagcgcaactccgaacacccaaactttagtgaaggcggtgtaaggcgtaaaggtggcggacacacaacagacgacgatgtcggagcaggacaaagcgaagatgaacaggttggacaccgtctgcagagaacgcgtccggccgatggacaaaaggacgcaaatattgccagagacgccgaccagaacgatcagcgaatagacaacggcgaaaatggcggcggtgatcggacgcgaggtgggatcacgctggaactcccacaggaagtggttcatgtccacacattcgttgaaaaacgccatggacacatcgaactcatctgccagggaaaggttggacaggaaaagccgctcctcaagcgacgcgccctccgtggtcatgggcagcggagaaagagtttgtccatcggagaaagtcatcaaatctaaagact

SEQ ID NO: 7794 - DNA, 884 bp, Heterodera glycines
ataggtagcttaatagcagcttagatttaactaattgttaggagactaagaaaaaagctaaatcctaaaaaatggccctgacgtactttccctttcttttttactttagaaaaaacaatacacttacagtatcaatacagaatattgcaaactgcggctgccttaaacacacagtgactattattgttcattggcggtttacattcacattatgctgctgccggtggttctgcttgttgctgggattacggtaataagtttggcaaaacggtacaattattggcccaatggaaatgtaaaatgtgaaattgctttcgtagttcgtttttgttgagtatcgtataagaaaaaataaataaatttaattattatttatctttatttgcttttaatttgttcattttcacccaaattgttcccattttcggccgatccctgcgggaattacgaagcactaacccaccaattcttcgaccacatttacgagcataaccatgacaaaatgcgtacgttgatcgcctctctcagcaccgacaaattggtcaatttactaaacattgaatacgcgccggaaggcacggacaaacagctgacgccgctgatgctcgccacggtgttgggggacgcgcaaatggcccaaatttttgtgagttaattcaatggcattctccgctgatttatgcactgattcaatgctattgtcagcaaaaaaaaaaattcaaatgttcaaaatttaaaaaaaaatccgttttttatttcagctggagaaaggggccgacccccacagaatgtgcctaaagaaaatcaacaccgatgacaatttaatcagtgaattgagagaggaaggcgaaaaaatggacaaatgatatttgaaaaataattta

SEQ ID NO: 7795 - DNA, 4271 bp, Heterodera glycines
tgctcgcgcacggtgccaacgtcgaattgggcctggaaattggcatcacccctttgatggccgcctgtgacgcgggtcataaggaaattggtcggcatttgttgattaattagccgagtcatacaaatatctcggcaactctcaattcatattgtgcttatttgttagctgcttttctcatgaagaacggagcgaacatcggacgaacggacgacgcggggaataacgcgctaatgggcgcctcaatttcgggacgagtaagcggagggggggggggtattggaactgacaatgaatgcctttgattggtgcctgccgaaaaatgggcagttttgaattatttaaggggatttaaagggaaaacgatatggccaagaaaaactcgtctattaaatttagctggacgttgtgcgttttttgctctctaacggtgcgcgtgtcgacgaaaggaataaatacggtaaagcgagcaaaagggacgattaaaaaggcactcaatcagactcacccgcaaattgttgcattcagaatcagctttttagtgctaatttaaaatattttcggtttttttgaataggcttttgatccattctcagttctgttttcatcttagcctcaacatatataagtaatacgtttaattgttaatgtttttatgtccaataattaaggcaaaactgcgctggattttgcttttaaatacggacactcagaaattgttcactttttacaagccgaacaaaagaaaattgcaaggcaaataagaactaattatgattatattataataattcattaagacaatacttttgattagatggctttttagacacagcgatttgtgagagggaattgccattcaaaatctggtggatctctgcagattataaaatgatttatcatcatttaaaatatttattgtaccatttacacttatttggttcgcatttatgggtcagaaataaaatttacttgaaaataaactgaagtgtgtcaattcgaatacgctgtagtcactaagtaaggaaagttatcccaaaaagaaatttttaaattcaaatgcgggttaatcccgcgggatcccgtctcctgagagaattttgaatttcaattatgtagtgggatctgcaaatttaaaaattgccgggcccctcctcctccccctcccccgttcacttctcacatcctctaattttccttcattcattttcatttggatattccctcttaatgtgcaaaattgcttattcctccttttattgatctcccccttcttatcaaattaacatgccaccattttttagttttctaatccaatttaatttacaaattacataacaaatatttccaaatggcggcacttcagcaggtaattttgatgtttaaatttgaatgcttccaacttttaatataacacaccgagagtgcaccattttatagtcgttaccatcaatgtcaatttgatttgttcttcaaaatcattttcagttttatccaacaaaatccttttgattttctttgtatgtatcgaaaccttagcatgaggaatgaatgcttttgtctaaaatgaaatttcaaatattcggttttcaactgaattgagtgtcatctttggtctctcattgtcctcgctatctgtgcgatatttctttgacatgtctatcctttagttattttgtttctccattttcgttccttgacctatgctttcatagcggtgcttttggttctctcagttttcctgggcttttccttcggtttgttgtgctgcgactccaaaacatttcgccggataaagccaatgatctgaggacaaacacaagaggaaattgatcaaatgttttcttgttgttttttcatccagctgtccaaaatgaaaatgaaccaattcacacgcccttacgcataggaaatgctctgcttgccatgcccgggtgtgcctctgtcttcatgtgttacggcggttgctctacgcgtcaacgagtgccattaaccccaaatccgcttcaaccgcggcgaccctaccggtatgccaatgccaagcagtggggtccaacaacgaatgcttcttcctctggagcgatctatgaattgcttttgtcggttccaagcactgattgccgcgctagacggcttctcatcaacaattcattgtttttccatttcatcaccggcagtaaaatggcaaaaattggaagcgtcctctgccagttttggtaaaactgttgtcaaacaattctcaattaacgacacaaatcactcattcattcacccccacgaattgtcagacatattctaatcttgatttatcgccttttcataacttattcttcaatttcatttattttcaaaggtttttgagtgctaattgcttagaaaattcgggtttctcattaattattcaagcatcccgatttagaacattgtcgaacaactttttgaaaacgaaggtcacaggggtttccgtgtggttcttccccggatccacagcgactcggcgaggcttcacccgattttcacctctcatcatactctcgcaccttacaccaatccctccgctcaaaatgctcatcggttggtccattaattttcgaatttgatttctcttggtttgacaatcatatgaatagaggaattcttttcatttttaaaatgcatcacaaatttagcgatgaccttagttaaactctgttaacgccgatccaaacccttacaaaatcagtttttattaatcctttgttatgaaatacaaaattgaaatttccagagaattgctttggaaaaagcgatcaaccaggagaagagtccgtttatcactttgatctttttcaatttctacactgcgttttgctaaaaccgcttaaaaatgaaaacaccaaatcttcttcttttgtttgaatataattatattaaaataaatgacaaaaaaacgcttatatatttttaaggactacgatgtgtagaattcagtttggaccatcgcataattggagacattgagcagtgcgaaatcgctgtgcaggaaatgatgcttcaccttacccacattatggactgggtaaatatataaataatggatattaataaatcacaagcccagtaaagtagcgcatgataagccaacaattggacaggcttggcttttgagatttgggatatgaccgggcatcagaaaatgccgaagttcattcccacgatcaattctgttaaaatgtcaactaattagcgaaatattgattttatgcaatttgacctgttattcaaatacttttttcccttcccttttaaaaaggcggcacgcggattcttaaacatcttgctcagagttgctgcttatttgtcagcatcgagactaaaatcttaaattttccatttccatgatatgggcttctgttgaattttcattttacttttcgtttcgaaccatcgaaatacgatcaaaagtgtactttttcttttgtttttccatatttacatttaatttatctcgctcaattttgtctgttctaatcgatcagtttttccaggccgctccaattgatctccgatcagttcattaaattctatttctcatgttccgttctcatgtctaaccatttactttactcacttaaacatatatgtctgttcacaatttcgtttttgttttgttcttcataaacacgactaagtaatcgtattttttaattgaaataattatcgtggaggggaggatatgtcaggtaatttcaacactgggtaaaattggttttttttgggttaaaataaagtttggtaattccccggtcggggtccccgagtcggggtttgggtacttatgctttttattacagattactttatattgttaataaacaaaatatttctgacaacttaaaccgcataagtgcaccgcatcttgagctaattcagttcctttcttcacttaaacttatattttatgatacaattccaaactccgacgatgattcattgaagacgctttgttatcatctgctcgtgccaacttctgctgctaatatcggtttcgcaatcggtgattttcaaattcacgtgcagccataaatgacccgagggatttattttgttttccgtaacattttaaattccctaagcatttttaaaattattaacctttgtcgtctccggagctcattccgctccttaaacacacaatgaaatcgcttgaaaaaaaatcttggttttttcgaagaattttagcgtgcccatttccgatagtccccattgggcaatttttggggatccggtcc

SEQ ID NO: 7796 - DNA, 1138 bp, Heterodera glycines
ccccgacatttgattgtgtacaaaattctctatctgttgcacattgtaatagtatttcttttgagaaaatctctccccacatttttgggtcatcattttgctgaaataaaaatcaatgggaatatggggggataagcaaaatccaattcaaatttgtttcttttttgggtcaccgttttgccgtgaattattattttatgtgctcgccatccatcataaatataagtgaaccatcacatctttcttcatttaactcttctagtgcattttttacaaaataatacaagaattattattttatgaattcataaatttgacttttgtgattattagtccctaaaaggaacctcgggaatccaatatgtctttttcaccaaattcaacaattgccgaatttaccgctgatcagggtaattgagcattaattagaaccaattaattcatttaattaaattaacgaaatataaaacgcatttaaatataatcatttctggtacttgctaattcaaaaattacactggaaaatgccttttttgtattttttattttgatcagccataactcgcttcattcccaactaaagtaaacaaatttggtatttaaaaaaagtttttgaaaaggagaatctttttctaagcgaattctaagcaatttgacatctcagaaaaaagttacgagagtttcaaatttttatcaccttataactcagctcattgactgctgattttaaccaaaatgcctaaaactaataattttctattgatgttaaatgtcgaaagtgaatttgttcttttataaccaaaattatttgaattagcgaatttggtgttttttgtgtgttagagacatgaaaatagtaatccaaaaggagagaaaaagaaatgcaattttttttcatcccatttttgtaatgttctaggccgaaatttttaatcaaatcactgaaattttgtttattttccttttctctatcgatatgcaaaatttggtgcaaattgtatgagtagaaaaaaagttatatgtggcgaagtaaatgttgtttttttacataattaaaatgaagagatagtacgccaaaatgagagaaattacaaagaaaaagaaaacgacgagatagtactaggcttttctctgcaca

SEQ ID NO: 7797 - DNA, 988 bp, Heterodera glycines
tttctaaactaattttttatcctatttttactggttgtttttcttcaaaaattaaaaaagagcatattcgcaaatttatttttcattaaattatttttctgtaaaattgaaaataatttttttagagtgagcccccgagggacttagggggctctatttttgggagggggagggggctttattttaggaaaacggtaacttacaatttttgtactagaatgaaatcgaaataatattttaaaattttacattttcaaattttagtctactcaaaagatttgaaaaatcaaaagtgaacataaaacaaaaggtgaaaatacaaaatcataaaacaaaaaaagtttttagttaaaaaaaaatttatttttgaaattatatagaattacactcatttattttcgaattatttcaataaatttatctcaacttttattaagaaatttccttttgcggcaacaaaactgttgggatgccaccgtttgtcacagtgcccttgaaatcttaggcccaaagcatttgatggtccactgcaaagaaaatggaaacggtcaaattttaaaaaaatttataatatttttgtattttaattgattttttaaaaactgaatttgtttctttcagcttttggctcagtgtacgcaaaatgcccagttccgataagtgacttcggcattttttactttgaaaatcaaattttaaatttggaaggtatgaagcaaaagtttattttatttcaatttattgcttttgattgagcttgcctacaattggactcgccacaaaataaatgatgcctttgtacggaatggtcgaccattttcccaacacttatggctacggaaataatggcactttttggcttaacggattcggcctggttggacagtcggcatttcacgaggcgatgttgtcggatcggcgttaatttgttcacttgtcggatgattttcacaaaactggacagcgaatgggttagaaaagcgagaaa

SEQ ID NO: 7798 - DNA, 5113 bp, Heterodera glycines
ccgctgacgaaaatcactgacgaaatcgttcactgacgaaaatgcttactgacgaaaatattaaccacgctattatagttgaagggtaacgcgatcggtaggtaattagagtaacaattttttcaaaattgaaataccggaagcgatttatacaatatcggctgtaccgtactgtgtgtggggtttcggaataaattttgtaggtaggtagagtaccccctgggttcttaaaattttttttttcaattctgcaaaatgagctccagtgctgagacaaaaaaaatgcacgactttttaaaattaagagggtttttaatcaatacaaattatcatatttaaatcactgctcggaattggatattttgcaaagctgctgttgttagatggcacaacttagaaaagtttattttgcattcgcggcactacgccatccatttttttacaaataattcaatttccaatttcttgggacatttggcaactactacagtaaaattattcaattcataagtggcatacccataattaaacatcaattaaattctatcttttccagattttttgagggtttattcagattctctcgaattgtcatgttaaaatctgaagaggaatttaagaaatttttggcgacaaaacggcgccaatctaaccaaggcgtaaattagtgtggttagtgtgaatgattttcagcgcaattttctaacattaatcataattgtagcaaatggatgtcgtattgttagccactccaagatctcttggttaaataacctaaaataaccgaatccagcaaaagcaaatttaccaaaatgccaaatcacagaaaaaaagccaaatggaaaatgccaaattgtcaaatgccaattcccgaaactttctttttcctcctccgtttagcgtccgatggtttctcaatgtcttcctccttttcttttagatccttttgaagaacggccttgagcaaagccatggccaccggcggatggataaaaggtgtttattggctcaacatccaacacttcgtcttgctgatttccaccttaatcataattaataattattagttaataataataaattttgaagaaatgaccccatggttgctcattttgaattattaataggaaaattataaaagtgtaacacacaaaaattaaatttcgaatgattgttaaattcacttattttagaattatatttatttccaatgttccaactctgttcaccttgttgtgatgattgtgaattgttggagttaaacgaaatgaaggcagaatttggcaatgaattgaaggatacagacgattggcctgaaatagtgcagcagccataacacataaaattcatattatcttttttaaatttttgccaaaatttgggcatttttaaaaatcgccaaagcgacgaagtgccaccgactttaatattaaattcattgctttttacctgttggtggctgtggtgcggcgaaatttgatgatgaattgaacgcgtttcctgctgcagatccttcgacttggctgatcaagtctcgccaatatgaacctaaaacaataattaatataataaatttgtcggatataaagtgctcatattttattactcaaaaattaatgagtcttttgtgtttcagaaaatttacagtaagaaaaagaaaatttcttgaaaatgtgcgtttcctgtcaaatcttttcatacatcttctcaattccttccacaaatccacgccaatccgtcccaatcccgagactcaaatgtcattcaaatttaattctaatttattgctttacctgatgatggcatagactgcctgttatccgtaggctgttggccatagtgaaacggattggctgataaattggatgatccaatgctactgtttccggttcttcctgaaaaatttttactcaatttaaatcaaaatttaattttgccctcattttcctccaaaacgcaattaaaagtttctaatttatgtacaacagtcagaagagtctcaatctcgagaaatttcgattctccaactcaaatatctttcaaattgaaattctattaatttaaattcccattcattgatttgccttttctcctcccggcctaatggaacccttcctttaaacttcaaacatattaaaaaaaaacttaaaagtgcaaaaaactattatttattttttatacaattgacaattaattgttcgtccttttgacattgtaccaaatttcatatacttaacaattaattaaatgaaattttaaattgatggcttatttataaaacccaccggtaagttgttggactgtttctctgtaattagcctcgttgcaatgaaaaattgtttgagacgtcggtttcttacctttgattttaaaaagaaaaaactcaaaggaatatattcaaatcccttttattttcaaatcataattaaccccgttcgttacctttctctctttttggtccaccgttcacaccatcgatggacaatgccaaaatgagcacaagagagacaaaatggcgagcataaaacatttttcacttttacaaattggcttcaaaattgcttaatcgccgttattggaaaaagtcataattttgtaacatccttggataaggtctcctaggcaataactatctatttttcggactgatgccgaattaatgggtaattttactttttttttttttttgcccgacaaattggaagaaattcaaaactagtaaacattaagatgaagaatttaaatctagactagagttgcacgggaccgggactggtactgaaaaaactacaaatgagtaccaagtcccggttttgaccgggaccaggactagtcccggttttttcccggttttcccagacaaaaattctccggggttttcaacccgaaaagtcccggtcccggtttttgtcaaaattcccgggcccgtgcaactctaatctaaaccaatgtgtattgaacttagtaacagggttggagtctagtcttgttatgctgcagaacttggtttaagaaagagagttcgtgaaaatgttttggcgctcgcatttcttccaattcctaatattttatttaatgaatggattagaagataatgcagatgccattgttttactcattctatgtggaatagagccagccaaattcggtggaataaaagcaatataattttttagttagtatcgttcgatagcccaggtttttctatattagcctgcaaaattacaacaaattcggtcaaccttcgaaaaagttgtatgaaaataattactatttctggcataactagagaccgactaaaaaggcaccaaaaatcgcgaaaaaggcactattataggcaccaaaaaattgaaaaaaaagcatgaaaaggcacgaaaatcccgaaaaaggcatgaaaaggcatttaaaaattttttattaaggatttttagggagcaaaacacgtaaaacttaacaaaaaaaaacttaattttggtcacttaaatgattattaaatattttataatgtttttcgaataaagaaaatttttaaacctaaaattttttatcaagaaaaaaattaaatgtcgatcaattgagaaaatttttcaattcttaaggctgtattttctgatttcaggtcatttcttaggggtgtattttcccgattttattgaatttttaatcgaatttttcgaaaaaaaacgccaaaaaaggcaccaaaacggcaaaatgccaaaaaggcatttaaggcacgaaaatcccgaaaaaggcaaaaaaaaggcataataaaaatcaacgtagaatcctcaaagcaagtgggaaatacgttttttatgcttaatatatcgaaactagtgcgcaaaaaaaggcatatgcctcaaaatgcggtctctagccataacttaaatttgataatttctattgagattttgcaggctaatagagaaaaatctggggctatcgaacgataccattaatgtataatttgttacttttaactgtcgaaaaatagttaaaatggcggattttacgaaatgcccaaggtggctatttacgaaacgatctagcatcgatggaattaattaatcattcaatcacgttgttttgcacaaatttaattttaatttttttatcagtttgattttgcatccttttatttttaatttttatctgagaaaaaatatggaaatgtttttttttattaaaatggcatttttcacaatatgattttttttgtattacaagtttcgatttagacagacagaagatggatttgtttgttaatggcaaatgaaaattggtaattatataattaatggaagcgatcaaaaagcatagaaatggcggacggatttccttaaaatcatatccttggaatttgctgtcaaaaactcaatcacattgtgattttcttcggcatcttcacctcgccagtgatcggatttctttctgaaatgtcatttaatttttgataaaatgcaatcataaagccagaaatttagaaattaaattaatcgagaaaataatgggttaagcctacaaatcggatttttggttcgtccaatgatgacgtgtttttaaattaaatcaaatccaacaaatcacttaacattccaatcagctaatccaataacacttattaaaatgaaatggttcaaattggatgttactgagctagaaaagttgtacaataatttttaaaattgtttaatcaattaaccaataatttataataatagcttcttaatattcaacgatttttaaatgatataaaattttcaaaaatttcattttgctccgttaaaaaaattgccggaactcagtcggcaagacacaaccctttccatgaccatttttggcattttcaaattttgcgctttttgtaaacgcaagtccaactcacccaacacgggcacacattttttgggcgttttcaccggggaacttggcgctgtgtcggagaaaatgctcgactgaaaaatcattatatggaattaattacctttaatattttttatttaaatcaatttatatcattgccagaaaaatgttttgttaaatttttagcagttttattttataaattttgaatgatgtcataaattaaattttttaattctgtttcccaaat

SEQ ID NO: 7799 - DNA, 1634 bp, Heterodera glycines
gggggggggggggggggggggggagagaaaaaaaaacccccccccccccccccccccccccccccccccccccccgcggagggggggggggggggggggggggggggggggggggggggggagaaaaaaaaaaaaaaaaaaaaaaatttttttttatttttttttttttttatattttttttttctcccacaaaaaaaagaggggggggcgggtttttttttttattaaacacacaaaaaaaggcgccttttcaaaaaaaaaaacccacaaatttttctccccccccccccgaaagagaggggggggggggggggaaaccccgtttttttttttgccacccccccccttctgggccccccgagggggattttttcttaaaaaaaaaattttttttggggggggggttttttttttacaccccccccctttcccaatttttttccccttcaaaaggggaaaaaatggggttgctggcgggcccccccataaacaatttgagggtcccccctttttttcccccaatttttcccaaaaaaattccggggggcgcttgaaaaaccccaaaaaaatcccccgaaaacctttttgggccccggccggaattttgggcccttttgaatttaaaagggttttaaaaatttggaaaaattggggtttcgtaaccctttgaaaccccgacaaaatttgggcgttttgggccctttccaaaggggttcaaaaaggcttttgcgaatgggcgacggctaattggacggcgaaagggtcgtccaacgacggatgagaattgatggcacaacgggagacggaggaacagaaattgagcacctaaaaagggaaatgctaaaaaaacacggagactaatcttggtaacattcggtagctataagggttctctcttattattagtcacaatgtttgaaaaaactggccccaaccaaaaacttatggcaaacaaaaaaaatgtgaagcgaattttaaaatttttagttttactagtatttctgaaaccaaatgaacctttttaatttttaaaggttaatagatacaaaacttttagagccatcgaatgatacaaaaaatgtttatttatagggcataaagtaaagcacctgcaattcgtctttcatctccaatccgacgagttcatcgccaaccaccaaaaggatgaggtcgagcgcagaagcacagcaaatttggctgatcggctcgcgcgacgtcttaaaaaggcaagaaacaacaggtcaatggaagtcaatttcaataattatgacattttttcaaattcggaatcgattggcttttccctccgtgccgtacttcgtcaaagccaagcccttccaacgccgcttcgttctcccaattgacgacgccttttgtgctgaacaccaaaacacgacccatgctggtgccgaccacaaaagtgctgccgaaaccggagaatgcggaaacataaaaaatgaaaataattgaaaaatagagaaaaatgtaatgacaaataccccttcgccaaatttgagcaaagaaccgatgcaacgcctcttccgttcgaacaatttgagctccatcagactaaacttattttaattgttggactttgaaattcagcagaaaataatgaaaaataaattttttg

SEQ ID NO: 7800 - DNA, 4059 bp, Heterodera glycines
  unsure (1)..(4059): unsure at all n locations
ggagtcacgataggagaaatatgcgcaaagttaggtacatctaccccccccccctcagaggagcgccggacttttcgacagaggacatttcgaattttgcgatttttgccattttcatgaattttatttcctttttgcggtagaaacccaactcgtttttgacccaactcgttttttgggtcgaaacccgaaaatcgaggccaaatcgcctaaattacctaatttaattcgggaatacttttatgtcattttaagtgatttttaagtttaaagccaaaatttagttgaaatccgaattttctaacttttcgaacttacttttcaaatgcctgtccaatttcgaagcccggattcaaattcgactaaaaagaaagaaaattcaaaaaagtgcaaaaattcatttccacctcaatttaattataacgtaaaactaagaaatgatcaaattttaacaactccagtggaagcaattttcaaacacggtaagaccgcactaacttgaaaaatttttcgagggaaacgaatatccgggtttttgcggtatgctggaaatcggacattggctgccaacggaacgacagattatcatttaaaaaaaaatttaattatacccaacaatatacaattccgacatccatttcgaacctctgacccgaatttgtaattcgaaaattcaatttttaacaaaatctaagtgtacaacgaaactggctcaactgcaggaaatttatgtcttgcctttattttgagtgtttctggcttgtttattgtattaattacaatctgaaaagaaattttagctcgaataattttatttctcaaattttcccatggtctaatccaaaattcgcataaaattatacccattagatggtcaatcattcccaaaatttcacactcggccaatcttttccacaataaccattttcaaattttattaatgcattttgttgtaaattcgaaattcgttcaaaattgaattttcaaattttgattcgatcacgggtcggcattcgaagtgggttaaatattctgaaagctcaagataaaagagacacgggtggatacaagacgctaattaaatttcaactggtgaatcattaaggaattaaatcatttacattcttttaaaatgagtgtaatgcctaataacgaccagcagaagcagaatttggacaccaaaacatctcaggtgaagaggacatttagtgatttaaacaacaccttatttatgggtgtaaagtctgttggccagggatagggagacctgaaaacaatgacgttcaaaaactcgaagtgatagaaaagtgatttaaaaaaaacaaattttaggaaaacggccaattgtcagattcacacgaaacggcagttataaaagcgccgagtggagggaacagaaaagtgccaaagaactgctggaagaaggttaacattgacttggagtacaacacgagcagagaaatttcgaggaggcgacagttggcatggcgtggcgaaagacgcggcggcgaaacgtacggacggagggatcagccgaaagagcagaggaagggaagcgcaagagtggcggaagaaagcagcgccaggaaagacgaagcagccgaaaagagggacagaaacgaggcacaaaaagagacggcaggggaagcggaagacggacgagcggagggaggaggagacgaagagacggcacggaagaggacgacggccccgacaggcggcacaaagacgaagaacggaccgaatgaggacggggcggagacaggcacggaccaacaacagcaacagtcgagggactactggtaatggcagacggggaaacggcacggcatttggagggggggggggtgaaatctgaaatatgccatgggagacacggcaatggtagaaaattgaatattataagagcatttgtgcacttctcatccatttcgcatttattctttaaagttatttgacttattctgttattttatctgtttcccatgtgcgtcttcataaaggctggtgatttttattttcactgatcattggtctgctcactgatagataatcattcatttgattggtgaactcttaaagggattaggccagctctattaaatgtcatccataggtcttttttaaacctggaatgtcaaataagaaattccctgtaattcatttacgtaataaattcccataaaacatttcgtttttgaccagagagatccaaaatgccctttgcaattttatttttctcatttcgtttcattgggtttctctgctccttcagttcatgtttttgtttatgatcggacttcgcttacaatttgagactaaatccgattcttcatttgtttacattacatcttgtcctcaagaatttaatcatacctgctaaatcagaaacaaaatgcaatgtaatgagaatatttcctaattttgacaatcctcactcgtattccttctgttcctaaaaagggacggagagcagaaaagaatcccttcccagaatgggatgtaaaatccaacgattcacaaaattcactgattcatttcttccttataaaaataaatgttatgtatttttgccttgtattatttactgatctttttgcactgtcaaattgtttatttgtcatttagtgcctcaccactccctcacttcactgtttttatgcttttacagtttcacctccttagaaaggatttatcatcgcaattcctttcccattcgctgccttttctctagtgtcctactattttcatttccttttttctttcccttgctctttcatcccctttctctgtttctcttttatgagtgcctttccacaattcgttctccactgttgtgtaataataaccacatctgtcccaccctcttttagggtctgttggtcaaaatttacttatacctatttaattttgcattgcttttctcattttttctaaatgctgattgtgattgaatatgggcggtcggggtggcaatgattttgattttgctgctgatcagagtgttttgtcttgtctgtattgatatgttatgatttgatttgctgtttcgcacctctcttaagcaccagcggtgctcccaaaataaataaatacacaaaaatttcaatttattttccaatcttttctctctttcccttctcataaactcgtccatttcttatttattccatccgttttactctcacacatttcttttccattttttcattccaacgttagtcttctcccaacatttacactttctgtccatccgtcgctctttcttttccttcgttcttttgcttttctgtttcttttcccattctttaccattgacacttcgtcctctcttccgtcctctcctctttttcgcgtgtgttcacagttactcctccaacaaccagacaattcattatgcactgtgccgctccactccttcctccccctctaaaatgccttaccacgccttcccttttagaaaacacaattaaataacaattcattgtttcattgacttaatagaaaaaaaaacaacaacaaaagtcggctaatgtctaaattttttttataggtactntgatgaaatgtccaacggatattattaccaacactcgggatcgcatggatggaaaaagacgggcacggaccaaccacaacaacagcccagggactattggtaaggacagagggcggggtgaaatcagaaatatgcatgggagaaggggatacgggcacggcatttgggaggtgggggttaaatctggaatataataattgtaagagtatcggtgccgtttgtcagccatttcggatttatttgggtaatttggcttttctgttattattttgcccatttagacctttaaaaaccctaaaatagagacacgtttataaatatacttgtgcaagggggtagtaaccatttgttcattttttgcctgctgaagaccttctcagggagtccggcgccgtccgggaaattttttgtgtttttaaggaggtttgttaacgaattttgtccaaaaaaatctggggggggaggttaagaaaaatttttaaataaaattatagacgaaa

SEQ ID NO: 7801 - DNA, 2333 bp, Heterodera glycines
  unsure (1)..(2333): unsure at all n locations
cgacagattctgatttgctgttgagcagtttggagtcctgtctccgttaacggcacagtcactcgaatctgagactccttgtcgggaaaggccaatttggcaaaagacaattgccaaagagagggagcaaaggccaagcatttcgaacaaaaggcccttaatcaaaaaattaaattaaataatatttaatataaaaatggaaatacagagccgctgatttaaatgcagtgcaaaattaatggaccatccgatgttttcaaggaagaaaaatgatcaaattttaaaggaattgaaatgataagaaccaaaaatgaatagtcatgagagaattccaacaaattttgcaaggtttcctgttttgaaatgaatggtttttgctttattttattgaatatttgggaaagtattaaagaggcgatttggagatttgcataatatttctcctttttttgcaaaaattatatttcacggaaatccaaaaatagtaacaaagaaaattttataattaagtttgtgtctatgaaacattttgttttgattcttaacaaaaacattttttacttttcagagctcaacgaattagaatactaagcatttaagagcagatttttccccaaaaatcagagtttacttaaatagccaaacatttttattcttacaaattagccctgttttaatgggttattttaaaaagagcacaaacagatgttgatattccgctggtgaatttagagcatttagaatgaattttaaaaaattcaaaattctatggaatggttctgccaattaattgtctttgattttattctgctgaactccagacaacaaccaagtcaaacaaattactatcagattaattagtcanagagtttanacagcttcttctcccgttcttttttgatggataaaaatggaaaagtctccgctgtgaccaaaaccgaaaattaattataataattaatctgaacaaatttatatgcgggatccaaacaaaacacaaagaattgaaaacgatggggggggggggcgtcactccaacactaatgacattttaataacaggatcatttttataaaaaaaagaaaaggagcgacgggaaaagcacaaaatttctcttcaaactccttttcggatttgtcatttttagcaaaaaacaaaatgcgttttttggagtttccaatcgtaattttttggcgacatttttataactcaccaaaggggaatatcagaaataaataccatagccctaaatcattagcttaatatttttaatttatttaataaggcataaattaaatgaccttaaattttatttgtcgccattttttccaaatgacttcaacttcttcgaattttttgattattttgaaaattggcatttttgaatgattttggctgatttggtggaatgaataaatgatgctggttggttgatgggattggcttattcatattgcttaaatacgcttttttgttggaaagtgccgacattctttccaagttggcattggctggcggcggctttttctttttgagaggaaattgttggatattttcaaagatattttcctttaattttaaatatttaaataattgcgggcaggaagcagttgaattttgcaatatgtttatatgtagctttccccaatttttcaaaatatttgtcaggtagatgctgtcccggtcaggggagtttgaaaacgaaaaaataattttcgataacgaaaacgaaacgaaaaaacaaccgttttcttacgaaactaaacgaaatacacgaaaattttttgaattatttcatccataattaagaaacattaaacttttaaattgtatcctcaaattgagggaatggagatgctagtaggtgaaaaagcggatgtgtctctaggatgataattttttttagtcttaaaacaaaagagtccggcggtttcgacatgcaccgccagagaatttgaaaatttcattgcaatttattaacagaattagtacaaaaattgctaattttttgaaaaaaatcaaaaatttttataaatttctgactttttatcaaaaatttggaatggaattccgacccctaaaatgtcggaaatcggaaattccgtgccatccctggtgcttactgttttaattttcaaaatttaacgagatataccatgtatgtagaacaaatcttaaaaaaaaattactgtcgaaaacaatcattgccgaaaactaacagcactgaaatatatatactgtacatacattttgtatatacatactgtacatacatttttgtaaatgcactaaaaaccatcaaaataaaatttgaacgaataaatgctattttg

SEQ ID NO: 7802 - DNA, 1060 bp, Heterodera glycines
  unsure (1)..(1060): unsure at all n locations
aaaaaattaaataatttatttcttttacctatttattcttatgttgatatggtctagtggntataccttctgcctttcattatttgtcgcttgggttcaattccccaccttggtagaatatatcttttatttctttacattatttcaattggaattaattaataaaaaatatttcaactaattattattttttcttttttaaacagcttaaaatcgcaaatttaaccaaagatttggctatttttttgacaaaatctgttaacaaatctattaaaacttttctcggcggcgcctatcggcaccgccggccccccggttccccaaaagcttttggaaaaagcgccgtaaaaaaggcagtttaaagaagcaaaaattcgtcgcttggcttaaaagcgcaaaaatttggcaatttttggtgaaaatctgttatcaaacttcactcaaatttaaaaaaattttacccggcggcgcctattggcaccgccagacccctgctcaagaatttactttgaaagaaaaagcgcgacgcagaaaatttttattgattttttcatatgaataaaaaaattttttattgatttttgaatatatattagagtgacacgggaccgggacctgttcagcggacaactgaggtcaactgagtaccaaggttcaggatgtggccggcgatcggaagtattcccgatttatcgcgaatttgtcgtcagtagtgacaagcaattattcttgaaacggcttacggacgcatatttatgtaagagttcgatgagaacggaaaattaaagcacggcggtcgtcggctgtcattgtttcaagggaaaggcaaaaaagtaacaaagtgctctgggggaacggatgatcaccgtgtaaaaaagacaatctatttcgattcgaatcgaagcgatgtgtccatggtccgcaaggtgaagtttagactgattaaaatacttaaaaacaatgcaatgttgcaattttgggacattttagcgctaccataatttgtctccgctctaccaacccgatgtaagaccaccagtgattcaaggaaatgattttt

SEQ ID NO: 7803 - DNA, 2959 bp, Heterodera glycines
  unsure (1)..(2959): unsure at all n locations
tatttttttgacaaaatctgtttacaaatctanttnaaacttttctcggcggcgcctatcggcaccgccggcccccccggttccccaaaagcttttggaaaaagcgccgtaaaaaaggcagtttaaagaagcaaaaattcgtcgcttggcttaaaagcgcaaaaatttggcaatttttggtgaaaatctgttatcaaacttcactcaaatttaaaaaaattttacccggcggcgcctattggcaccgccagacccctgctcaagaatttactttgaaagaaaaagcgcgacgcagaaaatttttattgattttttcatatgaataaaaaaattttttattgatttttgaatatatattagagtgccacgggaccgggacctggtagcggacaactgagttcaactgagtaccaaggtcccggttttgaccgggaccgggactagtcccggtttttcccggttttcccagccaaaaattcccggtttttcaacccgaaaaggtcccggtcccgggtttacccaaaattcccggtcccgtggcactctaatatatatttaaaaaaatttaattattaacctgaatcccgaaacccgatatttttatcgtcccgcggcaaccctgctgcacatattaacatccgtaaatatacctttgccctaaccaatatccaaagacaacccgagaccgacacacataatatttaatccacaaattatggatttaattttgtttctttttttatttaattttgttgaaaaataaaatatatattatgtgtgaaatgcgtaaacatcaaaattttatttgtcactggtggccctgtccctttttattttttctttgttgtcaacattcttttgggagtaaacaactttataaacgaaaagcactcgcggctaatttccgcagaaagtgcattacattgattaggcaattatttttgaaaatataactcgcttataataaaatgtattttaatttattagcccaatttaattattttttgaattttcaacttaacttcatcaaaatggttcttcactcggtaagaattaacggttgaaagttgttcttaaaatatctcgcactaatgggttgtgcctctcctaaattatagcacagcaatttttttaatttataatattgtttagtaagtatcttcaatttttactcggtctcgaaatttccactctcgagcggactttccgtttaaaattaaaaaaagcctggcatcatgcaaaagcccaagtgttatttattagcctacaattttttttagaaaagctgaggctagaaaacatgattccaaaaaacccttataaggatatcaggaaatgtaaaaatttggtgcttcaaaatttcttttttttgtccataagcgtcccaaggtgaggtgaatttacgaaatgtcccggcacggattgtgccattggcgctgtgtcataatttttctgctgaattttcctccgatcactttttttccagcaactccgtggcgtacacattgcgaaattggcgtggcccccgaggggtgtccagtcgccctatctgagcaaagcaatggccgcgatcgaagagaaccgcagtctgtcgctgtatgcgttggcggtcggcaccgcacttgcggccgccctttggttcggtcgcggccgaacgtctccgcccccgggcaaccgtttcctggcggagcccagcgcggacagtctgctcacctgactgatcagtgatcaccagggccgttgggggactgatcggagtgcggaatcgttcattttgatcacttcttttgatcattttgttgtgatcgacgaacgcaataattgatggatgctttaacaacctttgtttataattttctcagtaaagaattttaacatatttttgtttgaatatatttagggttggtaggggccggaagagtcccaaaatgccggccgatggaagaagccgactttgtgagcgaggaatgagcccaacaacggcgggagcccgtaaccgtcacccgtttttaaattccaaaatagcttttttggatttgagaatacaaggaaatatatttcttaagaattacataatttcattttttcgctttcattcatgaaggctatgtgttgaatccccttttgacaaaatcatttatttaatttaatgatcaattttcacttatttattttgtacaacttttcttctctctccaccgatttcctctcccatcctaaccaatcgttacactttactgtaaacccaagccaagccaatttgtgtccatcccagctcactctcgactccaccccttttctcttttgctatttaaactgaattcattccttgcattattacccttttttttactcactttgactcattcccattttacttgcctttctcacttttgctaaataaactttcattaacaaacctaaagtcttacttttgattgggaaataagtcgggaacacaacatctttttggtgccacgacccgggaccaaaaaaaaaaaaaaaagttcccttttcccaaatttctgagcaaggccgcgtgccgaattgctgtcgagggttggtcgaagctgtgtgctcccaaccgaagagactaattgcggagggctagtcgaagctgtgtgctcctagctgatcaaacggataattatttgagttagtcgatctgtgtgatcctaaccgggctgtgtgccaatttcaaaaaaaaaaagtggaaaaaacagtaaaatgtcaggcgagggatctgactttaacccagcttttttcacggtggaggaaaatgctcaataccaaaccattctcgagcgtttgcgttcttttgaagctgcagtttgcagccaatttcgaaagcttgaaagttctctgaatggaagtgaacgagccacaaaggaccaattgagccgtctcgagtcatcgctacaaaatttggacgagaatgaggagatggatgaattcgaga

SEQ ID NO: 7804 - DNA, 2717 bp, Heterodera glycines
  unsure (1)..(2717): unsure at all n locations
tttaagcaaaattatgccatattttattgaaaaaataataaaatgacagcttgcacgaaatcacccagcatgaaaacccgtaatccccgtaattatgggaggggggggggggccttaaacccgaataaaaaatgcttaatgctccgcgttccctcgctcgttcgtcagacatggtgctgctgttgctggacggatgcatctcgtgtgagaaccccagcggaaaggaactccaacgtganacatttcgatcattcgatacgtcaaagctgtaacctgaaaataaattaaaattaatttaatttgatttctattttcttttagggtttccttcccacgaccgattgtgacgcttattggcaccaatacaagtgggctcccctttttgacaatttatttatgaaagaaaaaattcatttgtggaaccaattttaggaccaaaaattttttctgcattttttggccataaacttttttttatcaaacttaaaacgaaatgaatattttttttctgactttcactgacacgattttttaaatgaaaattcatgcccaattttaaatcgtctaaatcacagtctaattgtacgttgaaaagtcagtactgctgggcgcccaatctcgggttttcttgacctagcaaattgatcacaatttttcacaaagtgttgatgtttacaattaaaaatacattttttttgtaatcgaaaaaaaattgcttattattttcaaaaaaatttctccacaactttttccatttgtttagacaattggacgtgaaattgaaagatggtaaaggcagctttgcgtacaatgctttgttgatggagcggtaaatttggatttaatttaaaatgccacacttttattcttaatgaatattggcacaaaaattccaattttttttttcttcataaaatttggtgtccattttcagtctttgtccaatggtcaataaaatgggagaagctgcaaacaaagacaacatgataatgcagccactggagtaaattttaaattttttaaaatttaattgcagacaattaaaacccttaatttattgtttattaaataattgagcatttttactggtggtttaaataatgtttttgttatttttatttttttaaaattatattttggcatatgacaacaaattttatcgtggcagcattcaatagtcaataattaaaattataaaatttaaaaaaatttaatgttacattttcaacttttgcaaatgagttaatggaaaatttcattgatttctgccaattaaatatatttttaaatgaagttaaatacattttaaaataatatattgtttttactatttagatacaaattcgagaatgtgcacgtggacatcatgcacagctgtgccggaggagagccaaaaaaagtgcaattgtttatttggaaaattaaattttataaaaatgtttgttatatactgagctaatttttacggaatgatccatcgagattattcccaaagtcacccgaaaatggatgatttttgaccgtgaccggaaaatcggtcagtggaaaatgcgtcagtggaaaatgcgtcagtagaaaatgcgtcagtgatgcaaatttttaaaataaaattctatggcattagtattgtaatatagaagtaaacttctataagaaaatcattctcaattgcgaaccccggacccaaactcgaacaaaaaatcgaaagtcaaaattttcgaaattagtgtttttcttcaaatcggtttaaatacacagaaacaaactgaaatacatcaatcctgcaataggagatcatttatgccgtttttgaacaaaaaatgcttaattcgaaaatttagacttgcaacttttttgttcgaattcgcgtccggggttcagaattggccgaaatggataccagattcgtggtaagtgcccccgaaaacgcaaggaacttgtttttatgacaataaaattttcactgacgcattttccactgacgcattttccactgacgcattttccgggcgcctttttgactcccaaaatttctaatgtaccacttttcctttttaaaaaaaaatctctcctcatacatttttttagcaatgctttaatttattttttcaattaaaaataatgctttcaaaacaaaagcagttttttaatttttcctagtttttagataagtttttgagctatttggttttttgggggagggtctatttttggcgtttttgatctaaattcttctcattttttttaaaattacatttcaacaaaatttattttggagaaatttttattacatttaataaaaaaaagaattggtcggcataaataaagtcaacaaactaactttgtcgaaaaattttcaaaaatattaatatttaagttttttcccgatttcagatcagactccaccttccgaccatcgacaaatttgagaaaaactttatgattaatgaccatgtcatgcaggtaaatttggtgacgcttacttaatttgaattttatgaaattattaatttacaaaagaaattatttatttatttattgccacaagttttttatatattttaaatttttatttaaaataattatggaagggatgaggcctgtcctttttgccgaaaataattcaaattttcacaaaaaattttaaaatggtatttaattaatttcttttgctattatccataaagtttccaccttctcaaaccaacttccgaact

SEQ ID NO: 7805 - DNA, 4993 bp, Heterodera glycines
tagattcgcaatcttcgtttgaacttggacgatctgcaacacgaaaccgagctggatctgagcgacaccaaccatttcaaagctggcgttggccgatacatttcggcaaaattggtcgggcctaagagaggctagccgaacacggtgaaactcgcagaaaaaacaaattattgaaaaaaaagaattttctaaatatgctaaaaaaaaaaaattaattttttaactttaaaattagctaaagagattaatggatatcaactttttattaaatttacattgaaatggcaaaaaaaaagattttggtcagtcttgcaatacttattagaccgcgttattttgaaaaagcctgggcaagtacctatattttctgtaaaaaatccagacccaaaaaactagttccaaaaaattcctaggcaagtcctttgtgctaaaaatttataaattttttaaattttaatcgaaacagaaaaaatacgcagacggatgaggaaggactaagaatgaggaagtgtagcgcgataattaccgtgcttggaaaattaatttttaaacctgactattttctggcattgtgtttttctgccattttatgcataaaatcgatttatatatataatttttattttgtttaatgctactcgagaccaaaatcccacctttctcctgttgagacttttctctcaaagagcaaatcatcgatggccagcaataattttctttaatttgcaccgtcggcgtctattagcaataacatagcccccccccccccccgatttaccatattttgagatttgacccttatggccagatactctgcaatactgtgaagctttcatatataccaaagttttaatagaactcatgttattataaggaagaaaaaatactaaaaagtatatatatttttttattttaatcaaattcaaaaaagttacatgtcttaaaacttttgtacatataattttggaataacaaattcgagtcaagtttcggggaaaatttaatatttttttctacactttccaattttttattggaagtatgagaaataataataatataaaaatgtttgttcttgtaattttaaagattgatttttttataaatttaaaggttaatttttgtaacatatattcaacattttcagaatgagacatattttacaggaaaaatgccttggaatttgttttatcgaccagtgaaaaatcataaactaattaacatttgggataaatttatatattatttcatttcttcgtccattttattcaattagacttttaaagagttccgttcatttattttggcatgctgtccttgcactgtttgcccttgcatttgtacagcccatcgcccttctaaaaaagtttttcatttattttttgagtaaattgggacaaaaaagaaccctaaacagtgatcagcaattttgaattgatcggaccaatgttttcaagtttgttattaaaactttaaaatcgcaaaaaaaacaaaacaaattttaatcgatttttaagttaaaactcaattataaatagttatgcaaataaaaatttaataatcaaaatttttttgtaattgtcatctattaactcgaaaatgtgtttttttttgccgtactttttcaaaaaaataatgggggagcgggtcttcgtgccgatagcgccaagtcgaaatatttccaaaaaaataacaaattgttaggaaaaaaaagttagtattattctataaattttttaaaattaacacaaccacaaccattgagtattatggactggcaactctttttaagagaattagatccttcagctccataaaatgcgacataaaccggaaattaataacattaaattattcttaaaatacgcttgccaaagtaatccatgaagctgcgcccactgcgccgccgtctccgatgatgccgaacgcgcccccctggggaatgccggccaaaaagtcgtatgccaatgcggtgatgccattctccatgctcagcagtgcggtgtgcatttgcctcactttgtatgtctcgtgcaactgttttcgctcgccttgaacatatccatccaaatatccattctcgccaagaatcacatcgatgcattttgtgacattgctttcgttgaatgcaaagtattgacttaagcacaaccaaatttggataaaggaattttcacggtccgtacacttgccgtcaatttttttttaaaaaaaaaaaccaaaataaggcttaaatcttcggatgcgaaaaatctgacacatatccgacagttacatttgaaaaatattgtagaaagtgatgtatccaaaaaaaacctatttttttttgccttataacgtttaggaacaaaattacaattaactacgaattctttaattacaaaaattctatttatttttggaattgctgaggcaaaaaaaattattactcgtcatggataattaacggtggtgttacactactaatctctgtcaattaactattgaaattaatctcgacaatcaccttatcgggttaaacgaagtggagaccatcaacgatttgttcacgtaataataagaaagttcaaatccatgaagaactttgtcaccaaattggggccaagatttcttttgtgccttgcggcatttttccgcaatttcactcttttcaaaattttccaattcaaatcgagaattgagcggcccattggcgggattcatttgtcccacataacaaacggtcaatttacaacaattcttcggctcgcaattcgtcaccacacacatttgcatggtcaacgtgcgtcgattagtgttcggtggggcatcattaaagtacagcttgacaagttcgggcagtgccccattgagttggtcggcgtaaattgagctaaaaaggttatgggctcgaacaaagaaggcaaactcgtacaagtactaggccaactcgtactgtattcgatagcccttgagcttttttgtttcgaagcaaaatttaaaattttttttatcatgtttgaaaacagtcaaggacaagttttttttaatcatttctgaaatataatttttgaatttagcataaagatagagcatcttaagggccaccacttgaaaccaagaattttgacaaaagatatgacgatttttttttgttgaaaaacagaacgagtggggacaaaaacatgaaaaatttagcaaattaaaaagattatgggttgtgcaggttttcaaacatatttttgcgcatattaggatttatgcatatgagaagattaaaaaattagtttaaaataaacatatacaaaagtttaaaaaagacctactgatacttgattaccttatcaaaactaaaaatcatatgtttcccaattcagctggttttttttttgtattcaccaataaaataatgtgtattcatttttaataattattattttttatttacatttcgccgtgttcatcaaacacaactggcacatttcgagaggtggtttctttgccggttttccagtctttccattttttcgcgttccttgtttcacggctctggcccacttgtccgtcattaactattgcttcgtaattgggaaaattattagtagatgcttattaaatttttagttatacttaatttattaactaattaattaattaattttaattaattaattaattaccctcgtcggctgattccacacaaaaattatggagaagcaaaggaagccaaaaaagggtgaagagtttaaggatgtccattaatttaattaatcaaaaatttggtttaaactaaattattaatattattttaaattcttctcattacgattgatttataaacatatttataaaaatagttggtgttaacccagggacagaaattatcatcatactccatcaaagcaaaacgaaaatggatggtgaattttgatgaatcaccaaaacgttaaacgatttagaatatttttgtactataatttttttttattagtgtaagaaaaaaacaaatttttaaaagaaataatgaataaaatggcatggtataaatatttaaaaaataaattaattttgactaagaaaaatagcagaagcattttggaaaatctttaccatttttgtaaaggtatatattattaagggtgcattttttgtttttttttaatatgttttacaccgaaaattgattggttttttaaaattttaaacagattggaactttagaatttattttctttttttatgatttaaaatccgaagaattttcagcataatcaccagtccgtccgaaattttaatctgttaacaaattgcactcttaattttctaaattttccccggcggcgactaacggcactaccggcttctcccaaaaaaatttttgggaaaataatgcgtcaaaaaattgaaaacttgggaactttccaattgaaaaaataataattttcttaatttaagaattcagataaaaacaaaatttgaaataattgattccgatatttttttgattgattttgaaaatgttaaaaaattttagaatttctcagtaagaaaaaaattcgtatttcgcatttcttttcgtgtttttaagaagtttcgtgttcgtgtttcatatttcgtaatattttttttagtttggtatttttcgtattttattttccgattcgcaacactcctgacaaatgagtaattagtcgatatctctctaattatcgcaaaatatagttatataattagttaaatgacttcaattttttattaaaattgattcatttatccgatttaatggtcgccccaatgaaaccccgctaaaattttttgtttaccgcacccgagttgccgcccgaatcccgacctttttctcgtcccgaaacccgaatcccgacccgatgtttttggttcgggattcgggacaaaataagcactggtaagaaaggggtctgagtgaaaattaggtagataaggaaattggcgaggaatgataaatttttgaaaaaaaaattaaaaaattgatttc

SEQ ID NO: 7806 - DNA, 1811 bp, Heterodera glycines
atgactattttacaacgcatggcgggaaaaattgccccctatgtttgatgttgcggaacctgtgtgggtccagtgcttgtaaaaaattcagcatggacaatcgatgtgataaagtgcaagaaccaacaacatttgtaacacgtaacttgtggattcctagctgggagtccaacgcatgctgcaccctccgtctgattttttgtgtctcgcgcaccgctctgtctggacaaggcacaccagtcaacacagcacgggctgatcgaaataaaagacatgcaagagtgcgttttttggggagacgtagtcgtatgatgattgcatgaaatcgttgggggtcgtactcggaattgaagccattttttgcaattttcaaaaactgctcttttgtgaaaggcaacagctgtaatttaaacaccgcggtacaattttgaataattaacattttttatctaggagaaattaaaaaaaacaacaacaacaacaataacacagcaaacttaagcacatataaaacacccgatgcgtattaatcaggcatcttttatgacgctcagacactcaagcggaaacagagaacaatggcaccaccgccaaattgaagaacacagggaagctgaggataaacgagctttacgccatgcttcacatagtagtaaatacggacctaaaaacaatgtatatctatacaattgaggagctgataaatttaaattaaaaaaccgtaatgccaagataaccgcgcatggcatatgcagtttgagcaggatgaattgtcagttcgttgcaatggacgcgaaaatttttccaggcaggacgcagatgattggtgcgtaactgaagctgagagcgcaacatttccgaaatttcgcgacgtttgttcagcgtctgaagcagaacgtgaagctctttaacagaacatttgtagtgttggcagagaaagtcaatcagcgggacactcttttgcttttcgttacagctacacttggactgtaagtgttgtcgctttggcggctcaatctctaaattttttttcatttttttcttgtaaacaaccaaacctttcgctcgttccacttccatttcaccagtttgcaattcatttcctcgctcctcctcctcttcgataattttaagccaactgatttgctcttccttgattttatttattcatttattttatttttttaaatttatttttgtgtaaaactcactgctttgacggcatcgtctaattcttcttccacactagaaattgttgttgttgttgttgttgtctttcgctctgggaacgcattgtggagccaatcggttgcaagaattgcgtccatttggtgtttgaacaatttaagaatgatctaaacacacacacacttatttttattatatgtatatataaaatagaaaatgtaggtattttgaaacaatttatgaaattaaacaaatggctgacaattttcaaaaatttgatgaaaaacatttgcaattcagacacccgttcacgctgacaatctcggggagcacggggagtggaaaatcggaatgggtgctgcgaatgctgaggaatgtgaatgcgctagtttcggaacccatctccgagattttctattgttatggggagttgaacccaaatataatacagctacagaaaagtggacacatcggcggctgtagggttgttgtacatgctggaagcccaaccgaagagcaggttaaccggcgcgcaaaagagagtgatggaaaactgctgatggtgctggatgatctcatggatggtatggggcaacaatttcttgacactgtgttcacccggg

SEQ ID NO: 7807 - DNA, 4902 bp, Heterodera glycines
gcgggctccccccattggtttatgttgcaaaatgaaccttgtaaaaggaagaagacgtacagttaaacataatatgaatgttagcccgctgatgttgaaaaatgctgacttcttacgccactttcgctctaaatatcgctcaaaaagcagtcagcgccaaatgattgagaatgctttggatcaacagctgctctgctttgtggaaatgtgttttaatgtgttgaagggtcttgttccgttagggaagcgacaaattcaacggttggatgaactgaagcaccagttgaggagcttagcacgcgcgcgttgcgctaaaacagctcgcagggtgctattgctgaatcatcaacaacaacaacaacaaaccggtgctgggttcccaatggtagccagtatgttggccagtgttctcttaccagtgttgatggacaaatttttgccaaaaaaaactaattgacggggaaataaataaatatataaaagcgaaacagcaggaacactcatatatttgagacatttgaggagagcgcaaaatgcgtcatgcaatgcgaatgtttctcgtcccggaggacgtctttcagtcggtatttgttcaacaccacacaacagcagcagcagcagcagacggtgccgacggcacaccaattgggcttttgcgctcgcgcatccaacaaattgagcgcagcagggagctgaacgaagagcagaaggccgcgcaataccatcaggaattcaaacggctcaacaaactggtgcgcgagcaggaggagcagccgatcaatgttcgacttcagcacgaaaaggagagagaaaaaaattcagcaacgccgctgccgccgccgcaaacgatcaatcattcaacgccaaaaagattggagaaaaacattgtaccatcagcgtttgggttgaggaggcaaagacaccactacacacaaaaggctggggcattatcaaatcgcagacctgcccaaaaacaacaaagaaaagcagcagcagcagaaacaccaaacagcagtggaaatggagaaacggaaaaagaagaggggaatggagatgatggggaacagtgggacgacgcacaatcatcatcgtccacggcgtcaacaggtggtgccgcagcaaaaagagtgctcagagcaagagatggggaagcaggaaaaggaggaggagaaacggctgatcgccttcaaacaaaacacaactaccaaatgaccaaaaatgcactgatcacacatattcgaaaaaaggggcacagtctgggagtcagtgatcagggaaaggttttgcgcgcagatgggtccgagtttaaaacgagcaacgtggaggcaattgtcagccatttgttgaacagggacaagcgaagcgaattcaaaaggccgcctgtgggctataaggaatttgctgataaggctagagaggatccgttgctaaaaaagtatttgtttccggaacagcctctacaatttggcaaaggcctgactgactttaggcatggaaaaagacataaaaagaagtgcgaagggggaggagggaaaagtgtcttcaggttcaaaccgacactatggtgatagaccgaaagaaagaacagctgttggaccaactgtacaaagatgttaactcatcggtcagctttaccagcgttgagccgcttttgcgcgaggcgaaaaaggtgaacaatcaaatgagtagaaaggatgtagtggactatttggccacccaacgcacatacaccattcatagacaagcgaagaggcgctacaaacaactatcaacactcgcttctggactgcacaccgaatggcaagcagacctgtctgtctttgacaaattgtcgcgagagaatcacggctacaagtaccttcttgtctgcatcgacacattgagcagacagctctttgttgagccggtgaaaagcaaaaagagctccgacatggttgctgcttttgaacgcttgtttaaacgctccaaatacataccatggacattgttgaccgaccaagggctcgaatttaaggcaaaagaggttcaggaatatttcaaaagtaaaaacgtgaaaaactttttcatgtacacctcaccgcgaattcacgcagggatggcagaacgggccaaccgaaccatcaaagagcgactttatcgctatttcacggaacggggtacccaaaaatgggttgatgtgatacagcaaattgtgcatggaataaaccactcgtagaactcaagcataaaaatgcgcccagttgatgtgaattttgagaatgcagaaaagctcagaaaaaaacttaagcagaacgcagttggtgggacagcggaattaaagcggaaaccaccactaccacgtttccaggtgggtaaccgtgtgcgcattgagaagtacaaacacgtgttccaaaagggctacactggacgcttcaccaacgaagtgttcactgttgccgaagtgcacactgaccgctttccagtcacgtaccgaatacgtgatgacgatggttcactgattaagggtcgtttctatgccaacgatctttgtcgtgtgctagtgcgcaaaaatgatgatgataccctatatgacattgaaaaggtcgtccgaaagaggaaaaagcaaggtgttgaatacgttttggtgaaatggaaaggctacagtcaacggcacaacagctggattcctgcaagctcgatgacatggaaaaatatataaaggggctcttttttttaaaatttcaaatgagaatgccttcatcaaactcatgaaaaagcatggtgttgaatacgttttggtgaaatggaaactttatttcaaaaaatttgtaccactgacgcattttctttctactgacgcatttcccactgacgcattttccactaacgcaatttccggtcacgcaacttttacatgcttgctctaacctgacctgataattgtcgcagagtccaaacacgtaggttatttcttcatggtaattagcgtcctgtgatttaatagaaatatgattatatacttaaactcggacctcttgtgacgagtcctcatcagtggtttcagtcaaatcaattccttcaaggagtctataatcaaaaatttatcttttttcaactctaaagagattaaaaaattaattaatatttagaaagcgtttagcgaatcatatattattgcatttaaacaagattttgaaccgaatcgaaaatatggaaaaatggacctttacagaagcttttaaaggccaatacatttttctgaaaatttgttggatttcgaataaaataattaaaattcactgaatattgaataaaatcattaaccggaatagtttgaattttttttaattttgaagttcaatagcgcctataaattttcaaaataaagcctaagcacagacctagcccaaaaaatttagctagagttgaacggatacatttacattttagattcattatttttgtgatacaagaaaaattttagaacaaatgtgaattgtttctaaatggcgcctcgtggcgatcacaattttagagaagcctcattttaccaaataaaatttttgtttttaaccacacgcaaaataaacaaattattacctgctcggttttgtctttgatttctggttgttgaagtcgagcaaccactgcacattttctttctgtaatgattttttgcatttggctctcaacatcggtgctaagtacagtcggaagagcaaacagtcccgtttttttaagtccaaatatctgcttcaccacctaagaaattcaaaaattatgaatttatattctaaagatagggttctgctcaaattaaatgaaaaagtaaataagattaaattaaaaattaaaaactcagaattttaaatttttcggtggttggcgattcgggcgacgctcgattcgagataccgcaccaaaaataaataaattttgcgataaaataaaatagataaataaagctggatcctgtggcatatgagcctaaagtaaatttttattttatcgaaagttaattgacatttggcctgccaatatttcgcttttcgaaacaccaaaatttcgagaagataaatcagaaatttttcgaggtagaagacgcaattatataaattttttaaataattaattttattaattttaaattatatagaaaataatttagtgagagcaaaaaaggtaacttacatatgtgtatgccgcagatcgaatcgaacgcatatcacctttcccaccttgctcgtttccatgatgagcaatttcgttacctattccaccttaaaaacattttatttttgctctaagctgcttaaattaccaaatttgagatctatgaacgcaagtaactgctcagcaagtaactgctcatctgtatacgtagatggcagtttgtgcgttgtgtggctctccatggcatccgctttgattgttatctacatttattaatacattctttcccaaaattagaagtacataattattctcatacttcctatgatcgcatcgggctgaactttttactaagtttactgacccaaattaaaaagcaaagaaatttatttaaaaatttagaggaaaatttgttacgttttttaaaaattaataatgccccaaaatgataaattctacttatgttttaaaaccgagaattttggccaaactcttcgcagatagcgataatacaagtaatgatgtgcttatagtaaggtacaatcacttttttattcatgtggcaatgcgcaaaaaatgaacaaatggcgcacctctaaaaatataaaaattgtattctatatttataaactttttgggttcttaatatttatgggacatgtatgtttgctaaaaactacagcccgattgaaacataagaagtatgagcaaaagtcttaaaaagaatcggtctaaaaacatacgctgatg

SEQ ID NO: 7808 - DNA, 2091 bp, Heterodera glycines
taattttacatttaatccatgccaaacgtagcgcaattgccccataaaatgcgaatgaaacgatcaaatacgtccaagagtaggggtaaacatctaaattaaaaaatgttttaattgttttattaattaattttacataggtaaaatggaactgaaatgatggccaacagatgcattacaatacactggatgaaaattgtcctaaaattgaaaaatatatctgttttttaaagttatctaattagcatgattcttggtaatttcggtagtttaagctataagcgaaaatgtcaaatttgctgattccgctgagggattgtaattcaaaatatttttgtgaacacgatatcccacggcattaatcccaaaaatgccgcaattgccaaaaaatgctggattgcggattggaccccgtaaatttccggcgccgaccttttattagcattatttttaggggtatattttatgaaatttttgaatcgattcttaggtgtgtatttttggtatttaatgcatatttgctatgaaatttcaggaaaaggggctctaattattagcattaattcttttcgtaagtttgatattttaggcatttgaccaattaccgtacaaatgtacagtaagtatccttgtagtgtttttgttttctctcacttttttgtgactttttgtgcataatgaaacgggaacagtacggcatgggcacggtttgcagccactgcaacaatgtgcaaacgcatactgatccagccaaatgtttggcaatttgccgctgttttcacaatgaatccacgaacattggcagggattagaaaaaagactgaactcttgtttggaatacttgacaacaggtagataattgttggcaaaatctaaaaggcaaaatttggaaattttttcggaaatttcctcgctttttattgcacatattttggtgtttcccgccgttgtaccgttcatgcgcgaaaaccgcaaaaaaggatatttcgctaaaaccgcaaaaattttaattattaatttatttaaaatgttattaagtaaattaattgaataaaattatttattaatttattaaagtaaattcctgatgacatttgcggaccgacttttgcggaccgacttttgcggaccattatttctgggttgaactgtctaaaaaaacaaaaataaatatttttttttcaaaaattgagcaacaaaattagttttatttgtggtttttccgagttgaacatcatcatccattaacagtagtaatctaatcaacttatgtaatcaacatcgaaagaacccatttaatttttagaagtttagtttccattaagaaataaatagatatacttagttgctcgtttttaattttggttggatcaatggttttagaacaacaaatatgggcaatttttggggaaaagatagaactatttttgcttttgtttattaattcaattgtttgatatgccgtataaaaatttaaactctcggttaatagtgaaacactaaaaaaatttttccttggtataaaatcctgaactgacttttatatgtattaaaatagcgaattttttcgccaattttcactacgcgtagagaagcaagaaaaaaattttccacttggtttgggctaggataaaataaattctccaattgaacagatcgccttgcatcagcttaccttcactaatttttaattttggtagtatttaatttattgaaaattttttttctttattttgacagttcaacccagaaataatggtccgcaaatgtcgcactacggaatataatcaagcatttaattcgtagtgcgacattcgcggtcatttgcctgacttgatgagaatcttcaactgactcgcgacctcgtcgaaaaggaattatctgatccagtgcgattacgtggatcgaggtgatcaatcccctgaagaacatcatgctgctacttggctacaaggtgtggtttgactttttcagacgatactaaagaaacgttaccatttttaggtcatataatcgacatcgattgtgctgctgacaggaaaccacgagactagacacatcaacgcaacgtgaagttttatttctcacact

SEQ ID NO: 7809 - DNA, 2498 bp, Heterodera glycines
  unsure (1)..(2498): unsure at all n locations
gagcagcggaacaacagaaacggaagcgaaagataagaaaaggcgaaggaaaagccgacggaaacgcagcggaagagccccggggcaaatgccatcggtcaatgggaaaggaaatgccaacggaagagcagcggaaaagcgcagggacaagtgcagactttgtatgggcttcagcgacagatgacaattgaccactcattgtgccattctttaggcccctctgcacgttcagcttgtccgtctgctagtctccagatcaggccaagggcgcgactctacctgtatgtacgcttggtttatcctctcgagcaaacaacgtttagtttgttgaactattttgaccagagagaaatgccccccacgggaaaaaaaacgctgcccggaaaaagacacatctaatttcaataaatggtcaaatttgtttaaatgcatttttagcgcctaaattttttcatattttttatttataatttaaaataaaggaaattgtagtaaatattcattgtaataatttttttgatacgaataaattatattttgtgattattcaatttaaattaaagaatgaacgactgcttatcattcattattcgttgcaattcttatcaaatcctgagattgtttttcattaaattaaacagacaaatatctcgtgagtagatttcatcgtaaacaaaatttgggcatttaaatatatgttttaattttatcataaaattcttgaataatcttgggatttctaattgattttgttggggatctcatcaagggattggcggaaaaaggttaaagaaatttttaacttaaaaaactgagtacttaagagaatcgtgagctcttaatggatttctttcctatccacgtttttgtggatgataaagaaatcagtgtccatcttgacgaattcaaagtcgatatcttattccccaaaattgctgctttgtttgaatcgcctgcggcttcttttgaccaaatttgtttttatggttaataaattaaataattattatctttttttatttatttttgttaggtgttgatgggtcgccaaaacgaattcagaaagaagaaaagcaacttgcactgttgcttttgtatgcatcacacaactttggcaaattgaaattgtttaaatgcgatgactgacttatcgtagaatattttgatattaatcccttatatatttggatatattttattttttaaacttactcgtatatttttggttatttttattttttaaaatcaattatttgtttcacttaaattgtagttcatattgttaaatttatttttttaattcactaaattatccgcaaatgtcgatccgcaaatgtcggctaaccatttaattcaatcaattttgatctatgatcacttgaaaatgtccacttttgaagtaaataaagttgatttatattctcttgcttagtcaattcagcagtatgattatttaaagctatttatttacttaacataacttattataatattgaataataatgcaaataattttaaatgaatgtcttatgactagggatgcgatttttaggcaaatgcctaaaatttttgcgcacttaatacgcacagataagcacaaaaacgcattttccgcttggtttggggtgcctaggatgacttttacaatgcctaactttgcctattttggagtttttgtgcttaatgcctatttttatgcctatttcgccatttttggcgcctttacaaggttttcggcaaaatacacataaatgtgtagttccctaacagaaatgaatttatttatttttttttctcaaaaattttctcttttcacaccaattttttattttcgtctcaataaaaattccctatataaaatgccaatcacggatcaaaatcacggaaaaattgaaaaaatccgtgacccgtgatccgagatcacggcaccccaataaaccccgtgatttccgtgatcagtgatccgtgatcacggccagccctggtccctactcatcagcagtaagattataattaaacattcagtccccatttatttatgataagagtcataccccatattttagtcattctctaggaataacgacctaccatttgaactgcggctttatgccacgaaaaagaatttcttatgagtaattttttttgcgagtttgacttcatgggtgctcaaaaatctatgaattttgaacaagcgacataaattttttaataaaaaatttaatagtttcaatcatatctgaaagagcaaattctgctctatgaataacattataatatttttatcatttgagcaaatgtgttacagcccgagatttctcacgttgtttgtcgagaaacctatcgatgaattttacacacatattttattatctgagagaaatttgcttaataatattaaaaaaaataaattataaataagttgtattnngcatatatatttttaaatgaatgacttatagaattattttatttgattactttgcttaataacattt

SEQ ID NO: 7810 - DNA, 3160 bp, Heterodera glycines
  unsure (1)..(3160): unsure at all n locations
cgaacactatatatatatttttgaatcgctattcaaaatttataatttttgattccatgaaaacattaaaattctttaaaatttaccataatcaaaggcacaaagaatgggaagctcgaaaagacagcagcagctctgaccaaattaaagaaagaagaaacaaaggatggaaagaaaaaaaggaatattcattaattatttgtcgattaagaatgggaaaatagatgtgaattttattttataaaaatttctttagttgttaatttaagaaaaaaaatcataatcacaaatgaaatttccaataaattgcgggatcccgccgtgcgggattgcgggattttggaaatttcaaaaaaaaatttaaaactaaataaaaaatttcaaaataaatatacctaaaatggcgacacataaaattttaattaaaaactaattgaatgaataaacgatggaagcagaatttgttattttaaagatcaaaaaaaaaacatatttttgaaccttttgttcaactgttttttgcgataaatagaaattggtttaacactaaaacacaccctttggatttcatttgtcattatggtacattagccaaccgtatacccattaaaataatgtgcatgaaaaacgagacctttatcttttttagtcgcttctagcatgaaatttttgttgcttttttttattcgtgaattcattaatttttctacaaaatttcaaatgaaccgcaaagtcggttctaaatggggaaaatattttttttaatgaaaattttgaaaatatgccttaaaattgtgnagaagatagtgatcgatcaacaacaaaaaaaacggccgatcaatgggatttacgcgcaattgatcagacaatttgagcggaatgagcatattttgtgctatgttggaaatttaaaaaagaaatatcttctttttttatgggttttattatttatttatttgacttctttgcacttttatgacgtttttacctttttaagcaaaattatttaatttgtctattaaaaataaaaataaaaattcagagtcccaatttggtttgtaagaaataggtgaaagacaaatcaattaataataactttacctcaaaaatgaatttcttaaaagggccggccaaccatcgacagtatcaacagcgggggtggcacggaattccgattacggcatttttggggtcaaaatccgatttttggctgttgttttagaataaataaattttctaagttgtagaacaaaatttcaaattgaaaattttatatacgcaaatcttttttaaacgcttccacgaatatattgttggaaaatgtataagttaagcaaaaaatagaaaagtgagctttttcgtaagttatggatgatgtgagagatggacgtaatgcacaaagaaaacggtagaaaaaatgccggaccaaatgagatttgggacgagaaaattggaggaaaaaggtggcaaaaaagagaggcggatgaatgagaggcacttgacgaatggcaccagaaaaaggtaagacgaagagcatttctgtcgatcattcttactccatttcagaaggggaatcagccggcggcggtggactaggcgcataaagctataatttgaaaagtgcaagaaaatatgttttaatgaattactaaaaaaatcaatggattaattttaaataaaaataaacaaaacagctcttttttattataggtttttatgggcatttgaaaattgcatttaatttgtttgatacgttagcttacttcatttagcaggtcgctgacttcactcatgaacccgtcccaggcatccaaagtggcgaaaaaggtgaccatacaaacgtcccattgctgtttgattttaaaatatttaattaaaagaaataaacccacaaaaacattatcaaaaggcaaaaaaataaaatttaaataaaaacttgtttaaggataatttgtgctaaatttagtgggcttatcataagaattgacccacaaaatcaattcattatgcttacaatatgaagcggcaacggatggaaagtcaggccaacattgaagcgcatttcaagttcattcaaaacgccctcagtgaagtgctcgcgaatggccgctttctgaatcaattttcaaaaattttatgtaattatttaattccgaggatagaataataaatatttgaatattatttatttatttaaatggcttaaaccccgtggccatgcggtggcagaagagaaacaatgaagcgtctctcattagcaccaacgtaacagtaattgatgagatcgtggatatgatcaaaagagaaagaagcccaactccagtgtagacgaggaatcagtgcctggattgtgtgcggagaagggccagttgacacataagtggtattggcctcacgtgcctccaagtcctaggacaattttttagagatttgctggtagaaactgtcattttgaaaagcctacacctgtatttatctgggaaaaccttttaaggctcagaaaaaagtaaaaaatattaaggtggccaaaatttcttttaatttctataaacctaaaaccattctgcaatttatttcccactggcaacaaattagagcaattattttcaaaattattattaaaaattattgtacttcgattttccatcgtttttcacgttttgtgcatcgaaacaaaaggtaaaatattgagtttgttttgctcaaaattttacggcaaaaaaggccgggaacgaaacgggacatttcgtcgaagagttcggctgggagagaacgatgctttaccaataggtgatccatggggacaattaagcaattttggggggggaggggggggggcggtttgccgacaagtcggaaaatgggacaattgaaaaggaaagtggaaagtgagcttaaatggagatgagaataaatatgtacaaaacatacctctattaatgggacattgactaaatatggaaaagccatttgacaacacaggattgaagaaatattgtataataaatgaatgcttttcaaaaaccaaagagattaataggagttgtttgcgcctcacccatgtttgatttttcggttttaagtaattagggtttttcagttcaaaaatgatccaaagtagtaaatataatagagataaattcactgataaacaacccca

SEQ ID NO: 7811 - DNA, 1953 bp, Heterodera glycines
tgagaaatggaaaagaaaattgaagagagagaaataacacatggaaagacagagcagagggaaggagagagtgtgcgtatttctcggcccttctctccctttttccaacccatcataaatattcgattcattgcctgttccttcactctttcccacgtttccttagccttgcgctcggtcaatacagcgagcaatgaggcctaaccgagctgctgttattgctgattgaaaacttttaccaattacccgccttggcctgcgaaagcggtgccatgtgcaatttttggacgccctccggggcttaaaaacgaagcatttggtttttgcctctttccccgctcatttgaatcgcattagagaaacctcttaaaggaatagcccgtagctcagtcagttaggaaaatttttaggccgctgatcgtgattttaaggacagaatcactgatactgaccgtaactcttaaaaaatttaaattctttttatttctattactaagtatatattatttgattatttattctttattttttattaaattataaattgttcatttgaaaataatcagttaataataattctaaaaaactaatgaatgtgttgaagcgttgccaaaaataaataaaaatgcgatcaatcggtaagacagataatttaattaactcaacttaacaaactacgaattttatttgattttttttttaattttttatttttgatgatgcatttccataaaaattcattgacatcagaagtgatttttattaatgaatgtagctaattaaattattaagaattttattttttatgagatttaaatcctaaaaaaatttcatatttttctcaggcactacattatttatttattaattgtcccccaattataagtaaatacaataaaaaaatgtatgttgccactttcaggcaaaagatcaatataaatggaaaagtcattaaggagttagagttgataaagtaaaaatggtgattttttgggtaggtatttttgtggctgatttcaagaaaatgaaaagagatacagaggcagagaaaagtgagtaaatagagaaaagttaggattataaaaagtaagaaaaaaaatttttattacctaataaatgaattatttgagggccgagtctgaaagtggtctccaaaaacggcatttttcggaaccaccgctaacaattttttttgtaatgccatttgaaaacactgaatttacttaatcttggctaaatcggccacgctgagtccgaatatggccttagatttgagctctgtgtcaatgagcatgtacagcttgaacttcatgcacgaagttgaagcagtacaagctctggttgaaaagataggacagatttaaggccatatttggattatacgaccctaatttgttatacaaaaccgtttcatgaatgattacaaaatttctgggcgcgctttttcaagaaatttctaattctaagaaaatatactctttaaatatttggtcagtcacctttagttggaaggggccggcggtgccgatagacgccgtcggaccgggacctagcttttcaaaatccaggacctggaaccgggacctcggatgaccgggaattcccggccggtcccggtcccgtgactctagttttacgtgttttctttcaaaaaatcctaaataaaaaattttaaatgccttttttcatggaaatacacatttccaatcattctgttctacgtagagtattggatcgggataccaagctctgcctttgaattttcgtaattgtctgacccgttgtcaaacacgaagttcaaagggaaaatctagtaaatgcttctcataaatgctggaagaccttgtttccgattaacacatggaatcaccagaaaacttcatcgaatgaaaattcattaatcgagttatactgttaaatatagaacatgtaaattatttttattagtgataa

SEQ ID NO: 7812 - DNA, 1113 bp, Heterodera glycines
actgactttgcttcgaacaacgtgcccatcgaatgcgttgtgcaaaattcggccgttcgactggtcaccgatcagtgagccgtaaatgcccatttcactcacaacatcctccaacaacgccggcattttttgtcgcatcatataatttttttaaaatagaattattttatttttttgccaaattctaaaaaaggacatttgagaatttttattgtatccatttacagagaaattttggagttactttagtctaccacccgcaaaaaaaatgaataaaaatgatgccatttattctctcgtgccctgtaatgcccaggaaaaatactcatgaagtgcggaaatggcaaaaaaacgggttttgaagcagttcaaaatgcgtaaaatcggaccaggtggggcacttctaaccttttaaaagggtcaaacccatacaaatttggtatcattcgaaatctattaccacgactggtaaagtgcgtaggcaatgttttgacgagaacggtttaggggcgcctccgaattagccaaaatggccggctatccgccgtgctcaatcgcaagtttgtccagcactttttgatgcaattttgaaactgcactgccaaagccgggccccccaattcctccgatgtttacttcaacctaaaatttgaaagaattttttcttgtaaatctttgaaaattttattatttgaaattatttttaattttcggggagcgggcgcggaacgtagtgcatccatagattccaccaggacctgtttgagtgccatggtgccgtcgccatctgacgggtcccaatgtgccatataatccgcacgttggagttgaacagccaatggctgatgaatgccctcatcgtggaacattttggcgatttgcacaaagcgtgccataaatgggtcaccttttgagaaatgaaaaatattcattcaagtataatttttttgacccgcagttggaaaatattaaaattttgttttaagtaaacataaattaaaaaaaagataaatgaaacctataaacgaattggcgatcatacattaacaaggggtgcgccagtcagacccccccatacgtcggacgtttggcgcagggggggggggggggggg

SEQ ID NO: 7813 - DNA, 2667 bp, Heterodera glycines
ttttggaaaaaatcaagtgcttgatgaaaagtacagacaaaatcaatgatttttcaaaatcagagtttagattcgtgatcagcacattttttttaccctagaaaaaatgctttttgaaattttattttttttccccgtcgggccacaattctacacctttgccatttacatacagtaatacactactgaccaattgaatgagcatagtcaatggcatattgttccagcgtgcgcaattgatcattgtcgctgatcacttccaggacatatttgttgcagtggtgctcccccctgttggcgccgctttttttgtcccaatttccagcgaatgttcaaagcgatcagcaagttttgtgccattctgatcattgacatttttggcatagacgccaccgtcgcactccatgctgctgtgagcagtgtaaaagaaaaaagaaagtttgaaattacgaaataattcataaaaattggtgtcaggccgtaattgagataaaactgagatccgagaattttggccctatttggaatatagcaggacttgaaattatatggaaacctatttttctcggggctttttgattccaaaagactgaaaatgttatggaaatttactcgataatattgttaaatttaaattctttcttataaaattggggaatttgtagcaaagttattttatatgtatattttacacgaaatttcagcgccgccaaggagaaaaattaggcatttatagccgtttttcgccaaaacaaagactaatttggccactttgggaccaaatttcaaaaaatatggtaaagtgggggtctggtgatgccgctaggcgccgccgggaaaatttttggacctttaatgcaattttttaaatttaacatggtaatttgttgtgtggtcggcaactgaaaaatagggaaaaaccagcagcactaaattaatggacgaaattgcttctgcggcttatgagaagaacatcacacaccagagaaagggaggaacaagttgcagtttggtgacgtgtttcacacacatttgtatgttctctaaccatatgacagatatacagcaagaggaaaagattgtttggcagagagaaaagcactcaacgcacgagacgaagtcaaacgctgattggctgaatcaggccgaaggcgggcggcaggccggcaacgagagggaaaaactgttagccagagagaaaattaaagacacactgcttggcagagagaaaagggaaaagtgaaattttggcgtattatctcttcatttttaatcggaaaacaattttatctcgttgacttggatcctagtaaatccgctttaaattttgcataccattagatagagaattcttgatctaatataggctttttgtataataattgagatatgttttttaaatccaagtttattgtcattaggagacctaaatctcttatagttgttgattcttttatttatggccatatttttgcgattttatatccatatttttccgagccctactaataattgtttgtacggacaaatttggagaatcaatggaaagcagccaataaagtaaataaatgatcattttcccgtggtgagccgaagtgacaaaagtatcaatgttcgtaataattaaatttaattattatttaaatttaatttgctaaataattaatcataacttagcttaaacttagtcaaattaatgaaatttaatatttagagacagctccaattatcctctactacttaggtgatttttaaaaaattactaaaaatttacaaacagttgcgaccaaaaacttccaaaaaatttagattcaacaagtttaaccctaacttttttgaaattcaataaaatgtaaggtcgtttaaatgcatgaaaattcttcaaaaatcaattaattcacaccgcacttgatatgaaaagatagcccaaagctttctctattattcagttaaatttcgaaaaattttattgaatttcaaaaaagttaggatcaaaattgttgagtcaaaactttttcgtactcttttggtaaaactgtttatacatttttagtaattttttaaaaatcacataaatagtagtgctgttcgagaccaaaaatttcccgagactcgagaccgagactcgaccccgagaccgaaaaccccgagaccgagacccaaaaaacccgagacttttttcaaaaaattttcctattcgcttaaaaatcgttaaaaacattttttgctctattcttaactaatttttggttttttttttaattttgattcaatttggtacaatatttatcatttcaaaaacgcacaaaacaaaaattcattaaaatttaagtgcaatttgttaactgatttagtccaaaaaatgaaaatattttacgaatttaattgttaaaattatgattgaattcccaccgaaaaatgaataattttgaaaaattagaagaaaaacaactacttggaggggaattacttttttttaaaattttcttatttcttaaaaattatgaaaaattactattacgtttgaaataatttcatttattcaactgaaaaattatgaatcaaaggccggcggtgccgataggcgccgctggggaaaatttgtaattttagtgcactttgttaatagatttagtccaaaaatgacaatattttatgattttaaat

SEQ ID NO: 7814 - DNA, 848 bp, Heterodera glycines
attcgttgtaaattcattcattaaattaaaatttcattaaattaattctcaaactcgtcacagggtgcgttatattcttcgtttatttctgctcatatggtgttctgtatatgatatttaatcaaattgcattatttatttataaaaaataacgtataaattcttattttcatttttaaatacaagcatgttgttttttatttgtttgtcgttttttaaataaataaatagttattcttttgcatctgataaaaagttaataacaatttttattatttaattcttttttataaaaaacaaaaaattctacttattgtttttctaaaaattgcataatatttctatcttttttggtgtaattattaattattgctgattatccatcgtattagttagtgtcaattttattaatattatataattgtaaatctataaacaaacgggttagaaatgcgtcaataacattattcaagtaaaacaatacataattaacaacttttagaattaaaattaaaactttttaaaataaattttggttaaaaaactcggtatcatgtttacgaaaactaattaattaattaagaaaataatttaaacataaataaaatttttttattaaccaacaaacaaaaacaaaaatgtttatgaacttaatttcataaaaatcattttgattttaaaatattttctttttacatggttatttttaagttctatttttgcaccaatatgttaagaaataaactttgcgaaaaaatggaaaactttgaaaatatttaaattccaatatatattttgaatttttaatttttttgaatctaatttttctttaaatttaattgattttt

SEQ ID NO: 7815 - DNA, 2148 bp, Heterodera glycines
cgggcgtctcgcgcccgttttttaaattcgttgaactcatacaggcgcttcgcgcccgttttttgaattttgaggtacaacagcgattagaagagtgattaaaaaaggtacaacagtgattagaagaggtacaacaatgattagaagaggtaaaacagtgattaaaagagagaggtacaacaaatggcagaagaggtacaaaaatgcattaataatttttaaaaattgtaaattaaatgcctctttttattattaaaaaaaactttgaagtttataataaaaattaataatatttattttatttaaaatgaaattaatttttttacaaattcagaaaaaataatgctattctttaatttaaaaaaaaataaattcaaataatttacaaaaaatcttcaaattaataaatacattagtgattaaaagaggtaaaacagtgatcagaagaggtacaacgtgattagaagaggtaaaacagtgatcagaagaggtacaacaatgattagaagaggtaaaacagtgattaaaagagagaggtacaacaaatggcagaagaggtacaaaaatgcattaataatttttaaaaattgtaaattaaatgcctctttttattattaaaaaaaactttgaagtttataataattgaaatttatttagattgaaatgaaattaatttctgaaaaactcaaataaaaaaaaatatatgaaattatttaattaaaaaaaataattaattttaataaaatttttcataaaaaaataatttaatttaaattaaaaaatttattttttattataaaacaaacactcttctaaatgaattaaaaacattaaaaataaccataaatataacgaaaataatttacaccgtccggatccgaacctgcccctcccccccccccctcaaaatgatgcctcagaatccccaatcacacagggattctgaggtcttgactatgtcaaaagtaaaatctgatcacgtattcgtgatcagcggcccaaataacccctaaagacatatttttggaggatttttggtgaaaaaaattttccacataaaaaccatgtgcacccccctttggtcccgaataaaaaactgcgtttctttattttctttcattatttgttttctttatttggattttccaatttggtttttactgcctcgccgtttcagcaacggaatgcaaaatgcttaaaacatgaaaaaatcttacattttttaaatgaatttattttgaaagggcgaggcatattcttttttttttgctgtattttttgttttgaaattttgcatttatttcattattttttggtattttaaaagtaaagttgacaaggcatttatatattctgaaaaatcgttttttaatgatcattgctgacctgactttagtacgaaattatacacaaaaaggtaaaataaaattggtttttttcttttactgaccttagaaattaaaatcatttaaaaaattgacaattttcatttatatttgaataaaaaattgtaaaaaaccaactaaacttcaaaaaattgattaaaatattgcttaaaaaattgctcagttttctcttccggatgcaaagtttaaattaattaaaactcattatatatttctttaaaaaattcgctcaaaataaattattttgggcaaaatatgttaacaaaatccaacaatttgtcaaaaatcttcattgaaggaatatttaaacttcagggcttttttctgttcaccagaattgtttaaagtcatcaatgacagtgaggaaaagcagaacaaagatgctgaaactgctgaaagtgggaaaacggtaggaatgctcgggattttcctgttcaggagacggaatatttattggagtattactgaaatatcaatgtgcaattaatagatttttaaaaattaacacgaaatcatatttatttttttagttttcgacatttttattatttaaattgaaacgagacgctgtctaaaacaaaaaaaattaaaattaaaaaataataattatattttccctattggcgccttacaaattaaagagtttccagacagagttcactgtgaaataatatttcttaattcattattggtatttcgtaaaagttgcttcaaacgaatgccaatgccaaagaagagaatc

SEQ ID NO: 7816 - DNA, 3549 bp, Heterodera glycines
aaaaaaagaatatgggatattttttattgatactttttcaaaagattttgagattttttaaatacatattctattgtacaccacttaaaaatacgaatatcaataatataaatttttgatgtttttaactagtgttattaataaagttccccctttttagaaaaaattttttgtttaaaaagtcagggaaactcttgccccaattgtgaaacagtggatcaaacatcatgagaagacttgtgataagaatatcatactttaaaaggtgccagcgcgtttcttaaaactgccagaacgataaaaatatttacagaaagaactcgcttaatataatatttattcaaaaattgttgattatgtagtgtaattaatttgatgcgaaaaaatccaattgttcaacaatatgccaacacgttcagtgaggtcgacatgcgtttacatatcactgcaatggggctgaacagagtccccgcactattcttcccatttcattattctgaaaaaaacaccaaaaaataattaaagaaaacttgtaactatcctaatgataaaaattgctattcattttcaataattctcgaatttaaaaataattttttaagatttgttcttatccaacgtttccttattcacttactgtccgtcgctttgattcattttatcccggtgatgaaattaattggtttatttagataatattttttgggatttagaattattgttttatacgtggacttatctttttgtttcctcatcattttacgtggcaagcgattcttttggcgtggattaaatgtaaaaacatactgtagtttttctcaaaacagtaagcctcccatttcatagagcacctacatagtttgaacgcatcgccatcataggacagggacagtacacgaattactgtcacatgctttggaattcaaatccaagtttgtttttatgcgttggtcattactgcaatcaatgccaaatggtacactggctttacgacctgtcatgtcacccaatcggactcattttttattagccaatccaactcttttggcattatatcccgttttagaggaggtaatttaaatgggaaaataaagggtttttttctgtcaaggttttgatttcgagaaaaaaaacagtaacatccaatcaaactgtaagaaatttactcttcaaatgagttattttggaatttttgttgttagttgactctacaccaaagcaaaaatttaattgtataaaaattgattagttttagtggatatttatttattcctcagagagttgccaaatcgaatttgaaattgggcccaaaattcgcctcaattttgtcatcagaatgacccaaagtaaggaagggatgaaaagaatcatcagcgaaagatggatcaacgagaagatcagagaaacctataaaaaaagttaaatgattttgataattcaaataaaaattaatggtcataaaaaagttaattaaaatgattattttaaaaattgctcatttttgtttattatttgccaacccaaacgaagtccatttttggtgcaaaagagctgtcgagtggccaaattgatgcccattcctacagtatcaccaataccgtatgaatattcgtaatttgttcttttttcttttgagttgcctaaccaaatttcaccatcactttcatatacataaatgcccttttcatatagaattattccatccaattttgtcttctgtttgacggcgaatccaaagctaatgaaccaactgaaaatgaaaaattattaaaaaaagaaatacaattaaaataataaatgaataaaattaataataatttcaaattttagtaatctgataaattggattgaaacaaaataaattactaatttttatttttgactaaaatttcgtagtaaaaaatgttagacgaatccttgttgagcaaaatcggatatttagcgaagacggaacgccatgcatctttttagaagaaatagaatttatttattatataatttttaaaaaataccataagaatttttcttataatggacaatgagacttttgttgccaatgatttcgagattctcatgacaaaaattggcatcccaataattttgccggaaatttgaagatgccttaatggtttaaattaaataatttatatttgttctctctttttcacctgctgctggacttttgcggggtcaaattcgaattttggcccaaaatttgtctcaattaaatcgccagaatcactcaaagaaataaatggaaacaatggaagaccaaaaggaggcgaaaggaataaatcggaagtatctgaaaaataattgaaatataaataatttaaaataaaataagcaactcaaaggttggccattctttgtgaaaatgacccgacgagtggccaaattaatgccacaaccgacgaaatcgccacgagaaaagttcgcatttccaatattgcttggtccattgacccaaaattggccatcgctttgatatgcacaactgtcccaattttggccaacacttccgtccaatggcatcgctttggtggcaaatccgaatgagcaaagactgaaattgaaaataaaaatcaaccattttcatatgtttcatatggtagtgctaccttttgcaacttttaatcttgatttcgaagaaaaaaatgcctgattcggtgaacaaaattgaatgtttagcgaagacagaacgacgaccttaatgttatttttttataaaatatatattagtattaaaaattaataaataattcatccattactgtatgtctataactcagtataaattagcctacaagggagctcaccaactgtaactccacgtactgtaactcggaaaattaacctattttctccatgtccccgtcctttcttagaaatgctttattccgattttgtggatttgtaactcgaatttttcgtacctttcagaaattaattcacttaccgctcccatcgcctttgtaatagacttttaaagattccgtgccaaagacttcgagatcattgtgactggcattggcatcccaatagttttgttttgggtacgaaaacttctaaaataattttcatgttttataaatctattcgttctctttcacctcaacaatattcttgcgaatgtccgggtgcacagcttttaaaagctctaaaaattaaattaaaaatattaaaatttataaattaaattttcatttttaccctttccaaatcggtctttcaaaacgccaataaaaatttcttcattctttttatgttcctccaatgcgatgatttttgtttcaatggctttgatcatgtctttttcggtgttcattttggcataaaattccctctgttggccatctaaacaattttcaaaagaaaatttttaattaaataaaatttcttagctcatataaaaatatcctcaacaaaaataactatttaataagtgataatttattcttcgcttaaaattcactcgcctttggccgtattttcttcgtgctgctgtttttgctgattttccatttcactgattttttccaaaatttt

SEQ ID NO: 7817 - DNA, 4214 bp, Heterodera glycines
aaacatggaacggaaagtgatttttggctcgtccctccattattgacaacaaaacaaacaccaaatagcaaatacaaaaacaaccaaattcaatggaccattcgaatttaattcattccgaccggttggaaagggtgggagagattaagagattaacagcgaaagaaaagggtggcacaacagcgaattggagagaaaaagaaaaacagagaacggaaatagacatagagagagaaaaagagagagagggctaaaggaacgcgcaaaaaaagagcgaaaaatgccgaaccaacggagaaggaatgaacgaaggaaaagagggagcgaatgccgtggcatgacaacgaaatgaacgaacgaacgaacgaacgactaactgaatgtgactgactgttgttgcttgttgctattgccaatttgtgcattcgttacatttttaaattatactttatggcgaaatatttattttaaatgcattaggtaaatttgaatttcgctaacaaatcaaacaatccatccattcggtcggactttttcattaaatgctttaaattttcagaagattttaccaatttagatcaaaaaattttcccaatctttatatattatttttttcaaaatgcggcagtcgaccaaccaaacgccggtcactcgcacaacgacgacgacaatcactgaacaacagagggaaggcggaggagaccaagtgattgttttatcaatttttcaaatacagccgataagtccgatcctttttctaatttagcagaccaattctgaacaatttgtgcttaggctggaagcaccgcccgacacgcggccgaggttagccaattccaagcaaaaaaaaggactttgttttgtttttaaagggtccaatggagcaccggaacagtggacaatgaaaacatgggcaaaaagaagtcgaaatgttgttgtatttacaagaaaaagcgcagttgggacgacccaaacgcatcgagcgaagacgacgacggagttggtttaattaattaattaattggcaaaagtaaataattaaacagcaaacagacccagattctcttgacttatacgatgtttttttctcttggaccaatctcgacgaatatggtaccaatcgatagctctcgatgagacagatcgatctaggggtgggggaagttgatccgacaagtataaaccggtttttgaaccgattcaaaacacaaaaagtgaagaaaattgggcaacctcatgttgcatgaatttgttattcaaaactttttttctgtacatttaaaataaaaattgatatgggccaaaagcggcgcaaacttttggtcaatgttaaaaaaagtgagaaaacaatcattggtaaaaaaagcactgggatgagaatgaattcgtgagagatgtcactgctcaatggaagtcttggcaaattgccatttcattttttcgtttcatttcgctgccattggcaatgtcccgcgactggccaaaatggccaacacgaggaaaagtgcgtagacggcgagcagtacgaaggcatggagcggacggacgaagaacttctgggccacgaggagcagcaaagtgcacagcagagacagggccaggaacacgaacatcaccagggccacggggtcgggctcaatctgacgacggcacggggaggggacattttggatcaattattgacaaacatttgaaaaacgaagtaaaacttcaaaaagaagcctactgtacttggaatactgtgccggaaactcagccagaatggcattttcattgtgatttcataaatttacgagggagtcccctccctcgcggaaaattaattgccactcgcccaaaatcactcacaatgatcactttcccctgcaattccgcaatcaaaaaagtggtgccaaagccaaccatcaaatctgtaatcaaactgagaattgctcactgactttcgtacagtgccaaaaccaactgaataacggcgcgccaatggccgccgaaaatgccatccgcggcgtgccctggcgagcaacggtcacgtccgcaatcagatcaccgatcgaattggcccttgattttggaaatgtctcacactttcatacgttttggccattgtggcttaagtggggtctcaaaagtgatcggagtctgcttttgattgtttttcctccttttgtctttacgctttctcctctccccctccctttttttgcttaccacgcaatggccgtaaggcccaaaatttggtgagggatgccggatattgtgccgaacatcagaacaacattcatcacctcaaaagagaaaacagacaaagggggaaagaacgggggaaaaaagcaaaaaatggacggacttccgaagctgtggcataaatccaagcgatggaaatggcaaagccaaagtaagcggcgcatctctgcaaaaaaaatatatgcattattacgtcattattaaaaaagagacttggtgctacattgtttataatatttcaattaaatggtccggcagcccaatatttcggagaattcgaccagaaatggcaatttggtcagaccggaagtgccggcggaagctcactctgctgatgagttcggaataaaacagatgcagtgttttagcaataaatgtgaatgatcatcagcagaaggtccctcacattagcaaaaaaggtaattaattctaatcatctgatcagagaggagactccatctgtgatcagtgagcatttagaaagtgtgggcatttgatcagataggccattgtttgtccatttttgaacccattgaaatggcctcaccctgtaacagctgggctctttttggagtttggtgaagcagagaacaaacagtgcgagaaggacggaaaggagcagtgccaactcaccgaggacaaaaggcggcacaaatgggagcggagttttgagacctgaacttggcatttcgacaaattatcactctctcagggagcagaatgaatggcacacattggaacgcggcacagaaaaggagcggtgccatgaaggcatggagtgcggagatgggctttgaccaatgctgagaagcacagggaacggtcagccgaagcagcaacagagagggaatctgaacggagcaaaaatggaagaaagggaaacggaaggaaatgaaaaagcaattaaagcaattaaagaaggacggactctccgtaacgagagtctcgactcaagaaaagccatttttaaggcagcactctcgagtcttggtctaattaatgaaaaagtgactttatgcgattgtaagttgtcccatcactgcgcctaattaggaaattacttttcccagtaaaaagagccgttttggccacgtcgagtgccgtaatcgctgagtgtccagcggacagaggaggcgcagcgcgcgtcccaattccgccttccatggacacacggctgttgaagccgcttcgcccagcgcagaaacgacacattgtctctcgtcgacagaaatagaggacgacagagtcgcggatggcgtacagcagcggacggaaggcgtgcggtcgccgtcactcgccgctgcggtaaattccgtgccctcgtctccgcccagttcgtccaattcctcctaaaagaaaccggtcaatttgtatcggaaacattctcatgcagtatgccgttatactcgagtaaattttccaacagaatgaatggcccttcttttgtgtcgagagtctcgagttatcgtactcaataaggcattaccgcaaatccccgggcacaaaaacaaactttggcaaagaatttgcccgctcccaaaaaggcatctgctggtgcttctccctcttcttgtccctcttctgctcccttttggttctgttgcagttggccattcagtcgactaattgtgccggcgggggaagcgatcagtgccccgggtgatagcgctatccccatgctcatcagtcgcgccgctgtcttttccattggccttcgccccgggggtgtcgtcgtccgcgccatttcggtcagtttcggcgttgcactgctttttgtcaccccgtcgcccgcctccgtcgttgtgcttacgctacttaggctgtttttccttttctggtcacttctgccgctgtcttccatcggtgccactttgtttctgaggctgctcttcggcggcacagcagagagaagcgactaatcgccgcgtgcattcgcccgcgccgctccgccggtcgcagcactcgctgac

SEQ ID NO: 7818 - DNA, 1419 bp, Heterodera glycines
acttctcgagtgcatattgtattccaaacaatgggaagcacgtaattatggcttacgaagaatacggcatttaaaaaacctttaatgctggattaagggttctccctaatcagcatttgattgcgctactttcagttctctaactccctcccggctatcccccttcgacgatatctcttggctttttcgactttgtccgttttgtttctctttctctgtaccgcatgggtgccacaattgcattgtgcgactgctgaatgaaacatagacgagcagcgagagtgccaaaaggtagaagaagaggtcgcgcagaatcggacggcgcatcaaatggaagggccgactgagcgcgatcaaagcaagaacgcacgtggtgacgaaaatgccgccacctgcggccacaatcactgatcagtgatcatcctcagaatagaagggtttgacaactgaccgagcaattcgctgatggccaaatcagcgcgcggatgcttggccgaaatgaccgaagcgatggaactgaaaatgtccggcgctccgttgccaaaggccataaaactgacgccggcgatctgaggaagggaaagtgggcgatgggaacggaaggaatgggcgaacaaaaggacagacattttgggagatgcgatgcaggtcgacctgtccaaaaagcgaaaagtgatcagataaagtgatcagagaatgatgaaagattggtagcctaacagctaatccgcttgttatcgtctcggtctatcgcagccggattagatccaggttaatgataagccaactggtcccgataatctgatcagatttggtcctaataaaacccccgagcagatcagtgacattcccattttagaactttgccatgcgaaatttttaaatttttcttacgatggcagcgatatttttgcagaaaaatgagtcggcagtgatgctgagatggacaaacaacagaatgaagaacagaacggagcagaagagcacaagcacacgagagaaggggggagaaacaccggcggaggagggggagggggaggagcacaaggcatactcagtccactgatcagaaaggggaacaaccaaagcatgggcagctactactgatcagcagcatttgaaaggcttaaagccaaggctgatcggttgtgattaacattatctaagccacaattttcgataggggagatgatcaaacgcggacaatacatataaaaacccatcaccactcacttgaaggtatccgcctccgtcacaaagttccgagtgatttttgacgtattggcaaacggctgaggcgggggggggggcgaatgagaaagggaaaaacggcacggaaaaggaaaaaaccaccaaaatgggaccatgcgaaaagggccggaaggtctcattaatcatccgcaattggacgagatgaca

SEQ ID NO: 7819 - DNA, 2482 bp, Heterodera glycines
tctcgacctctttcgaatggaattgggccaactttcaaattcaattgaatttccaatgcccgggtcgattggtgacatccgaactccgcgcttcattcccctaggccttttcgcaatcacaagtttttgtggccatattttgggcatgtgtttgcccagcgtatttcagcccaactttttctgtaggcaaatattttattggctttaatttaatgacaaatttctcacaaaagaaatatattatttacacgaggaatggagaaagaaagcacagggcaattgcaatgacaaattgaaatggaaactttgaaatggacaaacagagaaagagaaagtgggacgagtaaggggggggggggactgatcaacgatcatattaatcacaacagtactgtaagtactgaatattttgcctgtgtaaatgttgcggattttgtacggtaaacccagccgaactgtctaatttctgaaaagcattctcgagaatcccattaccaaaacggtcttttccaataccatttgtaaaatttcatcgctccccctcccccaaaaaaaatttgtttttccccttctctttgtcttttctcagtctgaattagaaattccgcttaatttgttccggacacattctttgaaggagttcagccaaaacatttgctctgtccgttgcttctggaaatggaaatgtttggtatttattcattttttgaaagtgcctgtcaatagggtaattaacccatggccaattcccatatcaggtaattaatttcccattaattgcactgactttgagcccgcgactcagccggtcgctcatcaccgcaataaactcgcgatagctgagtttgtcgtccgcatttgcgtcaaatattttgtatattacgcggacgagtgccgagtcaagcgaaaagccagtggagcatttgactgcacggatgaactcactttgggacacggggatatcggccaacgaatagagacgcacagccttactgaaagaacgaaggaaggagagagtgatcgggaaatggaaaaagacaacaaaaaaaaaatgatcgagaaagtgatgggaatgaaagacataaaaagtgataggaaaaatggaaaaagtcataaaaattatttttcaaaattttttattcatgtacaaaaaagcaggccaaaaaaagttaaaaaactgagtctttgagttctttctggccataacttttatgacacaacgaaaatttttgaatatttgcccgttaataatagacacataaagctatcgaacaacaccaagaatacttaatatggttgagaagggaaaaagttatggtccaaaaatggagaaagtcgggataaaaataaaagcaaaaaataggaaatccgtttcacctgaactcttccaaattattgaggaacatgctgaactgctcgaactgctgcagtgtaacgccctgacaatgaaattgcgaaccattcaaacccatctattcgcccactcacctcctcatcatactcactgacagtgaaacatttaatgcctcatctaaatcattgaaaatggtaataagccacgcccggttacaatcacagaataccaaagccaaactaatgccaattgaaagtttggtataaaaaagcgaaatttcgaatgactattttttgtaaatattctttattagaaaattcaaaatgtcctcaaaaagtgccacctccgttcgtacgcccttcgaatgtacggcgaatgctcctccttgtgcaaaatggagtatcggaggacgagccgggcaaaatcgacggtggaaattcgggttttgccccgggcgaactcgtggaactcaatttcaatgatttctcgctggagacgatggtaaaaactgaaccaacaataattcgtgggtgattcatctctgttttttcattcgtccgatgataccgtattatgttatgaacacggtaatttaccgtacttctgaaactcgtcaaatgaaagtgtgttctgcccacgtcgtccgaacaaatgaatggttagtgttgtgtcgcgccttttcatcgcctcagtcagttcgtcctaaacggcggcgggagagaggtcaaaggatggtggcaaatggaaggaaaaagtgccaaaatgaagaaatgttgaattatcgtcctaacgaaaaacaaatgagcaaaaattaaaattttgcccaaatttttcggtgccatggcccatgggacaaagccataatcgatgaaaaatcaccgcaatttaaattaaaatttgcttttcggaggatggatcaatcagctgaccattgttggtcggtaaacagccaatttggaagaattatccttcgtgtttttagaagacatatttttcaatcgttgttcggcctttgtacgaattaatgccacattcgaggagatcaaatgttcaaactgaaaaattgggggaaaaaaggcaattttgaaaaaaaactaatggaaaaatgggttttattgtgggataacc

SEQ ID NO: 7820 - DNA, 1080 bp, Heterodera glycines
cccttcccgtaacacttcgccgagggttgaaagccatatcattcgctccattcattcatcatcattgcctcggactgtgcaatcaataaataaacatccaaaaaggcccaccgctgacttgcacacattcattcaattcacacaaagttctatctttttctctttgaaatctctgtcaattcacatcatcaccatggcaagtcaagcggaaatggcaaatttatttcggcaattaacggatgccctccaaaacattgcaacccaaacaaacccaaacccgaataaacaaaattccgacctattcactacaattaattcacaattgtctgagtttgtgtataatccggaaacggattctacatttgacatttggcatgatcggtttggcgctttcatcgagaaggacggacaacaaatgccagacgacatgaaaacgcggttacttttgggtaaaatgagttcacaggattacgcgaggtattctgagagtattttgccacaaaatccaactgaccttggttatcaggcaacggtaaataagctgaaaagcttgttctgccagacaaagtcaatttttgtgaaaaggtttgaatgttttcaacttcagagggcaccatcacaaagcgtaatggactttgccgaacaggtcaacgcctgctgcgaaaaggcgcaaatggcactttcaaaagaggagatcaaggcgctaatttttgtaagcggtttaaattcaggtgatcgagatttacgtgagcgatgccttaaattgttggaggagagtcggacaaagaacgtggcgatcaaattcgtagcaattgtcgaggagtgccgcaccattttgtcacttcgtagtgcagcggcagctctggaacaacccggccaatgtttcaatgccaatgcaattgctttaaaaccccaacaggcaaaagagcgacatagtcggcatcaaaagttcagtccttcatcacgccgtgaaaacagcggaaatcagtcccgctctccatcattgaacattcgccgatcataaaattcgcgtccaccgttcccctgcaagtggtgcggcgcaaaccattggaacagcga

SEQ ID NO: 7821 - DNA, 3799 bp, Heterodera glycines
  unsure (1)..(3799): unsure at all n locations
tcctgaccctgatcgctcacggtcaatcaaggaaatgccagtaccgtcntgatcaacaaaagctcagatcatttttgggggcaattaactattattcccgatttgttagccaaatgagagacatcagagctccactggacgaacttttgaaaaaggataaagaatggaattggggaccggaacagcagcaagcatttgaaaacgcgaaacaaatcatcacgtctgaccttttgctcactcactacgacccgtccaaaccaatcgtagtcgcagctgacgcgagcagcaaagggatcggagcaacgatcagtcatgttttcgccgatggaaaagaaaaagtcgttgagcatgcttcacgatctctgtctccggccgaaagaaactagtcgcagatagagaaagaagcattggccatcattttcgccgtgcaaaaattccaccgcatgttgtatgggaggaaatttacactattaacggatcacaaaccgttaattagcatttttgggtctaaaaatggcatcccaatttatacagcatccaggctttcaagatgggctttgacactgttcaatacgatttcaaatttagtacatttccaccaaagattttggacaggtcgatgttctctctcgattgatcatgcagcaccgcgaggcacagcagacgacgaccatgtcatcgcaacggcacaaacaattccgatttcaattcaagttcagaagattcaattgaacatgccacggctgccgttgagtatgttttgcatgcaccaattaccggtgacagcaacagaagtggcagagaaaacaaagcaggacgaagagttgcaagaagttttgcaaaattgtcgtaatcattggccaaaaacggcacattcttcccttctttctgcattttatacacagcgtgcacgtctcacggaagttgatggttgtctgctcatgggcgaccgtgttgttattccgagttcattgcgcaaccgcattctcacggcattgcattttacacatccaggaactgtcagaatgaaaagtttggccaaacaattcgtttattggccaagaatggatttggacattgaccggtgggtgagaaattgtcaggagtgtctgtccgctgccaaaatgtcaccgaaagtgccgttgagtccatggcctttccaagcgaagtgtacgaacgattgcacatggatttcgccggcccgtgtgcggatggaaataaatatttggttgttgtggactcgtacagtaagtggccagaaattttcaaaatgaagacgacgactgctcgaattttggtcgataagtttagtcttgttattctctcggtatggctatccaaaagagattgttaccgataacggacagccatttaaatcatttgaaatttccaaattttgcagagaacacggaattcggcacacttttgcaccaccgtaccatcccatgagcaacggtcgcgctgagcgctttgtggacacgctgaagcgtcagttaaagaagtgtggggaaacagattcgcattgggtccaaaactcgttgttggcgtttcgcagcacgccaaacgcaagtctaaacggcaagacgccagctgaattgtttctaggcagtccagtccgcacaattctgtcattagttaggccagacgaaaagaaaaagcattcggacacaactgataagcaataccggcacaaaatggcacaacaattcaaccgccattatgggacgaaacaacgcacgttttgcaccgacaatccagtgcaatttgccaactacaggaacggctcaaaaatgtggttgtcaggaagaattgtttccggaaatggtgtcgtttggcgaatatattccccacagttaaacgcagtggttactcgccattccaatcagatcaggaaatcttttcccatcccgtacagagacagttcagaaccaaacgagcaacaagatcaggatgaacagcaacaagaagcacctcagtcaccacgtcatgtgcgatttgccgacgaggagaatgagccgcttgaacatgtccaaatcattgagccaagacggtcaacacgtcaacgaaaacaaacacaaatatttgacatggacacgacgagagcaaaatacgatcttgtcaatcccgggcaaaatatttaaaaagggagatgttgggataagacaaaatagacatgcattaatttattttctctatcttttcccttcgctattttccctcaatgtcttttcctttctctctgcccgtcgaagtgcataaatagtgactgttcctttcgttctctccccattcattcgcaatttgccttctcttctcttcattcactctctctctcctcagacttttattatttaattttgtcaataaactttttgttcactgtgccctttggacacaacaaaaaatatataattaaataaataatatgagaaattatgaaaaggtataaaaaatatttgctgtaatcaaaataataaagcttttgaaaaagtaaaaaatataaatgcatagatttgaaaaaaaccaacaaaaaaataataattcatattccttttaatttatttattatgggataaaaaaagcactaaataacccagacaaaatattttcagctaaatgcaaagaggaaagagtaaaaataaaaaataaaaaattggaataaaaaatttatataatttttaaaatcaaaaaattttgtttaataataaattttaaaagttgcaaaagtttatttttaatttttttttttctattgcaatcaatgatgatttaaagattaaaaaatttcagatttaaaagtttatttattaacaaaaattatttaaattctattttaaaactcgaaagacctcaaaataaattcaaaagctgcaatctcttaatgtttttatttatatacacaaaatcgtatctgtaatctttacataaaaagaaacttgcgaggaagataattaatgtaaatagaatatttaaataaaataaacgaatttatttaaaaagtagacaaaatattatttttgaacttaaaaataaatataatagctatttaataattaaattttttaaaactttcttaaatatgacaaaggcaagcatctttgaatgaattattgatggaaatttttacttgaaattaatatgctttattttattttcgttttacatatacttattttgttatgaattataattaaaacgaagaaatcttttaaatgaatatgaaataatttctaatcaaaacataaattaaaaaatacattatattattatttgtattccattattaaggcattgcaaactcaaaaaagaaaaataatattttttattttacttttaattatttttaatattatagaaaatgtttttatcttaaacaaaacccacccacacatagaattatattattaaagataatataatttcttttattgggtttttgagaaaaaaaattgtgttcattattttttacagataaaaaaatcacaaaaaaaaatcattaataaaatttcatggactaaaaacgattgttcacaaatacaaatacaagtaaaattaaatacaatacttattaatatattaattttttaaataagtctttgcaataattttagtattaaaaaataattatgaaatagtcaatttagaagttaagttgaacttaattttttttttattaggatcacaattaaatttagattttttttaagtaaaaatccgaaatttttatattcttaattaaatagatttcaatataaagagaagaacttactcttggcgaagatttatttttatttatttt

SEQ ID NO: 7822 - DNA, 2353 bp, Heterodera glycines
  unsure (1)..(2353): unsure at all n locations
aaaccataaataaattatttatttttaaattaacctcccactaaattanaacccccactcctcaaataaanctccctttcnaaaaaatttaacctataacttctatctcaaaattttnaaantcctcatttcanctacaaaaaatcctcntttnccactaaatacctcaaaaaatcatcatttcacacnaaaaatcttcatttttaaaancataaaaatncaaacaaaatcaattaanantcatatttttcntttnaaacaatcacnncncctatcancaccnccnnatctattttttcttaaaaaattaacccaaaatcncaaaattnttaatttttttntaaaaatctataacaaatctcatttataacctcaaaaaaaaattcnatttttattnttttaatatattnacaatctcttaattttttccttttaaattnctttttttttncncctnttttccaaaaaaacatttanataaaattnnnannannnnntccnccagtgcgataggcgctgccggaaaagatttgggattttgagtgcgatttgttaacaggaaattaattaaaatttattacaaaatgaggatttttcgaaaaaatgtttaaaaaagttcgaacattttgccaaatatatctaatttttcaaaaaatcatgcgtttttgtcacttttttatcaaaagacaaccaaaatcctcaaatttctcaaaagaccacaaaaatccgcaaatcctcattaaaaaatccactttgactctctaaaagaccacaaaatgaggaaaaatcctcagatatcgaagctctggttttgccggacgagtattttagaattaacaggactttttttaacccgtagaatattatggaattttaagaaattgaattagatggtagattaaatcaactaaaaaaattatggcatcacttcttaaaactagagttgagcggaccgggaaatttgacaaaaaccggaacgggacttaccgggacccgaaaagtcgggaccgggaccgagtttttctactgggaaacagaatttaccaaaaaatgaccaaatatttagttaatttgtgggtttttcggctgtttaaaaatatgagaaaaataaaaattggaattttttatttattaattaaaatttcaattaaaaaaatagaaaaagaatatataaaaattttctgttcaatcggataattgaacctaagataaaaataatcaaagtcaaaaggtttaaccacttgaccagttattatttgaacaagtgctttaaatgaaaattaattaattaattttttatcaaaaatttctctttctccaccaattcccttcttttttcttactcagacccccattcttaccagtgcttattcagtcccgccgggaccgggactggcaaaaccgggccaggatttctgtttttccaaaaaccgggaccgggacctgaaaaaaccgggaattcccgtcccggtctctgtcccgctcaactctactttttaaagagcaatatagaagaaaaacgtgtaaagcaaatatggttttttatatgtgttatgtccgaagataataaattaaaagttaatttgccgaataaaataaatgataaaataaattcagagaataaattgaggacgtcaaatatagaaacttaaaataaataataaaattgaaaagggcttaaacaaagaaaaattgcattattttataaaaaagctaattacaatctgattacaaataaatatatttttgaataattatttatgtaaaaatttaaataaatttatttttaatgccatataatttatggaccgaaatttaaatacaaaattttggagcaaaccgcaaaaaaatacgaatgaaaacaaataatgtcataaaacataactgaattacaaaaacacattaaaaatcattttatttaattagagtcctactacacagggctaattaaagatgacacaacgagaatataaattgtaatagaataaggcaaaaaaatgtccttggtaattaaaaacaaaattttaaaaaatttagaattttatggatgtgtaaattatggctctatttaataggcaacaattaataattctaaaaaatacattatatcaaaaaataaacgatttttcgtttttttcattttaaaaagggaaaattaatttttggtcagaagattaaaaaaaattaatattatctaattaaaaaaataaataatnccaataaaaatatagacttaaatttttaatataaaaaataattatgttatttcttaaagatttaagctaattccagttctcatttatttttgacaaagaagttaaaaaaaaatttatccaatgctttttagggtttt

SEQ ID NO: 7823 - DNA, 1015 bp, Heterodera glycines
ataaaatgtatggcacgtcaaatgtctacggattaactgttgtaatgggaaggatgctcatggaaggcaattctcctctggtcatcccaattcatcccagaaatggtcgccgttttaccagcgaagaaatcacgacggattcggtggattgtatgcaccattttaataaactttttgttctaatcacaaaaacattaagcgaaatgggagagataagagaagaccaaaacaattcaaactattccccaaatattgttcataaacaaaaaatgtcgcagcaacaaatgcagtcgaaaatgtgcaaagataaaacgagcaaaccattaacaaaggttggacaggaggaattagcgaaaaaatgcgtcagtgatacagtatttgtagaaagcaatatactgtaatggactattaatcttacaatttgtttttacgcctccaatgactataaagtcgataggacttttgtctaacaaaattatggattaataacaaaagataaaaaaactttccttagattggatgatggactgtagtagagccgttggaagataacacacaataagcatatgcatactaagaaaaaggaggggcttcaaaaattagcaaactttcctttgaaagagataatgatgatttattgggggggggggggggaaaggggcataaccaaaatatcctttggtgatacgttctgtggttacaaaaaccgaaaatattgaaatataatttttagcaaaatgtttttatagcaggttgaccaacttctttatgaacttccacaacaaaacaaattctcaataaattcgctttgtcaaccgccagagtttcttaaagtgttcagtgatatgcgttgtttggtgggcgaaaaagcagtttttgattgtgtgcttttgggttctccacgccccgagggtgattttcaatttatatctgaggcattatgcctaattatgcttaacttccaggtttgttggttgtttaatgatgacaaattggtaatttgacaatattttac

SEQ ID NO: 7824 - DNA, 1278 bp, Heterodera glycines
ttttttgaaaatttttcattcccctcctccttagatactccccccccccaaaaaaaaaaaatccaccgatcagcaagcattaattgatttatatgagaaatcctctaaataatttgcctctggcttaatgaatagtgcataaatttagacatttgtcgttgtacgataaaaagagtccgcccccgtcattacggtagtcttttatttaacgataataaaaagcattaacttaaggaatatattcggtcagtttgtatgttcataaatacattttcattgttgaatttacgcacagattttggccgagaatgaagtgggaagagcgatcacaacagcgacgcttttaccagtttcagtatacgataatgctgataactactgtatctaagtacaataaacgaaacagagataatttgtatcaaaataaggaaaaacgaggattaaaaaaaataacacatttggaccaaaaaaattacagacatatgatagggatcccaactgaaaatttttaaggtacttgtgcgttttgggcctacgccacataattttaaaaaaggtagggcgcgctgaaggcattttagcgcgcgttgctattttggcggcataaattcagcaatctgaagcaaaatttcttcaaagggatcaattttgcgtcttttacagtcctcacgccaaaggaattcgcacaaataggagtcgagttttgtgctgtaggcccaaaacccacaagtaccatttttaaaatcattttgattattttgcttattataataaatttagcacaataattgggccttggatacctaatttttttaattaaaaagttactgaacattaaatttgcaaaggtatttttgctgaaaattaaaatatttatacgtcaaaaacaccaacaaaaaaaaatgtttttcgctgcaaaatttccgggagcgggatcgggaatcccgctcccgttaaaatcccgcagaaattttacgggagtcccgggcgggagcgagagtaattcgaaaatttaattaaatactcacaaaaatatttttaatgcacaaatttgaaggacaatccttttattagagaaaaaaatagacagaaaaatttagtaagcagaaatttgaaattaaaaaaatcatatttttggtcgaaaatcagaaattttttcaaattgcttcaaataaaatttttaaataatttatttgttgactccctttattaattttaacaattttttgcggcttattttttgaaaaaactttttggtgaccagggtggaagagggag

SEQ ID NO: 7825 - DNA, 3868 bp, Heterodera glycines
  unsure (1)..(3868): unsure at all n locations
atttccaccgtcgcacctgctgcgcctaaaattatcattaaaaaaagtattgcaaaacaaacaaaaaaaccgatttgattnggatttctgntgtaaaattctgatgttacatcgcgcatgaagtttttccaatcggtcactgtagcacttcccaattccatttgaaaaatgatttcatcgtttgaaaattttcgtgcccaatagtaggaaaattcaaaaaccttaatatcaattgattcgtgtaaatttggcctttataaaaaacttgtttaggcgtcaaatgggctccttcaaaaaaagtgcctttgtaaaatccaattgttggtcgtttgctatcatgttttttcactgcattgcatatccaaagaggttgttgtcgatcttgcttccatttgtagctcatttcattgccacagtcgcaaaaacgggtggtgtgtaggagtttaagttctttgagccatttttcgaaatcgttgtctggaagagccaaagctttggataaatcagcaagtttaaaatttttaagtgcttccattaatctaaaagcaattctgataataaaagagaaaaaaaaatttttgaaaaaatttgacccaaaaccgggatccaaactgaatgagtaccttttccgcctggtttggggtgtctatgatgacttttactagtataatgcctatttttgactttttgtgcttaatgcctatttttgtgcctattcgccatttttggcgcttttttcaggattttcggaaaaattcttaactaaaatgaaaattacacccctaagaatcgatccgaaaaattttcacaaaaattgatccccaaaattcaattatttttttcttaataaaaatttttgaaaaaaatgtccttattcgataaaactttaaaacaacaattgaaatataagcaaaattaagttttttgattaagtcgtttttacgtgatttgctacctaaatagtgttaataagaaaaaaattttttgcctatttttgtgcctattcgtggatttttgtgtctatttaatgcctattttgcgattttttatgcctttttaggtgcctatttcgcgattttttgtaccaaaaaatggaagccctaattatgaatgatcaaaatcaaaatgaacagcataaaaaagcattgaccaatattttgaattagcgcgcaaaggcaactcgtacaattaaaaaataaagcataggctcaagaaagcctaagtttcggcctaaacctaggcgtaagtctaagcctatgtacgagttgctttttgtacgaattgtcataacacctgaaaaattaatattagactaatccttagatttggcgttttttactattgaatgctcagaaattgctcaaatggattttggttttttaaatgactcgactaacaaatgggggaaaaaccaacgcaattattatgggacatcatatgttgacaaggactttggtggagttaatgattcggaggaggaagagatgcttcaattggaagaagaggacgcgatttcccggcagaagaaaattgagacgggaaattcgttggtcgattttgattgtctaattgcaaattcaacgataaagaacaaaggaaggagcaaactcttcgaagtccttcacatttcagttgcaaaagaaacgcctgaaaaggaaactgcgcaaggaaaaccgctagaaaatgtaattcaaatttactttaccagtaataatgttgcgcagattggcagaacttttgaacaaaacgtgtgcgatctgcagtcagaaacatcaaccgatggagggaatttcgacgatggaggaccgtgcgtttcaaaagaaatgcggcgaaaaataaattacgaggtgccaattttaatttttacagtgctataattggccgcttattatgacgaggacttttcagattcggaagaacaaaggcattcgaaaggacaaagggcgaaggaaagctaaacagcggcattcgcgggtgatgaagcgaacgcaatacgaaaaagcactgatcaagcgcaaatcgcaggtatttgttgggagcagtaaaaattttgttgtggtatttacctttaaagccataaattacttttctcaggtcccaaacatgcgtcgggaaatggagagatatgatggtgaaaagcgtggaattcgtatttctacaatccgttccacaaaattttaatttttgattaaattctttcttgcttttttgcgcacaatgccacagttaaatacaataaaattatcgtttttacttccatcaactaattatttgtagaaggttaatgacttcgcgaattttaagactttggcaggtaaaaatgaatttcattgattaatctgcttggagttttcagcccggagctccccgtcctagggtatttttgcctgatttctggataaaattggttgagcaaccgagcaagggttacaaccgtcttccaaaaaatgccgctgcgtttgagatcgacctcaaaatgtcgcgaatggatgtccgcgaatatttggaaaaaatttacaaatatccggttcgggatgtgcggattcgtgtcactatgggggatatcacatgggaccaccccaaagaccgggacaagagaagagcactttggaaggaagaggaccgaaagattgctatcgtcttttttaaagtatgcgaatactaatgacgcactggaatatccatgttcatttcagaagggtttcattgctgaagtcccggatctgttccccggccgtggcaccgatgctgaaattgatcagatgaagaagttccaagagcaggacgcaaatactttcaacagtcgctttgtcaataggggaagggcagggataggagaaatgctacctatttaatgctggaatttttgttgataaaatgcgatgaatgtacgaaaacttcgaacctaattaaacatgtttaatttactaaaatgggcttgctcattttattttctattttgttatttgttacttatcatttatttgatttcaccatgaaaccaacaatcgatttgaagcaggacatttccaagtacaaggaacgcttccaaaaacttcatcataaaagagttgcttttttaccataactttattttataaaaaagaattaaggaagagtcaagaaaaataaaccacgaacacgtcgtggaggaggatcgacgtctgaagttgcccaacaattttgaggcaaagcgaaaacgacaagaatgggagttggaggagcttgtggcaagaaaggtgaagtgtaacggaaactcgattttatttgcctttgaactgattcgtctaacaaattctttttttgaggaagcggaggagcgtggcgaagattatgacagaataaaggcactgggaacgcaagcagacatcgccgacaaaatggaagcggcaaaacgaagaaaagcaaaccccgacacgggatttgcgagtgagccatcccagccgagggaaagtctatttatcgtgaaattaaggttatgaagcgatgtcaattcggcaatacgaaagaatgaccaatgggataaagccggacatggaatcttaccaaaagatgaaaggagtcgtgtaagacgctgactattttttgcctaatttaagattttatactcaaaagacaacaactcgtgattactaactgttatgcttttcaccatttagcggagaagatcaattctacgcaagtgcaaatacgttgatccaaggctcgcattatcccaccgacaaggcactcgataaactttcggaggatgttcataaccagtgagtgggacaagttattccttacgtgttggttcacccaaaaggatgaagaaacgtgaccagtaccaccgccgtncgatgttcgaccctgatgccccgattgactt

SEQ ID NO: 7826 - DNA, 5086 bp, Heterodera glycines
  unsure (1)..(5086): unsure at all n locations
aaaagagcgatttaaaaacaaaaaatttaagagatttcattaattaaaacaattgaaaaacaccattaaataaaaaaatactcaatcatttacatagagaaatatgtattttgtgtttaaattatcattctaatttatgcattttgatgaaaatttttggaattttcaaaattttttctattggaaaataaattcccggttggtcacggctttttcacggtcccggacccggacgaaaactgaggtcccggtctcgacttttctggtcccggtaagtccggtcccggtttttgtcaaaattcccggtcccgtgcaactccagaatttaacctgacaagtttgatatatttgactattaaagaatattaaaaagtagtaaaaattaaatcaatatttaaatttttataaagaatttcttgcaatcagaccaggatggtttttaacaaaacatatatatttttttgtttttctgtttaaatttcttaatttttattgttcgttagatagataaataatttgggtgccaaacagtaccgaaaggcaccgccgaaattttttttgattgtttttattaacataattttgaaaaagtgaaaaaagataacgaaaaatattaactcattaagttatcagcaactaccggcatggtcaattctataaaaattatcttaatacttactagaaatttatttataattgtttaaacgcattttttcttttatattttattattttttaaaataaattctaaacaggaatattttatttgaagttcaatatagaaaaacattaattcgtaaatatagggatgcgaaatacataaaaaaaattaaattcgaaatatataagaatatacaaaccctaaaatgtgtaccaaaatatctaaattaataattttttattatttgtatgattatcagataatttgtctcatcccgtctcgacgtcccgatgaaatcccgactcagctcaatcccgatgaaatataaaaatacatcaaataataaacgagcgcataataataaaacataaaaatatatttttaataatgatttttttttataatcaacattagaacttaaattaaaaataataataaatgaaaaagattctaggaataacggtgataattaaaagaacaaaaaggagataaaagatatttaattaatttatttcgaattatttaaataaatgaatgaagtaaaaaaatgattattaaatatataataagtacatattttacgaaataaaaaaaaagttaaagcaaaagatattttctcatgccattctcaaacaaataaaaatgattatttactacaaagaacttaaaataaattgcaacaaaatctaaattaaaatgttgcaattttcaataatataaaaatattcaatcattactgatatgctgtaatattttagtcatttatgaatatgagagcatttttaaactataaagcaacattaataaattaatttgtaaaaaaataacaagatccctgtgngataaaataagaaacctttaatacacaatagaaaattttaaaaacacaaattacacaatgagcaaagaattatattttataaacatcccttaaaatattaaaccgccaaggcgtacgcaagaaaaaattgtgggtcgagtacaagtttaaaaaatttaaaaaattcactccgaagaagcaattaaatataatttaagatacaatcttttaaatgaataaacaacaaataaatactgtgtaataaatgagattttgataattttgttatttttaattttcaaatttaattaaaaagtttggcatcgtaagcatcataattagttataattttaaattattaataaaacaatgaaaaaatcattatttaatgcaaattaatcctatttctttaactttattttctaaactaatgaaccggcaaaagaataaatttaattttgaatgaactattaatgaaacaatcttagtttttggtcttcgaattgcaaacaaattaaatattataaaaaaacagattttaatgctcatattcattcaacaaatcatgggatctacatgaatgatttataaaagaaataattatcatctaaaattaattttattttgcttccacttacttattaaattaaataataataataataataataaataactcaccaggaccgccatttttaaaaaaaagaatcttcaatatctttttctcactatatctagttctatggccatgtatttttttctctatttttttggctttatatgttagtcgaatatataaaataaaaaaattgacaattagtgtactaaaaattgattgctaaagaaaataaattgaaaaaataatctacatatgaacaaatttaattttagtgaaaatttcatccctcataatttttcgagaagtgatcagaggtgctttctatctcatagtgtttccttaaaaaattttcggtttttccaattttatatactaatccaattttgaaaaaaaatattcaaaaatgatcagaaaaaagtgatcaaagtttcgaaaaatagataaaaatgaccaaatttttaaaaattcataaaaaaataaaaaataatggagagaataatgcccagcggatccgaacccatgaaattggtaattaaaatgaaagaggaaaaaatgaatcaaattaacaattttgggctgggttttcatttgtcgcaattaatcaaaaaaaaaattaaattttaaaaaagcattcaattaataataaatttttcacaaaatacacatataggaattgaaagttctactgctttatacattttcatcatcaaatatttttagaaaaatattcatttgttaaagcaggcgctccctgaaatccttcactaaataaagttatgtcgttaatttattagcagtaaataagatcaatgaaattttaattaaaatcgcatatgggttattcaagttaaataaaaaacatataataatgaaaactaataattgttggtttttttaatttaataacgcaattaaattttttagcaaaataatcagatttgtttataatgataataaaatttttgctaaacattaattttaaaagttttatttcaaatatttgatttatatttttgtttacgaaaaaacaaaaaattggccttaaataaattaatactctgtacggtatttatacttaaatttttttaatgtattataaatagtttgctcataaacacttaaattaactgttattttttaatgtgcttatcaaatgactcaatgaaaaggtatctaataaaaaaatattttaacatttaaatttaaagatagaaaatatgagcaatttatatattcagaaacaaataaaaatggcaagggtttaaataaaattaaataaaatactttatataaataagaacaaaatacccaaataaaaatttactaaacataactaagaaatgcaaatttaacaggtccacacaaatgggacgataactaggtaaaaaaaacgacccagagaattatttaaaatagtaaaattaatgattaatattttaaatttttttataatgattaaaaaatatctataaaaattattaaataaaataaatatcatttaaatacaaaaaaatatcctttttatgaaagcggaaattttattatttaagtaaaaatgaaaaattagttataatttaaattattaatcaaacaatgaaaaaattacaaaaaatatttgcaaacaatgacgattttctggacatcattactacccttttagcgactacaaaaataaattgaatatttcagaattacatatagaaatttggtaattttttagcaaaatttgctagaaatcggatcaaaattttcaaaatttacccggcggtgcctgtcggcaccgtcgatacccaaaaataattttattgcaaaactaacatttatttctttaaacagtgacaaaaaaaaaagtgaaaataaattcggcattatattcagaatatattttataaataatttgttactttttttacaaaattaatattcataattaatatgcttattatgatatttaaaataaactttaaaaagtcttctatgcatattttttttaatttaaaaaagatacactatagagaattaaaaagtaatcattaaaaatttaattgaataaagcagtgccgggaacaaatgatttaaaaacagaaatggtatatggcaacaaaagattactaagaaaataaataagtagtaccttaaaatgctattgagtattaaaaattataaattcagtttaagaaataattgttatagcaattgcgaaagtgtaatactgataaattaaaattaataaatatttgaatgttttaatttaagaatagcataaaaattaaataaaaattgcacaagaaagagcaaataaatttgtatgtctcttgcaaataattatttagaaatatgtctaagaggatcggtatttagccagcaaagcacagcagagctcttggacaagtttttgttgttgaggcaactattaagattgacaaaaaattttaatagcaattgtaaattaaataaattaataaaactttttaaaaaactattaatatttcgttttttaaagttaccaattatatgaaagttccaaattttacatattattaagcaacaaatgaagaaaagtaacaatcttaatatatcacattctaattttttatataattaagataagattttttattatttattttttaaattcaagaaactttgaaatatcgaattatataaatataatcttaacattaattatggaattatataaaacatagaactttattttacggaaaatgagaagataactaattaattaatttaaaaaatatcgtgaccggaaaatcggtcagtggaaaatgcgtcagtgataagcaaatattttaaaataaagttgtatggcatacgtattgtaatatagaagtaaacttctataagaaaatcgttctcaatttcgaaccccggacgcgatctcgaacaaaaagtaggaagtcaaaaatttcgaaattggggttttcttcactagtgtaggtaaatacacggatacaaactgaaa

SEQ ID NO: 7827 - DNA, 2604 bp, Heterodera glycines
  unsure (1)..(2604): unsure at all n locations
aaaaaaagatttcnacagcatataattactagagggtgtgctttcgtgaccgtgaccgtgaattttataaaaaaaaataatgttcagggcccttttaccatataatctataaatatcgaaatactttctagagtattattatatgaataaaagattttttggtttgcttgatttggcgatagaatttgaatgaaaccccattatataattacctatatttaatattaaatgtttattttaaattaaaatgaatactaatatataaggaaaccttcgtatcttctgtataattcaaataatactcatcatttacgaaaatgtatcgttcgtagattttcaccgatttattcaagcgcaaaaattttaaaaagcataataattaaaaataataaaaaagataattccggtaacttgaaaatggaagatttgtaaacatataaacgaatttataataatttatgctaaaattaaaaatatacatagattaaaagttgtaagataaatgaaaataaattcttgagaccatttcttggttttggttgctgttctttactctacaagtggatttcaaataaatatccgatcttaataaagtagtaatagataaaattaaaaaattaagtaagtaacaagtggcagttccatgtgtattggttgtttggataagctaattatcatttttaaagatgaaaaatacttaaaaatatttttttttagtaattataaaaaccaattagataagagcaaatttattgaatttgaaatgaattatagaaattaaaaaaacagtgtttattattatcgtaattaaaaaattttaaattacaggatattttctcaattatttgtaatgataaatcaaaatgataaaaggaagttatagaaaaaacgaactcaaaatttataaaacctaataatgtatatttattttaatttaattttagaaataacatgataatacaattaactcataaatttaattttttaacttaggatttaattttcattccatataaaataaaaatattaaaaaaaacagacaaaccatgactgaaattttaaaagagcaaaaaaaaatattaaagtagataatattcccaatcaaattatcgattgatttcgataatttgattggtcatccaatcatgagcccaaacctattgacctgtttggggatcccttcccctccctctcccgatccataaatcccaaacttattgcaaagaatgagagagagagaatgcgcgagagagagagcggacgggctgatcaatggatacagtactctccccagtaccttaatcgctttccccccccccccaaatgcttacgcccgctattagcggcctttaacccccttccttgcgttgttaatcccctccctcttccttccggtatgtttagtggaacgtttgccgttatccacccccctccccatccctcgtttcacccctttagctcagctaatagctgatccccccccctccgttattccctgtccttatcgggacaatctctcgatggcaggcaaagggctgaacagcaaattgtggatggaaacgcaaggcgtcttcggccgatttcttcagttcattttattgtaagcaaaaaaatgcaatctcttttttttaaaatttaatgttaattatttataaaaaaaatgattggtgccattagcatttagcatttttgtggtattgttcgttttcgtcctggcgtttctatacgctttttgctgttcgccctttgcctgcccccattcatcaccgaggaggtggaggaggaggcgggagtggatttgccaattcccatgaccacttttggtaattttttgaaaagatttttcaaaaataattaaatgattatttattgaacacttttgtccattttttggaactaaaaaaatgccatttttatggctcgaaatgtttttttatgactggtaaatggattattttgggtattaaaatgtttttttttgactggtaaatggattattgttcttgaatatttaaaaaaataattaaatgacattctttattaaattgtgtctttttaggctctttaattaacattctacaggtattaacatttgaaaacaaaagcgaccatcctaacttcctcatacaacttctattgcttgcccactatctcattgcttttcccgttttcattttatgctggtattctttgataaactttcttaagagaagaggacatatttcccagcgtgatgccagtgagatgatggatgatttgcgaaatttccaattaccaaaaaatacatcaattatttttccaagtttatcaataaagaagtgacacaattctcttttttatcacttgatcctcctttaagtcttgataaagaccaaaactaaatttaaggagtgttttttttcttgttgaaaaattagggttacgtgacgaacgcatatgggccaagcttttccaataacattaattcgattgttatgagaagggttggcgacccaccgctcggataggcccaactgcaaatctctgtgtgttcattgcgaaaaattgtcaacgtgcaattctgtctcatggtgaattcacgaagaaaaaacgaaattgcaatca

SEQ ID NO: 7828 - DNA, 1615 bp, Heterodera glycines
  unsure (1)..(1615): unsure at all n locations
tttttacttattacttctcatttatttcctattatntacgtcaataaaattttatatntatttantatgtttcgagtggagttaaaatttgtttaaggatgtgtaattttaatagttgcataattttttactcgactaattaattgcgctctttcaattcgatttttgaaatgatatttcattattttgcataattattaaatatttggcttttctattaaattattactttattaatttaactattttctgcacataacttgtacgacccacccagataaggcgcacttggcgcacggaacgaatagaaagaatattattatacggatttatttatgtatattacaaaaaataaatgttatttaaattttcttaagatattaaaagaataaattgctttaacatcaaacacgttttttttctcatttaaatttcacttattattttttttgttaaaatatttttcaaataaaataaaatctttttttttttgatcacatattatatttgtcattttattaagagtaaataaatgaaatatatttagttctgagtttatgtgtgcatatttttttatttttacattgttttgtattaatatgttaatggatttttgtaaaaattgcttaaattaactttcatgatttcgtaaaataatataaaattcttattgaaaaattttcattaaatttaattaaaaatttggctgcgattattttgtgcttctcatatgataacgtacgtgtacaaaaaatgatagaagtgaatttgaaattatgtaactaatgaatttttaattttatttttatttttgaatttttttatttctctttttatctaaatcaaaattatgcatcttcgtcatcaggcatttattgttgccattcacccgatgtgaactgtgagccattgtcaagacaatttgatctgaaagtccatgtgtagcaaaaatccgacctcatttttcattttacaattataaaattttttttattgataatctaaattataaatttaatttggattatttttttgatttcattttctttttaaattgcttgaagccgtcgttttcatcatgcgtaagtaaaatttaaaaaaattaaatatcaattttttttcaacaactatggtatttaaattatttatatattcaagacttgttggattttataagatagaaattcatttccttattgaatattgtacttattttctttaaaatattttttttcatataataatgagaaaatatttaatcagacctctaaaaccccaagaaaggcattttgcacgacttttttcaaattacggacgttcaaagagaacaatttccctcccttgttatgacataattcaatatcaatttttccttcatggatttttcaaatttaatcatttggtttagttttaataattatttattagtttttataaaatgtggccatttaatttataatgaaaagaataggaattaataaataaatgggttcttttttcaatataaaataagaagaacaaataattattattaatggcaaaagatgcatttataaatggtgatttagagtaaaaattatttaacaaatttgttttgtgaattaatatttatttg

SEQ ID NO: 7829 - DNA, 4144 bp, Heterodera glycines
aataatgctttttatatatttttctcgctaattgacttttcagggaatccaactattggagcgagcgctgtaccctttccatttcacaagtacatattccacaccgttctgcctctttttcttcaaaatcttttcaatttcatacattttttgttgtttgtcttctagtgatttgcataaatcttattgtcatcacgtaaccgataaacaactggcgaacgctcagagtgtacctctgccaccgtgaaaagttcattggtgaagcgtgggaggtaacccttttggaacacgtgcttgtacttttcaatgcgcacgcgatctcccacacggtattttggcttgcgtcgtacaacattttcaacggcatcatgtaatttttgtcgcaatgcttctgcgtttttaaagttcacgtctgctgggcacattccaatgctcgaatttgtcgagtggttaattgcgcaaacaatgtcttgcacaacatcaatccacttgtacgtgttacgctccgtgaagtagcggtaaaggcgctctttgatgctacgattcgcacgttctgccattccggcatgaaattggggagaagtgagcatacaaaagtgttcaacgtcttttgtgcggaagaactgctgtactgcccgggcagtgaattcctttccctgatctgttaacaccttccacgggatatattttgatcttttgaatatacgatcaaaggcaatgatcatgttagcgctcgtcttggtctttacgggctcggcaaacacctgtcgactaagggtatcaatacagactaacaagtacttgaagccatgattttgtttagcgattcggtcaaaaatagccaaatcggcctgccattcagtatgcaagccgggcgccaatgttggcaatcggcggtagcgccgcttcgcctggcgatgcagtgtgtatgtacgttggctggtcaaataattttggacatcgtttcgattgatttttggttgacttttccgcgcctctctcagcagcggttcaacgctcgtgaatgcgacaggcgaacttaggtccttgtacaaaaactcgagcaagcgaagctttttcaaatccataatgatggcttaaacttaagtggggtgtttttataaattcctttgccggattggccttcgggaaataaatgcctactcaagagcggattctgccttgccctttcaacaaattctttgaatgccgttggctctttattttggccacgcttgtccttgttcaacaggtgactaacaatgtcatcaacactgctggttataaatggacgcccaccggctctcaaaacttgcccttcctccgacacccctagagattgggcgtttttataaattaattttaagatttccgtttgtgtgggttgtcgtttatttgaacttgacgaccgtgggttttgataatcatcatcatcatcagtatcttctaattgttcaacattttctttttgcgcacgcccaactttaagatggcgacgcgtagaaacaacaattggccttgtaacgttgactggttttggcatggcgtcaaccacatcactcaaattttctaatttaacacccacgggacgttcatcttcgtcctttgtgagcttgttgagacgcttaacttcctgctcatatttgactgccctttccgcctcatttatggcggcatcattttttatttgtttaattcgggtacggaccagcccaattggtgttccgtcagatggtggcggtgctgccaaactctgataaatctcttcggggactaacaaatagcgctttgtatgctgcattttttcttgtttttaattttttggaaactatttatatttttcaatgacatcagcaataagcgggagagcaattgacgcaatgagccccacaatagctgggaggccatctccgtgttgtagcaaaacctttttggcagagcgcgagcagcgtgtgcgggcgagacgacgaagcacctgtgcatgagctttcagcttattcaaataccggggacgcaaagggactcggccctttagaatgtttaggcagatttcgacaaggcacaaaagttgctcatcggatgcatatcgaataagggctttcgcctttttggcattacacagtgtctccaaaaagcatttatttattgttattatttgtgaccctttcattttggtaggtaaactatttgtttttgttcatatatatttgttcgaaggcggatctcttccggactctctgggtgcatgtccacgagaaggtatccaaaattttttgcgcatgcgtcccggtaggcctcaataaaatgggcagtccttgacgggaagaggtgggtggcgatggtgcgtatctgcaacgcccccgcaggattacgcattaatactaaatagtgtgaattagtgcgcgccacacgcagctctttgttgaacaggtgctgagttaccaaaatgacactgacgccccaattgtgtgagccacgggtgaagagtgcgtccaaatattgttgactcatacccaccaccaaatcatccagcaccagcaaggtttttacttttttggcacactcccgcacttgttccgcgcgtgggacgccgctgtgtacagtgactggcacattgccaactttgccggcgcgctgcagattcatcacatttgtgttcaactcaccatagctataaataacgcgttcaacaggggtagagatcattttgtctacatttcgcaacagacgcattatccactctgacttcccacttcctgtgctcccagacacaatcattgtgaatggatgacgaaattgtccatcctcccttttaaattgttggaaggcgtccattttacttttttatgtaattttctttttatttatagttttggataaacaccgcttatcccgaaatggacttacaggacgccaacaaagagaacaaagagccaacgaaaaagcaagaggaggaggcagatgatcccagttggatcagcctcattgacgaggagatgaagcgcgagccgctcgctccaattggtgaggagacgcccgcaacaagttgcttttgttttaaacgtatatttaaatttaaatttaggcactccaaaaaaatgtgcatgtgccgaacgccgtcgccccgttccgctcgtggaccacctctgcaagcggttcaaatgcaacgcccacgagctgcatgtgcttttcaaaagcctagagaaacgccgggacattgtgaagcatttgcgctccgtccaactgcgcaccgcccacctgcgcccgtccgtgcgcaattttccggtccgctgtaatgacctgtccatcctggacacccactcggcccccgcgtaccgaggctacctcggcataacggtatttttatttgttttgtttgtcggtaacaaaaaatttaaaggtccggatgcactattacataaaacatggcatccgcttgcgccaccccaacttgccatgcgtcgttgaatttggaggcggagatcacaaaacttttttccctcttgaaattttgtccattgttttgtagatgtgttcaatttccaattgtactgttgtttttaaaataaatgttcaacctttatctcgggagcaatttttggcaattgcgcagcgtggcgtaaacactgagtacacaaccccagccgcttccacgcaatcatcatgcgcatacgtgcaacaacaacgactaaaactgtggcagcactggtcttccaatcggcgcgtgtggtcctcaccggagtgccccacccaagcagcgacgtagaacaaggaggcgtgggaattctttaagcaaatggtgaccacctttcacagctactgtgccattggcggttgggcccacggcgtgcgcctgttgttgcaggagttgcgcaagctggcaacctctgcggcatcgtccctgacgctgacgtcaaattctctgaagccaccgccgcagctcccattcagttcggtacgttactgacagattgaaaatgaaatgaatgaaatgtctttcccctgatttcttcctctccaattgacacaaattttcatgaaagatttattatactatacattacggacatgtaccctcatgacgattgattgtatataagcgcagattatgttattgaaaattatgaaatttatccaaatttta

SEQ ID NO: 7830 - DNA, 5197 bp, Heterodera glycines
tcttttgtaaaggcttgatattcacgaaaaaaacaattatataattcaaattttttgatgatcctatgtatttttaagtttgtttaatcaaaattcaaaaggtttttaaagggttggttgggcaacagtttctcattatctccacataaaaatgattgttttcttgaaacccaaggtacattttgcattttaatggacccaatgaaaaaaaaaatgtaggatccttattaggtacctaatttgtttcattttttgtaaaaatcatatgtatatcaattgatcaaaataaatatgtaacaaatccgggataagcgactctttaagtataaaacagtttaaaaaaccaaaagggtcacctttatggtttttcatctgttcctgtaactcactcggattctccgtaagatttttcaatttggcactttttagggagattgccgattaaaattttgttttccaaagtcataaaacattttccgaggttctctttcagagcatcattcaactcactgatttggcccgtgatctcattgtttccaacttttcatcttttcaaattgaatattatgttcgttctctgatgtttttccctttttctgtatttatttatatattttagcttcccgactccgttatgcctttggctgaacaactgttgtccgattaccccggcatttgtcataaaccggcgtggccattgcccgacaaacaaaaattgggagaatttcgggaaagggaagcggagatatgcggacgaaatcgcgagtcagtgaccaaatcactaacaataagcttgactatttggaccaataaatactttcatttgaatcgcaaacattcagaaattttcttgccttggccgagaagctgctgacaatcgcaaaagacgagaatttgcactggcggcagatcgactttgccgaaacgcttctctcattgctgcttcggaaggactgcgacttgccggagggtaaaattagtgaaataccagtagaagcgaaggaggaattaaacccaatttacgtgcggttttatcatgcacccaataaatgtcatcattagaccaacaaattggcctgtatgtgttttttaattgttggtagagcctcccaacttatagttcgtcgttctgttgaacgctcatcattcctcttattactgtttcaggtgttgtgctgcacttcttcaagctgctcacttctgacatcataaacactcgcaaaattgcgtccgtttgtcccattcacattgtcaaacaattaatttattgttgctatttagcattggcttctgtagttcatggttgaaaatacacaggcaaaaggcggttaaggaggacgtcgttattccggtcggttggtgggaaagtttccttctttacgacgcagcaaatgcaccctccgatgccgacaaatgggacagtgccaaattccactcgaatgtccacccgggcttttacacttggccaagcaaattccgtgtgtatgcgccaccgagtgaacaaaaatgggtgagttttcgttaatcagccaatttttatgattttctaaatttactcccttttcaggcaaatcgcaacttttccgaactaacgccaattgtaaataaaaatccaattaaatttatttatatgaacaaattttaaggagcaagcgattgttacgatgttcaaagacaacaaattcatggaaagatttttgacctttttctctctggaggaaaaagtgagtggactttttccaattcaaagtgtttatccctttttcttttccctttacagaaaggaagcgaaaaagtgagtaataatggagaaattggaatgttttaattgttaattttatttatttttgcagttcgatcctgtcaacatgtcattgttttatgtgagtatgatgagtgattaattgctctctaaattaaaagcttttccttatctagcgcattttccgcagcttcaatgacattctcctcccggaattcctcgaaatgctcgacaaattgctggacatcggacacgtaaatagcaaaattgtttatttagaaatattttctgattaatttaatttgcattaatttgtattgtataaaaggaatcgcatcaccgtttggcttccgaattggtcaccggaatggtcagcgggtcgaagctgtggcagtacgcaaaagtcaagaaggtgcaggagcggctggagcaacgattgaccgacacttttttgggccttacggaagaagtcgaaaagaattggggcacggcgttggccaccattgttcgtcatcattttgtcagtttaatcattagtaattatttcatcgtttagttcggtgcgtgtgagccgcgcgtcactaattggcttatccaaatgcttttcggactcgcaaagcgacccacagaaataagcacccaaataaaaacgtaatttgtttgctttcctcacaaattcgttcctttttttaatatttatttaccgtttaggcgtttatatttgctacaatcgggccttaaccaggtgcggtaaaagacgacattctttcattttttaatgccatttgtcttacattgtttagtatgaatggcgaattccgaacgaatggcgccgattgtttgaactttgcatggatcatgtcaacggattgggctgttcctatcaaaatgtccgcttgcgtatcggaaggtgaacaaaatgatcaatgaaatttgggataaatggtgggcccataaaaatagaatgggaaatcggtggctctttttttcggcaatttgcggacaacggagtaccaaattcattctactaaataattaatcaattactcttaaacaaatcaatcataattaaattttaaaaaacgtaatttggcattccattgaccgaaaatggacccttaagaaactgaccacaaatttccgattttcagcaggccgcaaatttcatataacagtttaatttcctttcttcagctgtcttgccaccatttcatcgtccgatttcaagaaagcacttgtcgaggcgaatggaggagaagcgaacgccgacgacgacagccaattgaaacatgtcaccgttgaggaagtgatctcgcgcataaatgccatggtaacgtttgttgattgaatttggtggcgagaataccgcgtgggaaattattcaaattttatcattatccaatcagtgtgattctttttcaacatttttggggggattaattggttttcctataaatgatgcttttcgcttttctagcttactccactgtggagtgaagcactccgttcgtccgttggtgtgtccgccgatgttcctcacaccgaatcggcactttccttggatggcattgtcgtcactcccgccgatgaacacaaacgagaaaagctggcgctaattacactgcttaactacttcagcagtttgagcacgcattgggcacagttactgcgcccatttgcaacgtccatcttccaactgatcccattgttttcacactattccaatgaaaatacgtaagttttcctttttgtgccatatgaagggttgcacagggtgcttcacctccccctccgggtgcaccccaaaatctcgccgccgaaatcaaatcttagaaacttttttaagaaaatttcaagaacaaaccttattagttaaccgaaaaaattggtccaaaaattgtcctgttctcaaatggctaaaagacaattctcctgcgggtacttccccctcccccccccctcccctttcgagaattctaaatcattgatcgcctctatttttacggttaatgctatctctatgtacacttttaatttctggaatttgtttaagtcaattaattaaccactgtttcagtgatgaagaattgagagggtgttgtaatgcgcaattggtgcgttacatgggcctttcaactgtggcctcggcagcggacttggaagaactgttcgccacttgcacaacattgcgcgagcgggcgtcttggtggaagagcaaagtgtggtaaggaaatgatctctttaaaataacaattaagccgaaaaataactacatatttaccattaagccagataatcatggccccaaattggggtcctccaagaaatggttttgtattttggtgtttattttttggctgctttttctttaaccatcgtgttccaagtttacttttttgtaattttagcctgttgcgctttctccaagtgttcgcgttcaccaatcagttcttcatcagtgcccatccaaatggcttttcggcactcgagcaactgatcatcgactttttgtgtgacccccgctttgatgttcgcgtagcggcagcagaaacactcgggggactcatccgagccgccatcattgcagtggaccaacaattcctggccaaggcacgagacatggcgaattcgactgatccaatcacacgtcactcgggcgtcctcgcactttccgtatgtttcacatggaggggaacattttatgccagttaattaatattttattctttcaggccatcgttcgtgctttcccatactcagtgcccgactttttgcccgacgtattgatggcattggcgaggcattcgaaggaaccgcatccaatttatgtgggttccgatcaattgatttactgaaatgttggcaagagtcatgatttttccagggaaagggataaaattttagggagatttgataaaagctaatctcctttattattttatcattttaaggacactgtgaagcgcgccctcaacgaattcaagcggacgcatcaagacgaatggcacacgcataagcttacattcactgaagatcagctgctggtccttacaaatgtgatgatttcgccttcatattatgtttaatttgcattttggttttaaatttttgttctatgataaattgattattggaagtgttttgaatgccataacgaattatggaggattaatgggaaaaagggaggattatttggcaaattcaattttcccattctgacttctcccaaacttgattttggaaaagcggcaattaggtgtaattaaatcaattgtttaaaattatattataaacattttatattttaaaacattttagggtattatttccttgttcttttatgttcaaaatgggcttttcttttttaggttcttctgaatttctttctctaataatgtttttgtttatatttggcctatttcccattcttatact

SEQ ID NO: 7831 - DNA, 2818 bp, Heterodera glycines
tttattttgtgttttattatttaggaagggcaataatcaaaccaacgaccagaaatatgtaaaaaataacttttttaacaaaacaaatgatttttaactattaatttaaaaaacgactcaccgtcacatcactcatctgacaattcatattgtcctcggcctcgttcagcttgcctctgtatacctcacctgaaatattcagtcaaaattcatctgtttggctttgatcaccaattgtggtttcgagcgtgacaatgtgtccctctgcttcatgcaatattttgattggtactccgatggcagtcattttgtttcaataatgaaaatgtaaacctcagcaaattcaaagcttcctaaaaaagtgtagaatcaaacataaaataagtacaacaaatgcagattaatttaaaaacaaattttaaaatttatagatacctacactatgggtcaaccccactgtgcagagaaaagcctaatactatctcgtcgtttctcttttactatctcttcatttttatggtgtaaaaacaacatttacttttctatgtgcagctttttttccctatgttaataaatcttcactaaattttgcatatcgatagttagaagaataacaaacaaaatttgggtataatggaaaatatttgaagatttctttttctctcattttgacgtactattttcatgtctctaacacatgaaaaaacacggaattcgcaaattctaataattttgcttataaaggtataaaatcaatttggacatttaaaattaatagaaaaatgattaattaaacggcagtttatgacccgagttataacgtaatgaaaatttgagtcacacaacttttttctaaaaaatcaaattgcttagttttcggttagaaaaatttttgacaaaatctgtaaacaaatcgtattataaattaccaaatttttcccggcggcgcctaattcgtgatcagctcatttttaagcctagaaaaaatacccgacaaatttttaacatttttttcgtcgggacaccattcttaatattgccaaaaagggcgctaaaaatatgcatacatttaaaaattcataaaaaaaactttttgcttttatttgaaaaaaaggagctcaaaaaagcatttctgtattgaaattttcgattctgaagtcactatgcgtcattaaaaatcagactttgacgcttctcatcaaagggatcgagccatttccctaccgccacttccctaccagccatttccctactaaggcatttgggccatttccctaccaaagtatgaatattaataaacagtactattcaaacaagcaagaaaattaaataacattttatctgtttcaaatcacggtctcatttcataatttcgagaaattccgatcaaaaaggtaatgataaatagatgattaaagcgctgctcaagtggaaaaacattggggtctccattgttgagtggtaaataattttgaaccatcgtgagaattcggcggtctgcttcgcgatatttctttgccttttgcggtgggtcttgtccagttgaacacttcgcgaagtcatcatccgataacttttgatccttcgcagaaggtcaatgaaatgccaaatcgtgttcagtttgttcttcggtgcgcccatacattttgtatgcgtctgggatgattaagtctgtgagcgtgtttggaattggcggtggtgcgtttatttcatgacgtacacgcttgattacctaagcacaaaaatctcataacaaaaaaaagagaaaaaacttttttgatcgcattcttggtagggagttgcgcaaggactggcgtggccacattctgcagtgacaaagagcgaattgtcgctggtggttccattgtctgttccgcccggcgtttgattttagtgattactcgttgcgcttccattcgagctgcacttggttcacattggtggtttccaacttcacgcaaaacgttgttgttgaggttagtgtgaaggcgccctttgcaacggatgtcttttgcgtgatggtgttcacacgaccaaaagcgaacttcaccatcggcactcggcttgtgaaaaatgtatgaatgcccgttgtgttgaagctttgtacggttcttttgtgttagaattgcctgcattttctaatctataacttaaacaaaaaacttattgtctaataattagggttgtaaattatatggattaacatattttttctgcgcatatgctatgaagaaaggggcttaaaaatagcatttctgcgttaaaattttttgatttggtgaaggtttttagtccatataaatccatattttgggggttttcgggaataaatccatatttcgccatttttgggtttttagtccatattttggccattttttggaaattttcacaagaaaaatgaaaaaaaaaacgaaaaatacacccctaaagatcaactttttggaaatttttaaaaattacaccccacaaaacacgaaaaatttgagttttcgtcgtcattttggcattttcaataaatattttcgtcatttttttgcgaacatttctttttttttaatgagaattttttcgaaatttggcaaacttggaggtgtttttgatacaacgaacaacaataaaaaatatgcatttttaagttttaaaccccattttttggttgtttattgtactttttaggtttatttaagcaaatattaaatatgcacaccttttttgggatttttgggggtttacaacatatattttggcattttttatccatatttggccatatttggcctttttagtccatatttcgggcttttttagtccatat

SEQ ID NO: 7832 - DNA, 1423 bp, Heterodera glycines
  unsure (1)..(1423): unsure at all n locations
ggccctagtcattaaaaatctgttgaaaaataatccccccgtctccattaaaggccctgtctccaattatgtccccctttctgaagaggttgcaaaataggtactagttgggtttgggtccgccttttgggtcaaatttttttttttattgtcagaattgcttttagattaatggaaacgcttaaaaatttcactcttgacgatttattcaaagtattggctcttcaagagaaagaattcgaagaatggctcaaagaacttaaggcaattgtgaagattattggtcccacaaaaaaaaaggaataaaaattcaaaaaacacttttctaggggttatttggtgcgctgagaacgaatttgaccttcttttgacttaatttcgaaccccgaacccggattcgaacatttgaaaaaattcaatttttgcaaatattgctgatgctttgcttggtactgtaactacaatatgagtaaaggagaagcgaattcttcctatttacatacgttaatcaataactttgaataacaaacggatcgagtcagtttgatgaagtcgtaaacaaaaaattatgaaatcaggcaaactattgacataataggcggtcaataataatgaccagatcaaaagagacaatgagaacattttcatctaaccttactattagcttactaacaatttagcaatggatatttttgaaatttgttcacaatttcaaaccaatgagcatacaatcgcatacatgcgaaaccttggtctcttacggcaaattgcccccatctgtggtcggcatagatgcccgcggcgtatgactcaagtcaaaaatccaacctttacgtttgacgggtgccaatggcgttgcccaacacacaaagggcagaaagtgtcaatcagggcggggtcattttttgaagaagcgcgttttccccttcgaaagggaatgttcttgatgtattgctgggcacttagtaattataaaattttcataatatgggtcggaacaatatctaggtttgccgttacacacgcaacaacaaatgatcagattgtcattgcatacactgatcgattggtcaaatttttacagagggatttgcagccgttggttgcttgacaaccccattcggttattcttttttttaatagatatcatttttggttaaggtttggaggggttggccatgtggtgcaaatagatgaggcacttattgcgcgtcgaaagtatcaccgggggcacagagtgcgcganatttggttgtttgggatgtatgacgtgcacaccaacaattggagtggttcgcatcgtaccagacagatctcgcgctacactcttgccgataattgagaatttgtggtggcagggtccagcatacattccgatncaatgggcgcatacatgggtggcgcaattcagccatccctgtca

SEQ ID NO: 7833 - DNA, 2710 bp, Heterodera glycines
attagaccattcaaggcgtaacaaaattccaattccccttctaagctggtatttctgctgctctttttctcgcccttcctctgccaattaattcggccaatcgcacaacgcaattttaaactattctctcattccattagggaaaaaagtcctccaaaaatgaattcttacgacttttgctgctggtgacataaaccaccaaatttactctttgaagaagtgacgccgtggggagagaaagtgcggacgaacggacaaagcgaaggcaatgaacgcggaaaagacagtcttcggcaaatgctccccaaaatttgccaacgttgaaaaagcattcaggtggaagagggaaagggccgaccaacggcactggagggagaagggcactgatcggacactttaacattgccattgcctcccctcaggcgacactttgcggacggatgggagcgggagggggcgtcgttggccatttactggaagggccaattggtggtggatttgtgcgggggatacgccgacaaagcgtcgctgaagcggtggggcgaggagacgcggacggttctgttctcagtgacgaaggtgaaacgcgcatcggatttcaattcgtcatttgttttggcccaggcagtcgctgccctcgcggttcaaatgctcatcgaccgtggccacatcgcttattccgacaaaatcagcgtgttctggcccgagttcgcccgcaacggcaaggagaacatcacgctggaggacgtccttctgcaccgggctgggctcgccgctttggatgagacggtgacgatgaaagcggcacgggaccacgtccgaatggcacaaatccttgaagcgcaaacgccaaattggccactcggtgcagaaaatggcgagacaaaggcacaaactaagggtgtttaaggcacaactcggagtgggtaccatgccgtcacttttggctggctgatcgatcagatcatccgtcgggtggacccgcagaagcgcggcattagtcaatttgtgcgcgaagaaatcactgacaaacacagtgggcttaagcgccttccgttgatcggatggattaagcattgcttctcccctctcagacattgactttcacctcggcctccctctgtccctctctcacaccgtttctcgtctcacatttccttccttttggtaccaattgcgtgaatttgtttatgatccacgagtgatcgtcgttcaaggagttcttcatttgcgcacgagaaattctttacgaacgcgaattgcagagaatgcaacatggattcggatagacggagtgggactttgataaaattcaaacgaaataataaaattagatattcagaacaccaacactttcaacaatccgcaattatttgaactcgaacaagcggccgccctcggcgttagtcgtgcgaaagacgtcgccaaaatcttctctctgatgctttccggcgaactgatctcacgcaaatcgctgattcggctgtccaaacctcaaatcataaaccaaattgattacgtgatgaaggtgccattcagcaaagggcacggctttatgtttgaaaagcaccctaggaaagaagtgagaaaattgcaaccaattttctttgtgaattatctatcatatggttaagtttattgtgacaatgagaaacaacaattccaaaaactcgaaaacaggttgcgatatcgaaggcccaaaaaaaggggggcgcgagctaaaaaacaacaatttttcgcattttttgggtggatttgcagtacgtattcgataggtattgttgataaagctccaaatgctaaactattatagcaataagacgaagacaagtcaaacgaatggaaactttggcaaatactactgaaatttaagataacatttatgtttgatatgtacctaaatgatttttataccttttgctcactcaatgggtttcccttcccactcattgccaatataaaccgcggcatttctcacacgtattaaaccgtgttctgttcgtttagggaaaatggctgttcggacacccggggttcggcggatcatcggtgatgatggacccggaggaggaattggtcattgcttatgtgtccaatgggatgaagtccggtaaaaaagagcatccgctgattttgacattttcgagttcgataagcttcgcttaaggcatgggtgagctgacacgaacattcagacgattgaaattggcggcatttgactctatcaaagcaatttccgatggacgaactgatggcaaaaatcagacgcaatataataaatttaacagcagcagagcagaaggagactccccaaaaatacgatagaaatggcacttttttcttttggcttattgtaattaatgtcttgcaaataaatgatcgttttgcatattcatacatagaagtttatttatttatttttaataatacaattcattaaattatgatttattcattgttaaatgataaatttaagaatcaatgttaaataatgtatttctgacatttcattttcgctttttgtaataaaatccgcaggtgatcatcggtcctccgttcactgattcccttagttaattaactaatgattgttgggaacacccataattaaattattattattattaattagaccattcaaggcgtaacaaaattccaattccccttcaaaactggtatttctgctgctctttttctcgccctttctctg

SEQ ID NO: 7834 - DNA, 2033 bp, Heterodera glycines
aggaattgaaggaccttaagcaatcgaaggtcaaattcgaattcgaaatgtctgatcggagagacttttgccaattcaatcgccttttgggccaacctttttcatgtgctgccgatggaaccgttccgggtcccgcgcgatgacgaacacggggtaccgtacccagttggacaccaccgcgtaatcgtactgtaagagttagcaaaattttggctttttaagaccatcatttggcatttcatccatttcacctgattgtattcgttcagtgggcccagtttgatcacccaaaatggctctgcgtctggtgaattgctcgagtgcagcagaaattggcccgtgtcgcccgctttgaagccgtagccaagcgaaaagcgaggcggaccattcgaattgccctcacggtaaaacttcagaatggtgaaagtggccgagtaagtgttgttggtcagagcgccgaaatgggaaacggtgcacgcctcacggatgacatgcggactgttgatcacctgaaaagcggagagtgccaaaacgggaggaaaaagtgccaaagagtgccaaaaagggaggaaaaagtgccaacggaggaggaaaagcggaaaagaataccaaaagaggttaaaaagagaaaggaatggcaaagatagaaaacccttcacctgaaaccatctgcccatcattcgcgcaacgtcaacattctctgctgcggggtgaacagcgcggaacacattttttgccaaatttttggtcgcatcttttggcaaaagccgcgaaatggacgagccgagcaaagtgttggtgggagggatcatttggggcacaagttgaccaacgatgtaattgaagttgctgaggccggggatagtgttcacgcccggcaccgtcggtgcgtcctgtggcccagcgaagccgggaaccggaatgggtgccaacccgggaatctgaccactggccaacccctgaacagaacaaaaatggtggcattccgtctgtgactgcctcacatgcaagtcgattcgattcgctgccaaatccgcacccaacgcggcgagttcgtccgtctgataggaggagacgggcggctgccggcggatgtcgcccttttgctgctgagcgtcgttctgtccggccaatccgagccgttccagcagagaattggtgaacgaagtggccttctccacgttttctttgtccttgtcggtgagttgaagctgaacaatcaccatgctcagtcagctgttttttcctcacttcacctgagttggcaagtcattgcttatcggctgaaagagcggtgccgattttgcggcatcggacgaaggcgcggcggacgcaccggcggagtgctggcgcggaaagcgcagggaccgttcgtggcccatgtcgaactgaacaaggtcaaatgtgagggaatggaccagcagaagggcatagtaatgttaaaagacctggacaaaatggacaatgccattggcaatgttggacagactgagggcaaacagaaaaagggccacagacattgccgtggggtttccaatcattctgcaaaatttaaagaatgaattaatcctatttctaattcactaaatcggcatgaaatgatgaaagcgcctgagggtaaatgaacagcgaatttgaagtggagaggcacaaatgagaggggagagatgagcagaaggggagaagggaagggaaacggagggaaacggcgccggtgcgcaacggaagcacatcgatcccattcaatcctaaaactacccgacgggatggaaagagagagacccagaaaacgccgcgagcgatggaatggatattatcggaagagggggggggggagcatcatctcatccagaaaaagggaagagaatgacaatcggtcattcggacgggagacaatttgtgaaaatggagcaaattgaaaggggaaaagtcattttgtgagacataaataaaaaaaagaaaatacaataaggtaaacatttatacttttaaatgataaattaatgaaattcacactaaaaatgaaacacaaa

SEQ ID NO: 7835 - DNA, 2130 bp, Heterodera glycines
gtgtattttctgaaatttgtttgggtcatttcttatgggtgtatttttcgtttttattgcatttttgttaaagattttttcaaaaatccaaaagtaggcacattaatcacaaaaatcccgaaataggcaaaaataggcattataaaagtcatcgtagacaccccaaaccaagcggaaaacgcgttttttgtgcttatctgtacgtattaaatgcgcaaaattttaggcatttgcctaaaaaggaagccctagttacctaataataatttaaaattttgataatcttcaaaaaaaatctttttgtattatattatagttgctgaactcactgattctgctgatcgccaaacagagaaatgttgaacaaaaacaaacacatttaacggccgtacagtaaaaccgggacctcggtttttgtaggggaaccgggtccaaccggaaaatctttcaagttaataaaaaatattttaatttaaaattattatttttttcatttttaatagcctaaaaacccataaattaaccaaatatttggtcattttttgacaaattctgttaacaaatctcgctcaaatttcaaaatttttccggcggcgcctatcggcaccgccggaccccgccccttcccaatgttccaaaaaagttttttgaaaaaacattgccacaaaaacagcgatttaaaacagggctcggatctgtccttatttataagatttgtccttatttggagggtccaaatcttacaaaataaaaatgtccttatttgtaagatttgtccttatttggagggtccaaatcttacaaaataaaaatgtccttatttgtaagatttgtccttatttccggctattcttattttgttcttatttcttaaatatattcaaaattttgaaattttatggcagaatgtcactattttatcaagaaaatataaggtttgcgcaaaatttggttattgtttgacaaaaaactgttagcaaatcgcattaaaaattacaaaatttttcccggcggcgcctatcggcgccaccggaccatctccccccttgttccccaaaagtagttattttttcttctaattttcaaaattattcccttttcggtgggaattcaatcacaattttaacaattaaaatgagaaaatattgttatttttggactaaatttgttcacaaagtgcactaaaaatttcaaaaattttccccggcggcgcctatcggcaccgccggaccccagaaccttatttttataaaaagttggctcaaaatcgcaaaaaattggccttttttggtgaaaatctgttaacaaatcagaattaaattacaaaaaatttttccggcggcgcctatcgggccggaccctctcccctcgcacttcccaaaagttttttggaaaaatgcgccgcaaaaaattgttaaaaatctgattttttttatcccgaatgcactaaaattttatgatttgctaatttcctccccaaaattgttaaaatcgttaatgggagacaaaaatataatatttgatacattattgatcgaataaattgtaaaaataactgatttgaagcaattttgcaaaatgtccttattttggacccaaaaatcttattttttggccttgatgttcttattttgaaaaattttcgatccgagccctgatttaaaccaatcgtttcacaaatttatgatcacaaaaattccaaatttgtcctttttccaattttatcatttttctccgttccaaccctttccaaatgatttaaatttaatcattctttctcccccttttcagcaccgcccgcattcaccaaaagaggacaaaaataattcagaaaaaggggcaaagaatgaatggttggccaacgaattaatatgcgaaaggtacggcaaaacggtggtgaaaaatcacattaattggccaagccaatttaatcaaaatggggaaacagaacggacaagcgaccgaccaattaagcaaattaaaatttggctggaaaatggccgaaattggctaatgacattttcaatgaagcaattaaaaattagataaagttatcaaattttatgtttatggttattttatgcaaaaggtcagcacataattattgtaccacacaaaaccatccactcc

SEQ ID NO: 7836 - DNA, 2775 bp, Heterodera glycines
  unsure (1)..(2775): unsure at all n locations
catttttcctatttttattgcataaattgcggctcattttgaagagaattttgttttgaagctaattagcttagttttcctacaatcacccaatttttatgtaaaatttaattgatcaaatctaacaatgtttctgaaaaacttcttactaccaaatggaaatgccccaagggcggaggtccctgcgagctcgcacctccagcgaagagaagggaacacaaaactccgcccagcccaaacacaaacaaaacaaatgcgtatttttctcttccttcgaccgaatgggcgggcaaagaaaagacgccaattgcaaagggaggggaggcgcataaaagggagagagcggagcattgggcgcacagagagagggaaagagagagagagtggcggacggagcgccgagggggcgtcacttcggtgcacttgcgattcatttgccattcattccctccctcccttttcatcccctacccaatcgaaatgcgtcggaacaattttttcccaactcttttttttggagtgcggatagcgagaagatagacaattcatggccatggcacattaacattaaggttctggacggttttatgcgtcccataacatattatgcgtcccatgaagggaaccggccattttggcgcaagactatatcattttgatttcacagcaaaattaaataatcttggtatgattttaagtggcttgatagtgcctattaacctgcaaagtttcaaaaaatttagctgagaaacaaaaaagttatggccaaaaaacctcaaaaaattgcattttcctggccattttggcgcagcgcgccatatcttttttaaaacctaatataattttttgaaattttgcaggctaataaagaacatttagacctattgattaatatcaacattattttatttggtcgaattaaaaaaaagttatgaatctttaaacttgtctgcgccaaaatgaccccgaccctcccatgaatgaccgaccatcctggtatcaaatgaaagctaaaagtctcaggattttataaatgcaagaaaagtgcaaacactggcattaaaaaagaaattacaatgagaaatcacgcaattcaactttttcgagaataattttttgtctacttatataaaagcttctatagaccttaagctttcatttgataccaagaatataagtattggccaagtaagaaaaaagttatggcctaagaaactgggtatggtcattcatgggacgcataaaaccgactagaaccaacattaaacgaattgcctaaaaacgaattggaatttttaatgaccaaaattgaaaaggagttaaccttccttctgtattagacatattcccaaggaagagtaaattattttccgaatcctcccaatatgttaatttcatatttttatttccattctttttaagtggatttgttctttattcattgcttacaaacaaaacccattgattcttcgtcaaaaatgtcatctgccccttcgattgcttctccaactttgcaggctcctgcttcgtctcaacaaactccgaaaaaatctctgacgcctacgaaagcttcaaaatcgaaatcgctgaagacggccaagccgaaggcaatgaaggcctctaagccaaagttgccaaaagcttccaagcccaagtctccgaaggtttccaaatcgaaagctccgaaggtcaaaactgctaaggctccgtcaaaccacccgtcttacagctcagtaagagatgattccgataagaaataggcaaatattggtcaccttttcagatgatcaagaaagcgatcgctgagttgaaagagaagaaaggcagcagtcgtacagcgatgtaaagcatcattcgatatttaaaaaccaatctnaattntagtctgaaatatctcatgtcccactaccaattgggcgaaaatgcgacgaaggtggttttgcttgagaaaacgtaaattatttttgcttcgttactttttagatcaattccagcctcaaattgggccttaagcgcggcgttgtttcgggtgaattgaagcaagtcaaaggcattggtgcttctggttctttccgtctcggcggaagtggcacgccaaaaacatcggatgtgaaaaagagcccaaagaaaagaattgctgcgaagaagccatcggtgatgaaagcgacgccgaagaaagccaaaaaggccgtcccgaagaagtcgccggctgcgaagaaggcgaagcccaccgctgctgcaaaacccgaagttcctctgcccgtttcgccggcagtgacaaagtctaagaccgcgaaggcactgaagaaagacgtcccgaaaaagtctaagatggccaagagatctcctaaggtacttttttctctgttttattgcacatttataactttgcttctttcgcagatcgctaagaagtcgaagactccgaaaaaggcgacggggggtgcgaaaacttcgcggaaggtcaagaatgtggtggcgtcaaaatctgccaagaaggatgtcggtgttgatgctgcttcgtgaatatttcttttcccttccatcgatctccaaaatgtaaaattcgtttatgtatctctcaattaccttgcattttccactcagatattttccgatcattcttcactccatttgttttcgcgcaattatctttgcctttttgagtatatatgatttgattttaatgcacagcaggcgggaaatgagctcctgtaccagaaaagattctcagggagagctcagtggtttttgtaagatagtaaagggacaaag

SEQ ID NO: 7837 - DNA, 1777 bp, Heterodera glycines
tttttagcacctattttagtacctatttagggatctttagcacctaaaaatccgagccctattttttacccaggcggcaatcatgaagaatggttgtccctaattttcatttttttttaattttgtgctcaaaaccagtttttaggcgtttttgagggtgctgataacggatcttaactcgggtttgcccaattccgaactccagacccgaattcgaacaaaaaaaaaattgtttttttaatcaagaatagttttttcagggtaaaagcttctaattcattatcaactatttaggtgtaaaacaatgtttcaatttttaattaaaaaaataagcaatttgcgccgaaaattgacaaactaaagccattctcataatgctactttgaaaaaaacgaaaaaaaaacttttttatattgatcccaaatccgcaccgtcatatatcatcattttgacaaaaagtgcgcacagacaatacgccaaaaaaccccactaatttaaaaattttgccgagattttcccttgtaaaaacggaagagccgatctcgagttaaaaagcattttgataaaaaacaaagcatcatcctataggttgggttaaaatatgtgtttatgcaaaatttcaagaaaaaataccaacaggaaaaaattttttccaagggcaaagttttttctttttctctcattttgacgcactatttccatgtctctaacatataagataacacatggttcattttcttgctaataaactattttttcaaatttttatttaacttagaaatattcttaagaattttcccatcaaaatgagcacaaaatggttttgtttggtttacccttcaccaagttataagtattagaaatttagttaaaatcaatgataaaacatatagtgtctaattccgctgtctgtttttcattggcgttttgttcacttttattttcaataatttttaatgtagtgtctgacttatatagtgtctgctgtttcttcacttttcttgtttttttacatttcgtttcaatactcatttttttttataatgatacgcactttttgtcaaaatgatgatatatgcaccgtccatataattttgcagaaatttgaattttatttaaaaaaatatatttaattttattgtcgaaacggcattgtcgaaaaggtattgtcgaaacggtcattggcgaaatgtccgggagccgttgtttttcctaaattagatagtacgccaaaaggagacaaaaaattagagaaaaaaagataatgtttttctctggcactctctatttattggtacacatctcgttttttcggacggtgtgaatagagatgctttttgtcgtcaatcttcatttgaaaacattagggcgacagtcttttaaattgaattgcttaattccagcgagtttattgaaattttcgtggaaataaaccatagtcggaatcgttcagccttaagaatttggacttggtttactgatttacaatggtaacaaagtatttttttttacaaaagttggttagattttttatgtaaatatatttggataataaatattaattggggtgttatttcttcccaaacggtcctccgatgcctcccccgccaattccaccgaagcctccgcaaattccgcagctccacaaacacgcttcggcaattgactgtaagattggacgtgaaattttaattgtttttatttactcgagcacctgataaattggcccggctttgcctctaatcaagccccggccttatggttattttcggttttg

SEQ ID NO: 7838 - DNA, 1899 bp, Heterodera glycines
aggccaatactggtttttcgacaaaaaaaaaatctgtcacaatcttgttgttaaagtcaactggtttttttgtcgaaaaacagtacgagctggcctagtgctagttgggtttcgtccttattatttttatactataattttgtttgtcaattcgaacaaactgtattggtatttgcctccagaaaaacgagacgcttgaaaattgtaaattgcaacacatgcattacgccaaataaaatttaacaaaaataaaatatgaaaatctttaggctgctcacaaattcacaatcattatatgccgagcataaaatgggccattgtttaattctgcttttggtatgacaacaaatgagaaaactgtttgctttcaataaaaatgaaaaaaaaagacacgaaatattgtgaaagatagacaaaaaccaaaacaaaattgaaacataaatatttattcaaaacaacaacaaaaaattcttacccgccaaaataaatttcaaaacgagatcagagtgaaattaacaataaaccaatcaagtccatgacagaacatcaattctaacaacagcaggagaaagtgaaaatcgtcctaataattatttcatttgcctctctctctctcttaattcgccgccgttcccaataagttctgaccgtccatctcctccggcttagtcagtcccataaggtaaagcacagtcggggccacgtcgcacaatgctcgcgcccggggcacaccctccgcagtgatgggcggcgcacttttgaaggagtgtgaggtggaagagcaggcgaacggaactgaaaaatgcaaaaaatgagtgttcaaaattaagcttttacagttaatgaaaactgacccttgttgcacgtgtgggcggtgtgtgggccgccatccttggctatcatttgctccgcattcccatggtccgcggtcaccaacagcacataaccgtgacttttgcatgcctccaaaatgcgtccaattgccacatcttagaaaattaggggaaattaaatctaaaaatgagaaacaaaagtgtggatttgtaccagtcgcttcacacgccttcaccgtcggctcaaatttaccggtgtgaccaaccatgtcgggtgctgcaaaattgcacatgatgaacgggtgcttgcctaattcaatttgtttgaccacctaaaagtagaggaaaattgaaatgccaaaaacattttttggaaacaatttcatgttttttactctctaaaaatcgtgggtctccccccctccccccccccccctcccgaaaaaactgccttagcgatggtcacagaggatttaggattttcgaggcttgggcggataccccgatttggtgttgtttaagcgcttttctgttttttcttcaaagaattaacccagaccatccctaaacatgacccgtttcgtactttgtccgcaatgccttcacagttcatctccggcttcttgtcataagtggcaaccctcggcgatgggaccatcacgtgttcttcaccctcaaatgcctcttctcgtccaccgttgaaaaagaaagtcacatgggcatacttttcggactctaaaaaacattttattaaaaataaatttaaaaatgataaattgaaacctgcgcaatggaattgagacactttcagtttactgagccattcagcgagcacattttgatgggacacgggagggaacagaatggggaatggaaactaaaattaagggtaatacaattaaagttttgtaaggttttggggctttcgtccttgcgcaacagtaaacaatacctctgcgttgtactgtgtcatcgttttgatgtgaagtctcttcggcagtgcgactttggtgggcaaatcctgcaagttttgcagaccacccatgcatttggtaatctgacgcat

SEQ ID NO: 7839 - DNA, 2144 bp, Heterodera glycines
tgttttttcaaccaaagattcttcctttgttttttcctctcctaagttacccccccccctaaaattcctggataaaaacagttatttttcatacctttcacacgcgcttcgtccgaaaacacgatgggcgtcaggaattcgtcagtctcttcttggattgcgtagcgcttgttcaccaattgtacagcattcgccggttcgcactgttcgcccactccgccaaccaatgcctcgtaggcaacctttaggaaaaatgaaaatccaaaaaatgatatttttttcgaaaatgagtgccttaattcgctcccatcgattgtcacggtccatggcataataacgcccaacaatggttgccaattcgccatatttttccttacttaagaagtcaagcagttgttgcaaaaagccggctaaaaatggcgggagcatatataatcgcagatttgttaaattgaattttttattttacctccactcgttggcgatgtgtcacggccgtcggcaaaaaaatggacaaaaacttttggcacttgtaattgtttgaaggaatgcaacagaccaaacaaatggcctatgtgtgagtgaacaccggcgttactgatctgaacatttttgtatttgattggagaaaatggaataaaaaacgattttttataaaactcaccaaacccaacaaatggagtcgtccgtttccgttgattgcttgttctgcggcgtcgatcacttccctgttctcaatcagttgtccgttgcgcactgccaaattgatgcgaataatgtcctaaacagaaaaattatgaatgaatgaggttgtgattattcaattgaaatttgtgtgttaattgaaaagtggcacttttgtaaatttttgaaaaaatagagacccaattggacagcaatttattttaatatgatgcctagcgtaaaaacatttttatatttctgaatagggattcggaaatgtgactctgaaaacctcgggaaaagtttgccgattttcatcactattgcagtttacacgatttttttcaaccaagaagtccccacatttcaacaagcactaaaaattttgatgactaaaaattaaattgtatattgccaaaatgtgactatgcgttatccaatgtgtcttaatttaatcttaaaaacctggtcaatcacgcgacccgctccgatgttcagatggccacatttggaattgcccatacgctccttatcaagtccaacatgttcaccatgcgcttccaactgttgccaattgccggaacaaagttggtccatcaccggtgtgttcgcatttgcaatggcattgccatgttcctcctcggtcagtccccatccgtcaataacaatcagcacacatttgttttccactaagtgattattaatcatttttaatcgctaaaaatgaatgtttttacaatctcgaatcaaaacatgatcaaaaacattggataatgaattgtctacaaattaggtcggaccgggtcagcttagtctggccgttctgtttttttgggtttattttatgccactaattttgggcatggggttttgagggtcgctgatcaccaatatgacattcttttttaccaattccgaatcacgaagccgagttcgaacaaaaagtcgaaaattcaaaacttttttgacttatcatttgctattgacataaatagtgtattttagggaattgcatctcacagagtcaatcaaatgccaccggagaaggataaagcggccaacattgagccgacgggttccgattaccctgacagtgaagatgaaagttatattttgtttatttaatggtcaagatttattctttttttcattgtttagtggcaattttggaatggtttgacaagccgatcagcgaagacattttgaacctttctgtaattttactatttaaaaaaaatttgtgtacattttggtccattcttttttagaaacatccaccgccacaaaacaaaattcacaatctgcaaccggctcgcgaaaatgatgatgatgatttggatatcattgcatatatctgcaaaaacatgaacgagggatgggggctcggctggggtttaatgcattattaagggctggaaatcggtgggcccggatccggggaaaaaaaaaatttttttttt

SEQ ID NO: 7840 - DNA, 1489 bp, Heterodera glycines
aacaatattgacgttgattttaagtcaaaaaagcaacaacaaaaaattgttcgaatttgggttcggggttcgaaattggtcgaaattaatatcatattcgtgataagcgccctcgagaaccctaaaggactttgaagaattgcataaaaccctctttttgcctctttttttgtgggacctgtaaaccatactattacccaaaaattctcgattttcagttctgttcactttgttaaaatacacgaaagtgaacagaatgtcatcatcatttaaaccattcttggactaaatagaaaatcgaaaaattgagttttcgattttttgttcgaactcggtctggaattcggaatcggtcgaaaagaatctcatattcgtgatcagcaaccctcaaaaccccataaaacgtgttttcacgactttttaaaagaaaaaaatttttattccaaaaaaaaggggggggggatttcatccgaaaagaactttttctttccacaattggtgaaaatttttcgtttttgtatctcgtcctcaattttctgcggaaaaaattttaaaaaagcaggatattgatattagcaacaaaaaaaagaaatgagaaaaaaaaggaaaaaatttacggaagaagaagggaaggaaaaagtgagcgaatgaaagaaaatggaagaaagggggacttttatagcaagacgtcgaatacatcttctttgagagattagaaaattagagagtttaggtaagtgagtttcttgtttaagggaatgggtcgttttggcgccgacgttttggcgccagcctcagtttttttattataactagagaccggatttttatgtgctaaaaatcctgaaatatgtaataaaatatgtgctaaaaaatgctgaaatatgtgctaaaaacccccaaaaatgccaaaatatgtgctaaaatatgtgttaaaaattgaaaaaataagtgtgtttttgcataaaaattcccaaaaatctcattctttatcatttttagcccatacaacgcaaatcaaatacatttcgaagtgtttggggtaaaattgtcttttttttataaatcatttctataaattgaaagttccagcagagaacttcgaaatccaatgacgaattaatgaattcgagatttcattagtttctacaatcgaagaaaaaattttttaatttgaaaattatgttaataattatgaaaaaagtcgatttttaggggtgtatttttcaattttcttgtatttttattgcaatttttctcaaaaatgccaaaatatgtgcaaaatatgtgccaaaccccaaaatatgtgctaactagggctaggatttttatgttttaacatattttttttgcggcttagttatggcgagagaagcccaaaaatagcattttctccgaacaatttttggtttagagcgacttataaaaacataaaaacacatgtggggtggttttggcacataaaatatgttagcaccatattttgggg

SEQ ID NO: 7841 - DNA, 1898 bp, Heterodera glycines
tgttttgcgtgatgatcaaactgaagaagcaccaccctcgatgaataccaatgatgaagtgttgaacaaatttgctctgtcacgacgcatcgaaatcatcaaaatcggacggaaaacggttttttttcttcaagtttttgcttgtacaattatacaaatttaactatgttagacaaatgttgtggacgatgatgaggaggagggcttggttggcattccgcgaattgtggaatccattgaaactgtctgttggccgaacatgaaactgaagccgaacccggtgaagcagcgcgagcatcggactcgtcttgaaaaatacatcaactccgaggcgtgcgctgatgacactgcggtttttgacatgttcccccattgtgctgatgattttgctccggtacgcctctttttttaatggtataatcgacaatttggcaattgtccagttcgtgtccacttatttgttatggttttcaacacattgacaccgcgaaatagtgtatatcatagaagttcagtgtcttgacaactcgtacaataggcaaccgtatatatttgctttgggtttattttgtaaagtttactattgcgcgttttgcctttacgagttgccatagactcaaattttcgaattcaaacaatatttaaccaaaaagagtatacacagaaggggtcggtcaaacaaacataagcaacatttcccttaccatttgcttttgtcataaattgtttattttagggaattgcatctcacagagtcaatcaaatgccaccggagaaggataaagcggccaacattgagccgacgggttccgattaccctgacagtgaagatgaaagttatattttgtttatttaatggtcaagatttattctttttttcattgtttagtggcaattttggaatggtttgacaagccgatcagcgaagacattttgaacctttctgtaattttactatttaaaaaaaatttgtgtacatttggtccattcttttttagaacattccaccgccacaaaacaaaatcaccaatctgcaaccggctcgcgaaaatgatgatgatgatttggatatcaatgcatatatctgcaaaaacatgaacgaggtatgtggctccgctgggtttagtgcattattagggcttgaatcgttggtccggttcggacttgacatgcataaaaagtgatctaaacgttttggtgtatctgaggctatttgttggaaaatttgtgtttatccctctaaaatgctaattggcatggaggctttttgttttgtttttttttaatgggggtgctgtatgctgtaccaaaaccacgcgcgacaccgttgctctaaaaaattgtttgtttgccaaatataagacaatacgaacatcgaaagcaataaaataccaaccacattacctgagggaccaccaccaccttccaattctcttgaatttgaaaccattgaaaagtttttctttagttacgcctcggcaacacccagcggcccttaatggcgcgagtcgatgtcaacgagggaatcacttacgaccttttgaaggccatttcctcttcatgcaacaacaacaataaacggggcgataataataaataattgtttttgctcaatttccatttgctttttttgtgttttaaaattttattgcatcgtttttccctttttctcattcattttttcgttatttatttccatgccattatccaaatgattatctacatagttttttgatttaatcatttctaattcattttttcttttctttttttcctgtttgcgaatttattggaaaatgactgaagccaaaaagttgcccgaagtgccggagacgctgttgaagcgacgcaaaatcagagccgcgcaacgggctgccaaggcgaagaacaactgaaca

SEQ ID NO: 7842 - DNA, 1028 bp, Heterodera glycines
ccacctttcccgctgttcgtcaaccatccgtgccggcactttgtaccgcttcaactgcccatcccagtccaagtcgacaagtccgccacggacagcgatcgccttcttcacccgattggccaaactgatggccgattcgccgggctaaaaaacataggacttttttttttgtgatgacgacttcaaaaaattttttttgaaattttcttataaaaaattctaagatttttttcttaaaaaatttctgttcaattttttttttaatttttgcggcgaaattttgtcccggcgaaattacggtggcggaattttgtccgtcccccttattctaccgagttaccacaaggtcatggtcatttaaccactcttttattgaaatttttattgtgaattactaagatttttcaaaatttttccaaaaaatcgctgaaaatttaacgaaattagaaatttttcaaaaaaaagtattaaaaatttttttttagaaaattcaaagaaaaaaaaattctcgaaaaattttccagagcgattttttcaaaatttaatggtgaataactaagttttttcaaaaaaaaaatcaaaaaaatcactggaaaattttttgaaattttttttcccttcgaatttcctaagaaaaaattttctaagatttttttcttaaaaaatttctgtttaaaaattttttaaaaatttattcccggctgtgtttcggcgcctgttttgggatgtaccggagtcgaccccaccccccccccccacccatttttctttgaccccacctctttggtcatcggtggcaaataccacacgtggcagatcagtgcccagctggtcatcatctgcagcaagtagcgaaaatagctctgctcgctggagttccaaaaggcgtcgccgaagcgcgagtcgtatttcatggcgatgggataaattggcgcattgacctgtgaagcgtggagaaggggggatgtctaaatttgcaataaacataaaggcaacaggaagcagagagatagcgagagagaaggggg

SEQ ID NO: 7843 - DNA, 1277 bp, Heterodera glycines
aaaaaatgagtatcatcataatagaaaacgctaataaatttctaagatatattttataaattccatcccttgcacaattgcagtgaaaatgaaaaatttgaggaactttaggccacattttttgaggacaaacacccaccggttgcacaccaacgagcggtccttggcctcggagcgttcaaaccaaatgtgggacgacgcacgactgagtgcccgttggatgagcccgatgacgccgccgtgtttttgtccgatcagcgcgtaggcggtgtccgagccgaggatcaccacgtcaatgggcgatgtgtggttggccacgcaaatgccttttgattggaaaaaatttaaaaaaaaatttttttttaaatgaaataaaaatttttgaaatgtaattaccgccactctgtgccttgttgtgactgtcatggaagaagatcagtgccgagaaagcacgtgaaccgatgcgcatgaccacctttgtacacaaatgggggggggggggatgggtataaaatgtaaaaataaattgaaataatccaaaataaaatttgaaaatatcagagggtcccctacgcaaagagagcggaatttgtactttgtaaatctgtaatccaaaaaataaaattttactttttcaaataataaagctataaaaatggggaaaaaaatgctccgtgctggaatcgaaccagcgatcttctgtttactagacagacgccttgccactgggccaacggagcacattgtggtataaatttttttatcaaagaaaacaatttctctttgtcgcatgttattctttttcctgcgttactggattatattgggtatagagaattatttatgctttttcaatgatatttaaattagtgtattttttaaagaaaaaaagcttggtctgagaatttataaaaaaatatattaaaattaaattagtctcacaaaaaggacagtagtaataaaaacataaagaataaatatatagcagaaaattcaagagagcagctcgttttcaccgaaaatcttttttttaatttttgctaacttagaaattttacaatgaaaaaatgttagaaaattttttcataaaatattttaagaaagaattttacagcaatttttaaataaaaataaaagcatttaaaatgatatggatttgtaactaccggaaaggataaagaaattcgaaaaaaagacggcatgctccgtgctggaatcgaaccagcgatcttctgtttactagacagacgccttgccactgggccaacggagcacat

SEQ ID NO: 7844 - DNA, 2415 bp, Heterodera glycines
  unsure (1)..(2415): unsure at all n locations
taggaaaanaaacttaaattgaacaaatttccttatcaaatttcattcaaaatcccaaaatttttctttaaaaaaaatttctcaaaattgcaaaatttagtcattttttggacaaaatctgtcaacaaatagcagtcaattttcaaaaaaaaaatttttcggcggcgccgcctcaccccctgttccccaaaagtttttggaaaaattgcgtcgcgaacaacaaaaaaaaggtcgaagttttaaaaagaaaaaataatgtttaaaattttatagctattttttttaaattttaatatgaatgactaagtttttgcaaaatttttcttgtaattttcatagaaaatttttttatgacaaactgacgcccctcgccaaaagcaggaaaaattgttggaaaatttgtcaaactatcgcaaaaaaaaaaatgcccgccaatttggatggaaagagaaattaattaatttgtttatttttgagcacctcagaaattggtagaagctgacgctggtccgtgtcagcatattccacgaggccaactgctcggcctgaatggaaaaaatttttaaaaaataaaaataaataaataatcattttttgggccctttttgccttgaatcggctggtcacttcgtcctcaatgatcgcctcaacgccggccttgaaaagttggggaaaaatttgcaattaaaaaaatgattaaaaaaatgtgaataacgaaaattttaaaaaaattttagaaaaaatcctcgtaaaataatttttaaatttattgaaattcaaagaaattttgagattttcaaaggtttaaaaaaatatataaaatttagaaaattattatgaaattgcaaaaaacaaaacaaaaattgggaaaattgaattttgtcattaaatttttaaaaataaccgcaaaaattaatgccatgccacacacacacctttatgaagtacatggagtcccgaatgccttgccatccgcgcgaattgacgaacgtttggaattggaactcctgctgctggtactggtcctgctcgtccaagtgctggatggacgtctcgcggatgataatgccttgggggaaatggggataaataatggacggaaataaattttaaaaaatgaatgaaaatcggcatcgaattttgcaataaaaattgacgatggctcatctcttctccggaaaatgttattttgcaacaaaaaaaaaattaccaaacaatttttataaaaaatgaaaaatctttttgagatttctgactaaaaaaaattggggcctgattcgtgaccagcaaccccctgaaaatcccaattttttcacgtcgtaaatttcctggggcataggtgctgtaattgaggggagccttccgttttcccaccacctccaattttttttaattttcaaaaaaattcttaattttttacaaaagaattacaagaaaattttttttttggaaaaagtaaatgatgaattactaaatttttatagaattcttccaaaaaaaatcgttgaaaaaaaatttttttttttttaatattttcttataatttttttgttagtcaatctccgtcaatatgccaacaacaaaaaacaaactttggccggagccgtgccgagctcgagcagaccgagtggaggtggccgagcaaagacctgcgaattttttgaaaatttgcaaccaaaatgaaaaattcaaaaaaaaaaaatccccaacttgttgagctgccgtggtgcaacgacgtcttgcgcaggcttggcatcgagttcatcgagcgtgccaatgggcttggtgccaatcccgagtcggttggactcttaaaaatgaaccaaaaatttccataaattcaatctttacatatttatttggttttgaaattccgtccaacaagcccatttaattattttaaaacttttgcatttaaaaaataaattcaataaaggcaatgcattggattctgggccaaatcatcgggtcttggggccaaattaggcataaattgatcctattctcgggtccaggccggcagggacagggggtacctactgcccctgggcgacgaatcttttttgcttttcactccatttttcacggcacggatttaaacatttttttaaggaaccaggggggtccgcgcgatatcgaaagagacagtcggggaaatttttacaatttctaacagaatttctcaaaaattttgcatattttatggattttttgaaaaaactcagaggttttttttctcttggaaaatttgggtgagttcagcgcaaaaaataatttttattgaaatggggtcgataggccaggtcgcgtccaaattggcaatttcttggggccaggccggcaggacaatctcagcattttgacttggntgggggtaccgcacctgtgcgcctaatttttattctaacgacaatc

SEQ ID NO: 7845 - DNA, 1294 bp, Heterodera glycines
taatggggacgggttaggtgaggaaatggcatttgaacgtatttgaaatagattttttttttgagatgggagtgaaaatttaaaaaaaatacgattttatgcatctccccaggaggacccatcaacacttgaaattttaaggaaaaatagtaatttgtgctgaaattttcgattttttcttcccttccaaggctgcgtcatccaaattttccaaaaaatttcgctaagtttttccaatgcaacgctagtcgacaccgacggatccctccaattccaccaaaaaaaaattttttttttagaaattacgccgcaaaaatggcgtaaaaaaaggtcgtcgcccgggagaggggcgatacccctccaagccgaaatcctgtgcaaaatttgtttactatattaaatttgtgcaatcaaatttttagtaaaaaatttccactctaaaaaccataaaatgaatgaaacctcaaatttcgccaaaaaatgggatgaattttcacatataaactcatagaattttttgctgcaaatttggcatggcaaacctcaaaaattcggatcaaaatgctgacatagcgctcgcggaggcccaacgatttgccaaaagtggccaaaacgacgaccaaaagcacaatgagcagagcgggcgggaagaagaaggcggacagcaccagcagatgctcagccgtggccgacaacagcaaaagggacattgggagaagaagtgaagggaacggagagagtctaaaatggaaaaacaatgaaaaaaaatatgaaaattatggaaaaaacaatgccaaagtgaagggagccaaagggggaaataaaaaaaaaatggaaaatttgagaaaatttggaaaactatggtaaaagcgaaatgagtttaaggggaaaaaatattggaaaaaatagaaattttggaaaaactatggcaaagtgaagggagcctaaaagggaaaattttaaaaaatggaaaagtgatgggagtctgggggaaatgaaaaatacgacaaaatgaatggaatctaaataaggaaaaattaaaaaaatggaaatttggaaaaaatgaaaacgctagcaaagggcaagagggcggggggaggaaaatttgaaaaaaatcgggtaatttttgtggaaaatttatgtaaaaagagagagaaaggtgaaaaatctggaaggggggggggtagaaaattaagtcgttggctcctcacgctcattttaaaaaaaatctaaaaatgaagattttttgaccggaaaaatctgaaaattttggttaacgagcatagaggataaa

SEQ ID NO: 7846 - DNA, 1468 bp, Heterodera glycines
  unsure (1)..(1468): unsure at all n locations
tcaatgaatgaatgattagtattagtcagtaatnnatagggtggaaattgcattaaatacataaaatctaaaaatcgcaagttttttttcttcaaaaacagacaanaattaattattaaatacctaaaaaaatttaagctatttttaagggattctatgattatacatatcacgctttttggtaaaggctgaaaattagcattttttacaatggcaaatgacaaaaaattaaatttaaagaggtaatttggcccagaaaaattgaatttgatggaacattgaattgggaagccctttttaaaaaaattcaattttcctttcttgtggggagaaccttttgcaaattgaatcatcacttcttaaaatggaggtatatgagtttttatttttacgcaaaagcagaaaaaacgaaaatggaaaaaataggcagcaggccaaaaaaaaataaatcaaattcaaaatcttaaacaaaggtactttaaaggatgcctttttgaagcatcaaaaataagtttttgccggaggagtgatgaaaaattgttgtgaaggcagcaggagagattcagaacattgcccagacctgaacactgttagattcatcgtgtaaaaaaataaactaacaaaatccctgaatttttttgaaaattcggtttttgaggatttttttggaaaattatttttcgaattgggctctccaaaaactgtccaagacacataagatttccaaaaatcattaaaacaggtaggcaatacatgcctggggcacaaaatttcgcctgcccggcccatatgcattttgaaaatttgaaaaacatttatttgccactaatggctcgaccgctgtcgcgctaatcgaaatttcaaagaaacaattagctgctaattgtttccctgctcaaatttcgatgatgccttagtagggtcattaattactctattctattgaattgagagaatttaacacctcggcagtacattttacacagtttaactaaacgcgcccctttttaaaaaatgataattgggcggaactttgatgctttttgcttcggggcgtcgttcgttcgttcgtttttcagtcccccatttaattcgattaattaccatcatgttaaattactcctaatttaaaaaaaatgcatataaaatcaccaccacaaaggaataataaacatcaggccagcagtccaataataaaattccgattcatttgcttaccaaagaattttaattttgatgatcggttattgaatattgaccaaaaatacaacaaaatgaatccgtgggagaaaagcaaattttattttacggttttatgcggccacaattggaaaaaaagagaatggaagcaaagggaggagaaagtgtgtagcgagagaaagaaagggagggaggagagcgagagagagagagaaagagagagatatagagagagaaaattgaagaaagagaggtctaaaaaagagaa

SEQ ID NO: 7847 - DNA, 6371 bp, Heterodera glycines
  unsure (1)..(6371): unsure at all n locations
tagccacgttgtaatttatttttctgccattttcccattaagtggatggntattcattcaattttcgcactatacaattaaaaaaacattcattgttgccatttaacattattttttctttttgtttcttttgtacaattaatttttttattgtttcatgcggaacagaaaaaagacaaattttaattttttttataaatgcttgtgacaaacaatgggattaattccaaaaaatgttgctccgccggccaatgcttttttcctccattcttttcaatcattgacaaattaaggagcaaaatttgaaatatgtgccaagactcaaaacaaaagttatgaaggcgaacagaaagaacaatgcgtgggcctcacttgctttttggataagcaaaaaaaaggcgtaaaataaagtgccaagggaaagaaaagcgatcgtcaaaacgcagttgcatctccagttcggacgatgctcctgatgctgaacagctccaacttggcttcgtccggcttgactttgccgtggttgctgaacaccgtcaaaactgtgcatgcgcttacggcgtcgttgtgtttgttggagaccagcagtacttacagtaacctaaaagaatgggtacgaacattgtaccatataattgggtgcgaaaaaaagaatttctcatgagaatggagggaatctaatttattgttaattatttcaattactgttgccaatgcacttcggagaagttctgtagccaacgattgcatatgttttgcgatggaaatttggtgccgaaaacggcacattttttgattgttgactgaaaatttaatagaaaaattgagagaaataaaaacccaaaattgtctaaatttacctgattcaacgaacactttaaatgcatcgaaaagattcttaagaattttgtcgctttcctttccaaaatattttacaaatttatcattggcattttgaacattcgttcgaatattttcttcatttattttcatctcttcaaaataattggcaaattgaattgccatatttttcgttttttcttccgttacttttaaaatttcccccttctccatttctttacaaaaagcactttggatttttcctaactcatgccatttagatttttcaagttcaaaattgtttttttcatttaaatccaaaaaatttgcacggcacaaaaagtgtgatacacatttttgtagcaatttcattaataaaagtttgttttgaccatcatctttcaataaaggaacagccaaagaagccagttccatcatttccacagattttgcatctaaaattaaacaatcggagacggaactctaaattaaaagctaccgctttgtgcttggcaaatgcttaacaaactcagcaataataaaacaaataaatgcatttctatgaaatgattaaaaaatatattattttgaagaaagacttcttgttgtttatattttattgaacagttattgaaaaaacacatccctaaattacgtggccacgacaatcggaagtgacaatttggttataatttttgtgttaccgccggaaaataagaaaattttaaatagataaaaaaataatggagattagaaaaagctcaaacactgcattacaaattattaaacgcaatttaaaaataattgataattccaccaaatatattttattgaaattagaaaatttaattgattgaaaaaatgttttcgatgcatgaagctggaagtttggctcaggcctagagaatgacaaatcaacctttttattgctttttgcggagtatcaatttaaatgttgatatttatttaaatcaactaacattatgccatcaacgcaaatatcaacgtattttttaaaaattacgataattttttaaaatttgtttcaacgggtaataattttagtgcgagagataacgcaaaaatgagggagtgctggatctcagtcccagtcatacaagacatttttgatgaaggagggtagagaaaatatttccaatagagagtgcaatgggaagataattcacttctcttcttcgctgattcttttggtaatagacgcagattcctcactatattctctgttctctctcggtcttaaatctcttcccataacactctctttttaattaatttttctttattcttcttcaccaaaaatgcttttgtatgactggggctgatttttataccctctcatttttgcgttatctttctccccattttattttccgccaaaagtcatttttaaaaaatttgctttaaattaaaaaaaattatcccaattttaaaaatagtgttgatattacattgatggcataatgtattttgatttaaataaatatcatactaaaacaatgttcgctaagagaaaaatgtctcaggcctcctcctgtccttattgttagtaattatgtaaatacttgaaaaaggctgatataaaaacagaatcgattgtaagacccgaatgtcgggattaggaaaactcggggttcgagcttcaagcatatagaaaaccatcaaagtaatactttattattagttaactttatatcattacaattaaattattaatatgcaaaaataaatgtgtttttgtcaaaccaaatttctctaagaaaacaaaaattgaaaaacttattgagaaatttactattttcttggcgaaaaatattgatttatcatcaaattaaatttataatctataaaaaataataatctttattgatatttagagcggaagaataatttaaaagtaaaattttatttgaatttttatcataagataagaagtatataattgaaaaaataaaagaattttgttgaaaaattgcattttcaagattaatcatttttaaacaagcccgtgtttttcatggacttggattttcctgaacgtttgtccacgaaatccaggttcaggctttttaaaaatgcccagctctactagtgatttaaaaaaatattatgtaaaatccttgaattcaaaacttcatattcatttttttgtctttcattcgttcaagatgagcaatggtcaatcttcaatcacccaaccgtaaaaatatttgaaatttattatttagttatattttcgtaattttgcattaattcgaataggtcgtgcaaatccgatatgctgccgaacgatgaatatgaaaggtaaaacaaaaataatagaaagaacttttgcaattaatgaagaaaaaatatgttaattaagtaaatttttgaatttcaggcttttcccgaaaaaagttgacaaatatttgtttccgcagagagcaaaatgtgaaggaataggcaatgaaatggtactatttttaatggagttttaacgtgatggacttaggaaaaaagcggtattggcaccatttggggagggggactaatgaggagaatgccccccccccgcaccttttaacaattcaaagtgttcctggaccatttgacatgcttttagttccgttttgccgcattgtacggcattggaaaaccgtacggacggaagctaattttcacggaggtcaaaagatgcgaaaagtcacaccacgcaatagaaggagagcacgagatagaggagctcttcccggtgttcgccagtcaaagaaaatattttgtaaaaaaaaattaaattcattttcgttaagactttcggaattcgcctcagaatccgacggggaagcaaaatgagacttttaatatcgaaaacggggattttggatgtcacaattacgaggcaccacaaaagttggcacagttttttgtttccgactcttttgaattttgttgaatttaagatttgcaatttcaagaatcaaagagaaatacttggaattgaaggtatgtaagtaatttatatttaaaaaactttttctcataaaactcattccttattttgaggggtagcttgtcttataaattacaaatattttgaaacgcgaagaatggaaatgcgtaaaagttttcaaattgggcatgaactctgtaaaaatgtgacggcattcaaaagagaattgtttgggttggtattcaaaacaaatattttaaatcactgcatacagtgccggaaaaaagtttaaaaatttttaaatttttgtattttacttgggaacaatatagaaaatggtttgttttttccgaagcgcattttgaatggtgcgcatacgtttgatagcaaaaaagtgaagagggaattaaaattcagtaaatggcaatgagcttttgtttaacatagttaattctttattttcgttaaacaaaacattttctatcgttaattgttcccaagtaaaatacaaaaatttaaaaattttagttcgttgcataaactttccggcactgtattttgtttgtaattatacgcacataaattacacgattagttgaaaatgtgtttttctctttgcttcacaattatgtgaaattttcaaaatattcgttagtataagggctctaaagcctataaaatttacaaaattttcaattatgcataaatattataaatctgttcgcattttttgtaaaattcttttaaaaaaccatgccaaaattttacgtgaaattttctagttttgaaattaaatattttggaattttgcagctccttgtaaacttatttcttgaagatttcaaatcatttctgtcattaataccgactaaataatccactcgctcctttgttgcctctttgtaaatttagccctgtttgcacataaccgaaaattggtccaactatccataaaatttatggcatataattacaacctataattattcgtttttaattatattttaaaattttgcaatttaaataaatttttaaccaatgataaattaattcattaataaaatgctaaattaataatgttttttaaaatttttagagatgatcaggcgcacaaattttgcgtgcacaacccgaaggggagattttgtctcccggggttgggaatcgaaaaaagattttacagagcaaggaatcaattcggatttgaatatttaaaggttgttctaaatgtcgaattgcatctcaatattattaatttaaatttcagaaaaatttaacaacatttccgtttccgtaattttaatgcgagaagataaacaatttttgagggatttaacatttaatcgaaaggcaattagcattgttgaacatttaaattaatttttattttttgcttttctccaatgtttacgtgccgaaaccaatgtttagaaggaatgatttcgcttttggcgttatggcatgcgattctttgctgattacggcacaagtgtcaacttttgcttttgtattgcttatttgatgccggatgacgcaactattttttacaattcgaatttccccaagtgtcagtcttttttcatctttttcaaaatcaacgagcataaaattaattgtaaaggctgtgaaatattgaaaaatcttttggcttcatttgaatttagacacctgtagccgagaaggttatttgcccgagtgggtaccgttacaaatgattaacggggcaatgactctcgattaaaccgcggacgcaaatggaatatctgcaagaaaacgagataattttcaaattggatttcattatatctattgctgaccatttataaattaagtgattttaaaaaaggttttgtttattgttttaaaaagttagaggaattcgtttagtaatctttttaatttaaaatttctgagttttgagattgtacaaaaaaaattaaagaataatccaacattaaaaaaaaaaaattattttcattattttttattaccaatgatttaaataattgccttggacagcgcccaaaaaaatcgcatttaaaaaaaaaattatataaaattttatttatcatttttaataaatttccttctttaatttctttgtttgcttgcgctgtttcctttttctgttcacctcaattttttggttatatacacacattaaaattgccatttaattgctgctgtgtcttcgcagtcaattttgtggtgactgaaaatgaaaaactcgaaatgtttgttgttcttttggcaaaacaattttcatataaatttactcaattgatatgattttgtttattgtaaaatatatttattttttatttaagttaaaaagcttacattttatttttgtttattaatataaaattatattttttctccaaaatttgagaatttattgaaacttgagaaaataaaggggaccagtaaaagacgggaatattgaccagagacggcgcaattgaaattttagtaacttcgaattttctcttaaaaaattctttcaacaaattttttttatgaagtttctttgaaatttaatgtttttattaaaatttgcaaattcctttaaaatatttaa

SEQ ID NO: 7848 - DNA, 4446 bp, Heterodera glycines
cccgtagctgaactgactatagtttctaaaaataccgtaataggacggactaaaccgggacattattcttctttcattactgtaattgcactaaacaaaggtttaagtaataaaatgataattctttgctccattaattaaatagtcataaccaatttcaagtagccaaatcaataacatactgtactattttacagtcctcaattttctgtcgatggccgcctaccgaatggagcgcatttattcggtgatcggcaccattctgttcatcgtggcattcatttgcatggtctggtaagtaattagaggattaattagggaagctgattcgtgccattttttgattgaatttatttttaaaggtatctgatcgactatgacatcaatcgtggacagttgatcgctgctacggtaaaaataaaaaattaggaaatttaattatttatcactgcttttaattttcggttcaataaatcgtcataactttttgcaaagtcaaacgaattaaacaaacattagtttggtattattcggtagcccttaagatacatattctctatttccttgaaaattaaaaaaatgttatcaccttagaaaaaaattgttgtcaaaaaaaagttagacttgatcataacttttttgaaaacaatagattttcttgaattttgtgcgtctgttgaatgataccaaacgaatgtttaatttggtaaactttgagaatgaaaagttaagatgatttttttgtcgaaaaacactaagagtcggggcagtaccagttgggttttaccgtttatcaacagtttaatttttgttgaagattagctccaacagcccaaccgttagaatttttttagggggcagagcgaaattaaaaaaagtttttttatggccattttttaacctaattaatggttgccctcccccgcaaaaggtgttcatcggcatccaaatggtgctgttcatctgggactatcagatcctgcatggccaggccttcaactgaatgaatggatggatggacttcttcggtcggaaatgaatggagatgaaaatggcaaatgatggaattttgaatttttttttgcgctttgatttttgctgttaaatgatgaaaaaggcaaaaattcccttccctaccctcctccctccacccaaatcgaatttgtgcgcttttacgaataattttaggtaaaatttagccgaatttggccattggcttggacattaaaaatgatattggtattgagtaattccttatgtgtattcgtcttaaatgtgcacagattccatatctccttctcatcctcttgatgaatttgtttttatactgtcggctaccgtatgccttcgaccttatctgaaaagtgcaaattttgctttaatagctaaaatatcggccaattttttgcttttctctagtcaaagccactttccgataactttcaactgatacggtagttgtgcggtggaatttatacagtctgcccctttcaacaatttctttgtcttcccctttaattttagagcattttcgcacacattacacaaattcttttggaataaatatttttaaatgaaacataattgtttgcaattgtacatataattttattgttaatattggtttcgttatcgaactgaaaaaacggggaggatgctgagaccacacaatgatgaagcagaatcattactccccctccccccaccccggcatttttacttttattagcaatttttgctgatagccgatcatggggacaattaccctctccttttgctccccgcccccggcgtcttttttgcatatattgccatttttttttgacaaccgaccccctcacccaacccatcccctcgtcggtgacctcactttctgcttgccatgtaccttccaacaccattggacgcgaacgtgtgaagcagtgatgccaaccggaccccgagacccgaaacccgaagtttttctcaacccgaaacccgaattcgaaatgggttatttttaatgttttaattcatttaaaagagtgtttgtttttttaataaaaaataaattttttaatttaaattaaattattttttgtgaaaaatgttttaaattaaaataataatttatttacttttattaaagaactcctgtattttttaaattataatttgtaaaattaatttcaatttaaataaatattcaatccttgtacatttcaaactttctttttaattaataaaaggaataatttattttatttttaaaaatttattaattacattcaatattaatcttactttttaataaacgatttcctttatttaattttaaaaccatgattgtaccctttttaaccattattgtaccctttttaaccattattgtagcttttcgacagtggttgtacctcttctcatcattgttgtacctcttttaccgtggccatcagtgatgccaacccgaacccgaaacccgaaacccgatacccgaaatccgaagtttttctcaacccgaaacccgaactcgaaatttttcgagtgctcgacccgaaacccgaacccgaaatttttctcaacccacggcatcactggtgtgaagggcaggcgacctgtgcccccgcccgccggcggggaaatggacaaaatagaaaaaatcagcggcagagggaggagggattatcggaaaagttaaaaaagtgcgaaaggaaaagcataaatgtgggaaaacattttgactgacaatgagtgcggaataagtgggagagttacttgatgaccccttttacaacgaaaagcatatgcctaattaattttaataatttttaattgttttctctatttttcaaatttaaaaaggcacagttgttgattcaaattatatagaacaatttttgaaacatttcaattagtaatgcgcgccctttcaccaatttttgcgctgcttttttgccaaagtgcattttgcaacagcggtaataaattgtttttttaaatttaaatgatatttcaaaaattatgcacttgcatgcaagcgtggtgtttttacagaggatggcgatcttggcgtcaaaatgcttggtgccgaacaagcaaaaggtgggcctttaaatgcagggaaggaagcataggtgggggattggctttgtatgctcgagaccaaaagattctcgacaatcaccgaataatagattttttgtcttttttactcaaatcccatccctcgtctaagaaattttccgtataatgtgcaaagatttttttcaagaaaaactttcgcgtttgaatttataatttttcgcattgttttaattaggaaaaaacatttattaatttaaattaattttatttataaatctttaaattaactattttttgtcaaaattttccgccagaaaaattgggttaaagaatgtagcaataacaaaaccaattttcaagaactgtccttgcattcagtgacggatttgaaaacgaatattttgttctttgagttagctcaaaaattttaatacatcaaaaattacttataatccagaactgctgaagcagccatgccatcctgggttgaagcaatgttgtgcccttttctgcccatcaggtgggcttttcaagaccgagatttgaaatcagctgggccgggccgggttgacattctcaaaaacaatttgttttggtttccccacacccggccaatctggatttttgctaaaagcacagggatggcttgccgggccaggtaaaaaccggtaaaggatctggcccggctatggggagggatgtccgataaaattttttcaatggaaaattgaacggaaaaagctgctttgagaaaatttcatatcaacttcgttttttgtatttttatttatgtacgagtggagaccgcgagaagtcagacagttctcatacaattggagtatacaaatttttttttaattttattaatcaaaattctacaaattttgaaaaaatcccggacctatgggcgtccggccaaaattaggcacaaaacggccttttgtgaaattcaggtaaatacatttaaaattactgggattgttcggacggaagcatttcggctgaagaaaccgccaatgttttgggactgaagccggaggactggcactgtgaagcgcacttctcgccgttggtggaaagccgaaatgaagagctctgagaagcgatagcatggattggcattttgcaagaataattaaggatttttaggtttttaattatttaaacggagaaattgctatttcatgttcaaaattcacgaatttaatggattttaattttttttgataatttttatgtctttcattatccgttcgtcctgttatccaacattttttcttaaagtttttgatgccatttacttaatcgatctgctgctatttatggaatatctcaaacatttacaaatctaaaaagaaatttgtttatttaaatcttaagttc

SEQ ID NO: 7849 - DNA, 1173 bp, Heterodera glycines
ctcaagaaatggacaaaataaaagcatattacagctctacagatagtattcgtagaaattaatttttattaaaatttcatgtaacggacccaaaaagaggaaatagtacaaaatattatttcgttctgtatgcacttaaaaatgaaaaaagaaaaaacaacctacaattttatggagaggaatcgctagtttttattattatcgacgcttaatgcaaatattattccatgcggatatcatgttttataattgccatccatttgctaaatttgaaaaagttgttaagcatttgaaagcttctgggccaataattaaaacaagccgatatttatatagttattcaaaataaatcactcctaaatagaaatgtgtgtgcttattagtgaaattactcaagaaatggacaaaattaaagcatattttatttcgttctgtatgcacttaaaaatgaaaaaagaaaaaacaacctacaattttatggagaggaattgctagtttttattattatcgacgcttaatgtaaatattattccatgcggatatcatgttttataattccaatccatttgctaaatttgaaaaagttgttaagcatttgaaagcttctgggccaataattaaaacaagccgatatttatatagttattcaaaataaatcactcctaattagaaatgtgtgtgcttattagtgaaattactcaagaaatggacaaaattaaagcatattacagctctacagatagtattcgtagaaattaatttttattaaaattcatgtaacgaaccaaaacgataaagtaacaaaatattatttcgttctgtatgcacttaaaaatgaaaaaagaaaaaacaacctacaattttatggagaggaatcgctagtttttattattatcgacgcttaatgcaaatattattccatgcggatatcatgttttataattgccatccatttgctaaatttgaaaaagttgttaagcatttgaaagcttctgggccaataattaaaacaagccgatatttatatagttattcaaaataaatcactcctaaatagaaatgtgtgtgcttattagtgaaattactcaagaaatggacaaaattaaagcatattttatttcgttctgtctgcaatgaaaaatgaaaaaagaaaaaacaacctacaattttatg

SEQ ID NO: 7850 - DNA, 989 bp, Heterodera glycines
  unsure (1)..(989): unsure at all n locations
cttaattncaatcagtaaaatntgctaataggttaaaaaattgcaattaaaatttaaaaattgggacgaattttaagtatgaaatgattaagtgcaattacttaattatttttcaacttgggtgggatgggtgaacttttaagcgtggataataataaataatccctgcgaagtgctaattccggtgggacgcttttgttagccgtgccattctgcgaaataaaatccaaaaaatggaatggcggctacgagttcagcagagattaaatgcaaatgttttggatggtggtgagattaaaataacaggcggagcttttggaatgggaaatatttgcaatggcatgccatttagggattgaatttaaaaattattaaaataaaaaataaatacaacttggattaaaataaatgccaatttaataaattgaataggttctgtccagcttatgtacgtaaaagtctgtctgttctatttttggtgggtcagcaggtgatacgtcttgttaaacttccccccgccgacagtaccccgggcgtcgcatcagccgggccgaggtgcgccgctatatggcccgccaccgcgtctacaccctacaccatcgggtcatgtccgacgatttcgtcgtctgccgacgcttgcgtcatgtctgcataccgaatgtcaagcggatctgcactatttcccggcgctgaagcggcacaatcgcgtccacgcgtacctgctggagtgtgcggacacattgagccgtcaactgtttgtggagacgttgaagagcaagcgctcctccaacattgttcaagctattgagaaaatattccgccgggttggttatgtgccatggaagctgatgaggcaccgggcaaatagttcaccgcccgccccattgtcacgctttttagacgacccagaggtgcaactccattgcacgcccccctcacctccccggcctgctcgaattgcggagcgtggcatcacaaccatcaaggtt

SEQ ID NO: 7851 - DNA, 2310 bp, Heterodera glycines
aatccaggtccaggtccaagttaggcatgaaaaaactggatttcctggataatattttagaatttgttatttcgagtgaccaagtttatttaaaattatcaaaaaatgatttaatagatttgcaattagatacttttagatttttcctaagcaataattgattgattttttcaaacatttattttctttataacatatttctaaaaaaaaatccaagtccatgccttgattccggccatgataagcctagattttttctggacctgaatattcctgggttcttgtccaggaaatccaaatccaggtgcaatttggaatcaaggctcaggtccaggctttttaaaaatgtcgagttctaaaaatggcatattaattaattttttaaatttttttattatctatcgttgtcaaacaataataattattagaaatgagcatttcattaatttgtcaagaaattaaaattatttttgaccagctcaatctctatcgaaaaagttaattttaaacaagcattcaactttgaattgatttggctctttccttgcaaaaaatgtcgccttcttcgatcagcaacagacagacaaatcgtacaaaatattatgtctcccccccgccactcattcattggccgtcgtttgttgcgctgctccatctccgccattcatttggcccattttattgcctttttgtaattcccaataattggccattcatcggccccattttttaggctttgctttttttgtttgctgctgctcgttggctcacttccctttgatttggccactataaaaggtgtgttttgtctgccaattgtcgcattcattccttcgtcctttgatcaacgattatttggcaatccgattgactgactgaccgacagtccctctattttcccactgatcatccgtccgtctatctgtcactgatcgaatgtttccccaatctctttctctctccgtcctttggcttttggcactgtccaatttcgctaccgcttcgggtgccgttcaacactatgatgggttcgctcctcgctttatctttgattaaacattttttctttcataatcccccctttcccccgctttctcagtttccaattgcttcgtgtcatcccacaaacattagaacagctcgctgcccttcgcaacttcagcgaacatgtcggccttcagcccaattcgggtgccgaagtttggaactttcgccctttcgttggccaaccgtccgaattttttgccgcgccggacaatgtcaaaagagtcaccgacttttttgacgacaaccaaatcccgaacggggttctggtcgaaaattttggaatgtaatgggaaatcgagaaatagtttattttctcgtctttttagacagctcagagaggcacagagaaaattcattcttcacgacccggcggagagaattcgaagtccgtccgacttcgacttgaatcgtttccaccccttcgaatcggtcattcttttcatctgggtttaaatgggttttacccccatttaattgctgctccattcagattgagagttacctccgtctgttggcccagtcccaccccaatttcatcaaattcgactccatcggcaaaacctccgagggtcgtgaaattcccttcctgacggtcggttatttcatcgaatatttgttttgactgtactcgtttgtgatctcgagattctcgactctcggattttcgccatttctcggtctaatttcttggtctctgttttgcgtttctctgggtatttcttggtctcgggatctttttcgtcttgtttatcaagtcagtctctattctctgattttctctgttcttctgggctccgcttaccaattttttgataaatttccgactctccttcaccccgctgttatccatggccatttttaagcctcccccaaaaaatgcctttcagctgggctacccctcgaaaacctccaaaaagccggctctgttcctcgatgctggcatccacgcccgcgaatggatcgcgcccgcgatcgcccttcactttatcaacgcggttcgtttcaatagtgtcttacctttgctgattcgttgtccgcttcttcagctgatcaatgagcccaaattccattctctgctctccgacatcgatgtgcacgtccttccgtcgcttaacccggacggatacgctcacacgtggaccaaagacagttcagagatttaaataaaatatttgattaggttcagagatttaaataaattataaaaaatatttcatcaaatgtttgaggactttggagtcggacgcgttcggggccaataaa

SEQ ID NO: 7852 - DNA, 2016 bp, Heterodera glycines
atttacagggccaagccggcgttagcaaatgcccgtgcttgtcaaaaaatgcttgtgccaagaaacaaaaaagaaaattttttgtttagccaagtgtacaacggggagcggcctttgtctgagccggaatgtgccaatttggccaaatttatcagtgccaacacgggcactatcaaagcgtatttgactctgcacgcgtacagcaatttgatcatccatccgtacggattcgaaagacatttctacccggaaaatgtggcggaaattgtcagtgtgggacaaattaataaagcgaaaatgaacaaatttaagctgcggatggcaaattcaatggcaaaagccatcgttcaagcggggggagagaaattccgtgtcggaagtgcgccggacattctctgttagtgccatttgtaattactataactaatctaataattaattgtctattccgtagatatggtgtcggggagcagcgacgattttgcacggagtgcgggcattaagtgagtgaagcatttgactgattagcaatgctaatgattgtggtactgatcaggtacacgtacacaatggaactgacctcgggatggtacggcgaccgatacgtgggctttgtgtacccggaagaagggattagcaaagaagcggaacaggtggacaaaggagggcaattagaaattaattagcaaaggaatcaatcgcctcccgcttaaggtattgccggcatttttgatattggcagagcaagtcaaaagtgagagcagcggaaaagaagcagaagaccaaaaaggcataggtggacagtgatcggcggagggagcgattggacagaagctgatcagcggcattgatcaaagggatgtagcatcaagagatcagcaacaaacttaaaaccaattagcttggaaaataatagaatagttaattcacttggcaattatttttatttattgtaattgtaattttccctctcaaattatgcttactcagaaatattgtagcctatttcatgtattcacatttactagaaatgacaactctgataaaattagttttaaattaattttttcttagtcttcgaaaatggtactcatttttcggtgcttaattcaattcttaagttttttattacttgtttagttttcagaatggtttgaaaggctctcgtctgctaaaacaattagtgtttcggtactaaaaataacttaaattcaaaaaatgttttaacaaatttataattatcgattcttagagggtggagcatatttttatttttaatgtatttaaaaattttggaaataatataaaataaggaaggacaaaatggggacccgttgagttttgattttgggattaattccgaaaaaataaaaataactctaaaaactggagaccaataattaagcgtataatttcaaagaataaatagtcaaaaaataccaaaacaaaaattatattccattgccaatttgtccatctgttaaattattataaaatatttttgtccttgttttattttccacttttgcttattctttttcttctcatttatcagcttcttttcagcctgttgaactgctcgctgctgtcgttggggccggtgaatttgttgaattcgaaactggcaatatgccaatttgtgatgaagctttgttcccagcagcagcagaaaccaacacactaaacataatgcaaaaattatgaacataagctgatcaaataagataatacagaacagatcaaaactgggctgatcatttcgatcagaatcaatgagattagcggatattagtaaaaaaatatttaaattaaaattagagctgaagccgggttgggaagaatcacgggattttgatccccttccatttttcatttatttttaaatttgcctttgattgtttaagccatttgctggtgccattccctgctgtgtttgcgttgttgaattggttgaatttgcgttaattgttattgcatttcccgtggctaatgtggaatttcctgctgttattgacg

SEQ ID NO: 7853 - DNA, 1649 bp, Heterodera glycines
ttgtgcatatatattttttaagaattaactttatttaaatattttttattaaaaataaaataatttagcggtgctaattgtcagttgtttcataaattgttggattttttgtcaatgaaacacacaaagaaataatgataaagcacggattttgctacttgaaatggacccgtcgatgctccgattgtgacatttgctgggcccgggccttggacgagcggagtttgttggcacattgtcgtcaaattgagtggaatttggtcaattttctggcatacattcaaaaccacaaatggacttgtccagtaactgaattaaaataactattttaattaatagagatcgtttttaataccaaaagttgttaaataaaatgaaaaaaagtaattcatccatttttgcaaatcagccttttaccagggcatattgcttttcttgtgtctcatattttggcaagacgagatatttattttgtaaattctttcttaaagtaaattacaattattattattgtgaatgaaattttaattgccctcgtttttttaagtattgttgcaattaatttgggattaaaaaaactcaaatgatgaaaaatgcgccttttaatagtaaaataaaagtgatcaatgttatattagtttatttgattccgttatttccaatttttacctgaacattaaggaaccattgcttggtagtgaaggcacaacatcactaattagacaagcgtgaagtgactgattaacactgttgcttgacgcgatggcataacttccgtctattaaaaatattggagattcgaattttaaaaagtgattcttgacttgcatttggcattattccccgtccgcttattgttggatcatcggaaattatccgtcctttttatgaaaaaccttggaccttcaaacatttttaatggttttaccaaaacatgaaaaaaaaaattttatttaaattaatgctttttccgtgattttcatagcaaatggtcgtttaaaaagaaggtttaatatattttcatggaaaattcgtcgaaactttttgttttcgttggacaccaataaaaaaatgaaaaaaaaattctgatttttgagatagcgaaatcccaacttggcatcactccagtgcccgtcgtggtcatcatctgatcactgcttatgtttgccgaagtgcgaaaccacatcagctgggcagcgggcgtttggcaattgtgccatgcgcaagtgtcgtcgaactccacgcagttcaaatttggcatttgttggcaaaagactaaaagaatatttataaatatttatagaaaaataataaaacaatgttaatgtgtttttaaatgattattgaggtaccttctttaccatagtcgaacacacaaaattgtgaaacaattttaaataaaaataaagaataaaatttcatttttaaataaatttaaccctcagtaggattctataaaaataataataatatcaacactcgcatttgattagtgttggatttactcaatttaatgatgtgcgcaataaaaggattatttatagaaaaaaagaatttattaaaaagaccaaaaacttaccttagtattataacaaaaaatatattgaatgtacactaaatggtgattaatatggctgtctaattatttg

SEQ ID NO: 7854 - DNA, 3048 bp, Heterodera glycines
ttctctctctcgctctctctctctctaactttctctctctctctctctctttctctaactttctctctctcgctctctctctctctctttctctctctcttctctctctctctctctctttctctctctctcttctctctctcgctctcctctctgtctctctctctcacgctctctctctttctctaacgttctctctctcgctctctctctctctcccccgccctctctctctctctctccgctccctccccctctcgtgccctctctttttcccctttctttttttctctctcttcccctcccctccctcacatcttgtccagcatgaagcctagctagatccaggtccaggttgagtgttaattaacacacgatcatcccccgctttccaattggattatccttggaaaaacaaaatgccatcattttttcttgccaatgccctcggtcactctctgcctctgaattttgaaccaaattttccgccgctcgaatcattttcaaattcagttttttccgcctgaactcaaaatttgcgcgtccgtcgagacgaacaaaggcgcggcggcgctcgcgcgcgacacgcggcgcaccatctttctgaacgcgagcgtgcagctgtggctgcgtccggtgggctctggccagcggtgcactgtggagtatacggtgggcaccacttaagacgggttactgtaaaaagtggcattttatgctccacgaattttggaaactaagctcttttatgcaatgccttttgccccccccccagggctatcagggcgagtatcggttcgcgcccgacttgggctattaccagccgtgccaacggagcatcgctttgctcatcgagcggctggtcgaagcggacgagcggggcggcgaccggtaaaagccgaacggacaattggaaaaaaattccgcctgagtttttaaataagcacttttcaagaatggcgttgaatttaatggatgggttcaacatttaatttgaatgccgtaaattaaaaataattggtaggctaatctatcgcccccggggcacgtgctgtgctgccccccccccccccgttggacatgggcctgatttggactaatttgggttcaataatctatttaattttatacagcggcaacagcagcaatgatcaaatgaagcggggatggcaccgccaaaatcagtggtggccaatcaatcaacaaagtgatgcaaattcggcaaccgccggcaacccaaactgtccgatcagagccttacccggcacaattcgggtgatgcccaaaagactgctaattaatttgaatgaatgctataattagtggtaatgttggtccgctgttaagtcgctgaacgcgtgccaactccaagccggtcattggtacgaattggcatttcgcagtgccattcattttgagcagcttttgccgactcgacgcctttaccagcagcattgggccaaccacagcagcaccttcgtgttcaaggtgaacacaccatgaaataatgatggcattggcactttgcctttttggcacctattgaatgtgaaatgatattcaactaaaaccctttttaattgtttcgtagccggagcgtgaagtgtggcgcaatgggaggtgggaaaatggcaaacaaagtgttcaaacaactatattttaataatttaaataaattaatttaatactaagatactgtatttaattgaaaataaaataaaatccaatttattcttttaaacaattaatttaatttttgaaatagtaaaattaaaaatgtttaaatttttaaaattattctattcttagttttaagggcaataaataaatttataataatattaaatatttcattttttaataaatgacccaataaatcttgaaattaaatttattgaattatttttcttttttccctttttccagtgaactctcttggcttcaacgactcctccaattgcgtgtgaagttaaaaaaacaaggcttaatctcttttacaaaaccaccatttttaaaggatgaaaaactgtgaagctgttcgttatctgatcagattggacgagcaatggtccgccgttgcgttgcccgtcactgtgttcatcgactaccaagtgaatgaataatgaatgattgaatggttgtggaacgataaaaaaacagttttaaatgcatttggtgaaatgtttgaggacaagggccccgagggcaattaattgatgacggggaaaactgctggccaaaagacaacaacaatcataggtaggcattgttccaaagctccaaatatttttaagctgttactaaaatttttttgtggctggatagagaaagcatcctttgattcttaagaagcgcttcccctttttttgcataaagtgagaccaaatgccgtgaaaaatgccaaagtattattttctacttcattaaaaacttggcattttctctcactttgtaaaaagggaattcttgaggaccaaaggattatatctctctatccatccattaaatttacgtaccgaagaaactccacggcggcccaagacacttttccttttttgagcagagcaatggcaactcgtacaaatggcaactcgtattttacaaataatgcctaacaaataaggtgcgtgagaatgcgtatgtgaaacacgcgcggcacttgggcaacggcactctgttggacggatggttcaccggcactttccccgtctggcggacgcccgacctccggacgcacgaactttgtgtgcgggtgcgtaccgctgcgtgactccggaggcagcaaaaaaaactgtggaaaccgcggaattccaacctagcaaagcgacggaacccggcccggttccaccccttcttcggcattttgccgactcccggacaatccgtcagcaaaatttatttgtaaacatcagattttatccaaatcatatgaaaattaatttaaatcgctaaaaaatgaattaatgttttgtgttaatttatttaaaaaattatgaaagaaaataatttttaaaagaattaaatgattatttctatagatgatccatt

SEQ ID NO: 7855 - DNA, 2867 bp, Heterodera glycines
aattgtccactcactgacagattgtccaatgacggattgtccggacctcatgccggctctgctcccaaattcccgcccccttttttcccccggatgaatctaaattggcataatccacctcccgtgtcaaccctgtctaaaccccgtccccccccccccccgaaaaaaacagttcgcctggccccgctcattgaatcggcaccgaatttgccgcgtgtttatgcacgggcgctcctcgctcgactgcgacccgttgtcctactataatctgtacactacggtagtcgctgggtctgccgaagacgtcattcgcgtgaagaaccgccacccttttttacttacgatttacggcattttgccaaatgttcttttcccatttctttcaaacaaaatttttattttccccaaaatttaatcaccgataaatgtttattacttcgactttttggcgatttttcccctttttaccgtcataacgtaatctgctgcagatctatttccgcagataaacggcagattgtcaaaacggacgagacgcttcgtaatgaagaaacattcaatgaaagaagtaaataaatagaacattgtacagcaaaatcaacaatttacaatacaatataataataaaagaaaataactgatgagatcgtttctaatcatcagagccatcattcgcattcgacgacatttgccgttcattcacatttttcttagctgccgacaatttgtccaaattcactcggccaaataacattttgttgtagaggtgaatgatgcgggcctttgctctgcgcggaaacattaagccaagcacaaaaaacagcacaaatcgctgcacaacgaaaccgaggaacacctgcaaatggggagagaaagtgccattctccgcgactgatcaaaatgccattctccgactgacctgtagcagaaacatcagaaccagtgggcccatcagataccacgcgttgaatgtccaattgggtgcgttcggttgggtcagacagtgcaaattgtccaagtctgtgtcgaggtccttggaatagttgaactgcaacacgttgcgaaggagttcagcaactgcgccagagccatttacaacctgcggaggatggaattagagcaaaaatgcaaatcccaagacaaaaccactgacaatgttcagactgttgccgcccttctgaccgcggagaatcttcccatgggtgaccacaatttggaggaggcgaaagtaaaagtggtcgaccaccatcacaatgacaacgataaataccaaaacggacaaacggacgaaggaactgatcattttctttgtctcttccttgcgtggcaaactgaaaaaaagtgtaataaaacaaaagatggagacgaagcggacaaatgatcattcgtatttcgtacccgtaagggctgatcactttgttgtgctttttctcgggttttcgcaatgtgcccagcgaaacttttcccatttcatttctttttgcgtcgatgcgccttaaatttaaaaatgcattggaatgaacggaggagggagggaccaaaagtaaggcgttgtgaaggaattgcgaaattcgatgtcgttcaaatagctgagagtcgttttcacacagtttttgaagatgaaataggtgaacagcaccacaacaaaatccaacacaaggttgaacgtgcccaaaaagaccttaaaaagacaaaaggattagcattacggctgttcacatataaattcaatggattgttcagacccgtaaccataggggggggggcagttgcccacaaaatgaatattcaattttcttggttaatttgaccaaaaatttctaaattcggcgcccaatgctacccagctggatcccaatttccccagttttttcaaaattagctttttcccatagaatttgcctgcagaatcttcacgtcgtgctccagctcactgtgcagttgactcgtcgaatatccctgctcaatttcgggctgttccaccgcttggaaatgcaactgaaaaatgtaacggcgcaaaacaattaaaaacaacagcgaaaagcgccgtacgttcagttgcagttggcgttcgatctgtttgctcacattctgaaggccgtacatttgtccgtccaattcaggcgtgaagagcatttcgtgttcttctttgcccgagtcagtgctttttccgagttcacaaaatttgacagacatttcgccgacttttttggccttaaaatggtgggaagacggcgcatggcgtcgcacggacaaaaaaggaaaagcacttggcataagctgagagcactaatgcgtgaacaagcgaaggaatcgagtggccatgggatggcatcgtaacagagactctttttgaaacagacaaacaaaaattagcagcgaaacttcatgctcggcgggactaacacctgcgattgttgcagccgtttgtggcacgactccaccgaactggcgtaaatgtatttgcaacggcgttcaaaacggcgcgcaatggagcggccgagttgcgacttgagccgtttccaggccggcttcgccgcgcggtcaacagtcccgacggaagggtcttccccctcagtagacagttgacggtcggcaagtttcttgaaaaaattctttagtaacattgccacacaaaaaggacactcctcgcccgtgagccctcacaatcaaaagcaatcacttgggccgtgtcaatgattgctgccaaatgcgaatcctcttcgctgtcctcctccacgtcgtcgtcaaagggttggagcaacgacttcagcatgtggaccactttacttccaattgatgtaacctttcctaattgtcggggaaaaaaacaaacaattgtcaacagcgatcaaaaaaagtataag

SEQ ID NO: 7856 - DNA, 6972 bp, Heterodera glycines
ctcccccccccccccgcggactgtcgggcaaaggatgcattagcacttattccctccacccccgtcaaaagctcaagcggaaggggggactaaagataaagctatgaagaatgggtggattgtgtcaatcttcattctcagcctgtcccgccccctttagctcttaaaaatggccgaacaaaagacgacaattaattcttaattaactaattagtaaaagcattgacaatcagaaaatcctttttttgtccaatgaatgacaaatggccaaagtctaatcggccgaaagaaaagtgttgcgagcaattgaaaagaatttagaaaagaaaagaattgaaataaaacgaattttttaagaaagttaaaaataaataaaaatttaaattctaatgagcgattttttaatttaataaaataaaattatgcatagcataaaatgtttaacagtttttaacgacaatcacaacaatttcagaaacgctttgtccttctaaaaaggcttccttttcccatttaaaatggtcgcaacgcgttctttttcatattcattctggcattaatgtttgccatgccttccattagtcggcttgagaaccctccagttgcaaatccgtggctcggcacttttttgtccaagtttacagttcgtccaatccctgtcgcgttccgtgttaggccgaccggttggcccacgcgtgagctgtaaacggcacttttgccgtatctgtttgctttggtcatgtcgtgagcagatgccgatgatggagaagatgatgccaatcgatggctagcaaaagtgccagctaaataaaaccctttttgctttttcaattaaacttttccaaacaccttttgccaattgtggttctttctccattttctcatcattcgtcgatgacttttgcaatctcgacttcccaatcttcccaatagtgtcttttctgctcggtgattttaccttttttgggttgttccgctccaaccactcttttgccacattcgttgacggcccaacaagttgggagtatttatcagcagcaatcggttttgccgatttgttgccaaaattttggtcttttaaggggttccgctccgacatttcattttcccgatgattatggacaaatttggatgggtttaaaatgacgggtccatttgaggggttatcgcccaaggcatcggcggagcagaacaaaaaggcaaaatagagaatgaaaaaatattcagcattaaaaagcatttcaatttctttctgttatataaaaaaatattttttaagatcaatgaaaatgcacttttccagcaaaattattccatgtaaatgattttacatcataaaaaactttgattgtcactaatggcatggcatgggctgactaatctgacgagggaggcgagggggagtgggcacttttcccgcaaaagttattgagattgagtgaaatgcgttcacttttatacaaaatttttcgcattttctcgtgcgaaaatatttattatgttgtcgtgtgatttctcctttttctttagggcccttttattttttagctcttatttccgttaaaaatattatgttttttagcattgagacaccactaacattataataataataattattattattattattgttttttattttgttttttgaagtcacatgccacgtgccaactaacgaatgacgtgagttgggaaggtgttttttcatttaataataattataataaaaaagaattaaattaatgtaatgcgttttgtagagaaattaagcaaattatgacaaatcggtgatgctaattgtaagttttttttcgtaaatccgctattatggttaacagtgcgtatgtgaccttctttttcattgatcagttttgcttaacattttgactttttattttaaatgctttcattaattaatttattcggtggtgtccaaatcctgcttaatatgatgcgttttgctcactcattgttcacagatgggactttctttttgcatttcgttggcggactgtttgctgtcggtgaccaagaatggctgattagtaaacaggttgacaccaacggggctgattgatcctgccgattgctctgatcatccgtctcccccccccccgcctaatcggccgatggattgcgccttttccatttgaccgtcgtcggcagcagcgaaaaggatcaaatccacgcccgtcgaatgtttgtggacagttttttatgatttatgcctctgataaagcggagcgggggaggcgaacggcggaccgatgattaatgggcgatcagaagcagagaagcggccgaaaaagcaatatttataaggcaaatcacgacaaaaacattcacacttcagcagctgatcagcgaatgagtggtaatgcgattatcatgatgctcttaataattgtggcttaattagatcattacacacactaatgaacaataaattattagggaatgggttgcccctggggatatcatgcgaataacacagcaaaatgttgcctttcttactgatttaattatacatttgtatgagattgaaaccttatttaaacatgctgaaatcggatggacattaaaagaaattcgaaattcataataattgttatttataataaaaataattttaaaatgcaatatacaaaaatatttttatgctttaaagcttccagcaaattaaaagtataaaatattaatctctcataaattaaggaaaatgagaatttctcacattaatttattattatttaccaacataatttttctttcaaacctttatttttcagcagcacaatgtaagccttttttttaatttcaatgattaataagaccaattatttgcctaattacccatttaccattgctaatgttgcttaatttggtgttgttcagcttcttcccccgccctttccgcctccctttcgcgcattggtctctacgaaatcccgccgttggggccgctgctgcgcacgcgcgacaatgcgacgaccgacgcgcggaaaagcgaacgctgtgacaatttttacgcgagtgtttgtgcgccggtccacgaaatgccattgcgacaacacttcaaaagttacgcgggccgagcggacaatgcgatcagtgtttatgacgtggcaaaccgacacattgacaacgaactgttcagtaagtaaatctaatcaaaaaaaaataaaaaataaaatggatttaaattttgaaaagtggaaatttaaatttagcatttttggagacgtacgaacacagcaaagggtcggattttcacagaagtcaaatcgcacgcaaaatgctaatgttccacaacaaatgcattgacgaaagaacgcgggcaaaacaggccggactgtccattgaaatgcttatcaaacggctcaaaacaatgcgcagcgatggatttgtaagttgaacaaaacattaataagattaattaaaaattatttttaattttctatttctataaagcattcattaatgattattcaaccgttcagtcgacgaccgacatgatgatcgaaatgtttccacaaattccatttctgttcctccaaaaatggatagacaagcacatcgccgttcaaatcaactttggccttttctacaatgtgtggccattgccaaattgggacgaagatgtcagagcccttctgaaggatttgctcaaggtggcatttgattttgccttttgaatactcagttaattagtgattaattaattaggcagtggtcgatgatgccaaagaacacattggggatgagaatgcagagccaatgccggaatggttcagtgccctggggacggacgagcagcaaatgaagcagcgcattgatacgctaattgagatggaaaggcaaatgcacgaagatgaccgtaagcaaagcgagaagcttaatttggggatttgaatttaattctaatggtaaaattgatatttattatgcaaaagtgccacttttcagaaagcattgaggagaacaacattgacaccattgagctgagtttgggcgaactccgttcggactttcccaacggattcgccgtcgattggcaaaaactgttcaatgccattgtgcccgatcgcaacttcaccgcctcctccaccgttctgttggtagcgcaaaaaatgaacggacgcactgagaggcaaacgccactcgacgtaatggcggaatatatgcgcaattttgggcccaaaaacgacaccctcaacaagtgggagcagtatgtagagtggctgctgatactgcaacatgccacactatcggacaacaaaatgtacacatgggggaagaccgattggaattatttttgtggttatttactttcagatttcatcgtattttccgccggcacccgcggtcagccaatgccatgatgagtgctttgctcgtcaacaaatactttttcgagaggcacgacgacgagcagtatatccgggatggcacatcggaggaacgccgcgtggcacaaatccggcacaattgcctggaacagctgaagcatttcttcccagaatatgttgaccgaatgtttgcacttggtatgtaaaaatttagaatttaaaaataaataatacttaaaaataattcgaattggaaaatttaaatgtcttttaaagggttaaacgacgccattgaggaggaggccaaaacggtgctggacaatgtgaagatggcatttgccgaagtgttggatcaaacggaatggttgagaaatgagacggacaaagcgaaggccaaggagaaattggccaaaatgagcaatttcatcggaaaggcgccggccatcggaaatcccaaagacccggaggacccggatttggcacggatcgacgaacgctacgcgccgtactatcagtttgatgtagcagtgaatttattaattgcattgtaaaccaacaaaattggcaggattcgattccctacgtggaaattgtgcgttctctgatgcgccagtggcgaatcgtcgacttggccaacccggcccaattctatgggatgggcgtccacgaagtgaacggctacaacatttaccattggaactcaatgcaagtcaccgggggaatgctgcgtcctccgttcatcgcgtccaatcagtcgttagcacaaaattttggtgctcacaaatatatacttttattttaattaacaactaattgccaaaggttctgttggattcatcattggccatgagctgggccacagtttcgactcgtacggctatgaatacaatgcggacggagtgaaggacgaaaagtggtggagcaaagcgtcgaagaattcatttgtgaagcgaaagaaatgttttgtggaccaatactcggcatataaggtgagtaaattggtggcaattgattattaaggctttatctttttggttaattattgttaattgtcctcctctcccccaatttccaattccattcatcctcccctcctccgtttttgccgtagatgacttttgagggcaatggcctttctgtgaacggcacgcacacagtgttcgaaaatatcgcggacaatgttggcatccgtgcctctttcgccgctttgaaggcacggctggccaaactgagcacaaacaaacggaggcgggaggagaaaaaggcgcaagagcaaatgcaaattgaggaagagaaactgagcaatgaacaactgttcttcctcagttacgcttatgtgagttacaaaagcaattcttttaaatacttaaattttatttgaattttgcttttattttaattgacttttaatttttagttttgttttaaattacattttaaatttagtcctggtgcggacgaacaacgcgcgaacgaatggccaaatatgtgaagcgcgacccgcacgcgccgcgcgaagtgcgcgtcaatttggcactcgccaactttcccgaattcgccagtgcatttggctgcgcctccggcactccgatgaatccggaaaagcggtgcactctttggggaaagcaatcggcggaaagtggtgccgaacagaaaaagaaaaagcgaagccgaagccgaagctaagcaaaagcaaaaacaaacaattagttggtttggaattggcaatggatggaatttattttaaaatatacttaaaaaggcattaattaattcattccatttcaaatgcaaatttcgtttaattaattgtgtataaaattttataaattgggtttaaatgagagagaaagagaaaaaacatttagttgctaaagcgataattaacatagattagcaattgacacggtgaggtttgcttcaactaatttaacaaaagttttaaccaattctgtcggcttttccttttccatttttactctttgccctttctcatttttgtcttttcctccgtttttcgttacgattggccattgtccgtcgcggttgttccgtccgtattcgctgcggttgttccgtccgtattcgctgcggttgttccgtccgtattcgctgcggttgttccgtccgtattcgttgcggttgttccgtccgtacttctgctgctttccgtcccctccgttggcgttggggtcgtctccgtttcgttgtttacgatgaactggtccgccaatgctgcactgttggtagacgacggagaagcggtgctaccggtcggtccgcgtcgccgaccaccgcgacggaaaccgccgcgacgcggtggtgggcccatgaaagggtagcggaaaccgccgtaacgcgatggtggctccatgaaagggtaagagccaaaatcgcagcaaggacttcgcttggcccggtaggatccgttgccggcgggcgggggagaagccgtgccattgtcgctgacactcatttggccgaattgagcctgctgttgttgcgctgaattgacattcccattttgctgctggacggacccacgggagcccagcgaaggatggccaaatgtttagcgactaaaatgtgacagggaaaagcaaaccaaaacgaatttgat

SEQ ID NO: 7857 - DNA, 4676 bp, Heterodera glycines
  unsure (1)..(4676): unsure at all n locations
tgtttttattaccgtcaaaaaatgccggatagacttntttgccgtgccgtcaaaatatttatgtacgtggcacattgtgtgctgctattgacggaaggaaatttatttggaaaaagatgaatatttaaaggaaatttattttctttccaaattaaattaaataaatcaaacaaagcaaaaattggcactctctcaatggcatttctcctgttgtcacttgcacccctcttcgttgcccttagcgggattgatgcaaatagtaaaattatttttttaaattattttattaaatttattattatttattttattaaaaaaatcttttagaagtgccactgcaattgtgctgtgctggtggccaaagcttggctggccttatctacgactattctgaccatttcagcgaagttttgcaacagtcggaaactgagatgtgcactagcctgaaaaaggttgttaattgtagttaaatcagggctcagatctgtcctgatttatcagatttgtcctgatttgaagggtccaaatctgataaaattaaaatgtcctgatttgtcagatttgtcctgatttggagggagtgacccaactttgtcctgatttcttaaataaacttacaattttgaaattttatggcataatgtcactattttatcaataaaatataagatttatgacaaaatttggttatttttttaataaaaatctgttaacaaatcgattaaaaatcgcaaaaaattttccggcggcgcctatcggcaccgccggaccccctgtccatcctccaaaattttttgaaaaaatgcgacgcaaaaaaagcgtttttaaagcaaaaaagtcgtcgcttgacttttaatttatgcaaaattggccttttttggtgaaaatctgttaacaaatcagaattaaattacaaaaaatttttccgggggcgcctatcggcaccgccggaccccctcccctctcacttcccaaaagttttttggaaaaatgcgccgcaaaaaattgttaaaaatctgatttttttttatcccgaatgcactaaaattttatgattttttgaaattttatggcagaatgtcactattttatcaagaaaatataaattaaataaataaatttatgcaaaaataaaataacaaaaaatttttcccaaaaattgttaaaatcgttaatgggagacaaaaatatactatttgatacatttttgatcgaataaattgtaaaaataactgatttgaagcaattttgcgaaatgttcttatttttgaccctaaaatcttattttttggccttgatgttcttattttgaaaaattttcgatacgagccctgtttattaacagaactctgaatacatatcaatgtcatttcaaactaaatcctactcagcaacaatacaactgacagatgaacaaagggagcgggttaagcaaaacagggaaagggcgctgagaatacaggcggaaaaggccgagcagagaattaaacagggtccaactgcagcagcaagtcaacttcttccccacatggatggaatggccatttccaacaacaaaccaccaccgctaattggagaagttggcactttcctatttttactgaattttattatgtctctttaaagagacttgtgtgccctcgtcccattcaaattcaaccccctattacaacaaaaaattccaattcgccccgaccttcgacgagttctgtgcagaaagtacttgttcaaatggacttttctctaattaacgcgaatcgctttaaggtgatttcactattcctgtccacaaaataccattttaataatttaggtgcaatttactccttttaatagagatgtggtggacaaactcaagtcaattccttcacggcctttcaatgcagacgacaaaacatggtctttccttatcgatgattatgaatcgaccaaaaaggcattgaacggactgaatcgcacagtaaatttgaaactcgccgaaattccatttgacgtgagaagggtcagtcaagtctatgtgttttgtacttttaaaaccgtaattaaaaacattttagttgtttttgactaaaagtaatgccaaacccaaagtgaatttggccaaaattggacaacatctgctagattcgctattttcttttcagcgctgtggagtaaggtccttttccacattatctattttgataattttcaatttctgcaaattttaagcgttggcattgaaagagatggacggattttgatagcggacgaaatgggccttggcaaatccatacaggctttggccatcgccaattactaccgtaacgagtggcctctgcttattgtctgtccctcctccgtgaagtacgcctggatggggcagttcaaacgatttatgcccaatgcaaatgtttacatcatcgaaaaacaaagcgaccctttgcctatctcacgcaacacttccgtcgcaattgtaaattttacgaaattttactagtttttccacttttcttcaggtacttagctatgacctcatggtttccaaggccaaacaattgaaaagcaattccatttatgttgttgtttttgtgagtttagctaagttattatttaattggaaaggaaacaaaattaggatgaatgtcatttgctgaaggagcagacaacgcagcggacaaaagtcgcatttgaactttcggtaattaccaattccttataaatttagtcattaatttacagaaaattgccaatcgcgtcattcttctcagcggcacacccgcgctgtcaagacccagtgaattgttcacgcaagtccgaatgattgacccgaaaatatttcctagttgggtgaaatatgccgtgcgttactgcggaggaaaaaagggacgttttgggtttgaggcgaaaggaaggtgtgcactttgtatgtcatattttgcatttggaagaaataatttcgaaattaaaggtctaaccccgacgaattaaaaactgtgatggataaaattatgataaggtaaaccattttcttttcacttttaataaaaattcattttttgctaggcgtttgaaaaaggatgtgctggacgatttgcccgagaagagacgtgaagttgtgtacctttctggcgatgccattgatgccaaaattcgggagttaaaaaaagctcgggatgcgtgtgaacaagcgaacagatattcagtgaattgctgaagcagttcggaaaaaattggccaaattttcattttaggatgcgaaaacaaagaaagagacttttgcggagtattatgttcaggttgcgcctttcttcccccttcttttttcctctgtattttttagacgggccttgtaaaaatgcgcgcggttgccgaacacgtggtggacacgtacttccatgaaggagctgccgacagaaaggttttagtgtttgcgcatcacttggccgttttggacacattgggcgttgcgatggcgagagcggtgagaacaaatcgccctacatttgtttaaccattcaattttccaaaatgcttttgtggggtcaatggtaggtaatacaaaaaatcaattaaaaccgaattaaaaaaacacctaggtctaaaaattaaaaaataccgaattgctgaacttgcccatgacaccgttttcttgcccccgtttcccagggtgttcaatacattcggatagacggtgccacgcctgcgcatgatcgggcgctctattgcgaacaattccaaagtgaccgccgaacaaaggcggctttgctgtcaatcactgcggctggcacgggcatcactctgacggcggcatccgtcgttgtcttcgccgagctctactggaacccttccgttgcttctctatttggaaactaaaccatacaaatttccattaagttaatgatccaagcggaagaccgagctcatcgagtcgggcagaaggattctgtgcatgttcaatatttgctggcgcgtaagacggctgacatggatatttggtcattggttggctcaaaattgaaagtgctcggtgaagtgaatctctctaacgaaacgtatgttattgtttttattcgcttttttggttattctgaatatgtttaagctatcgcggcattgagaactcagagaaatattgtggggcgagctcgcttatcacggatttctttaacgtgatgaattgtggcgatgacaatggagaaccggtgacaaaacgcataaaaccgatggattttggagtgcaaagaatgcaataggacatctgtgagccattgtatagaaagagtcttggaacttttaattgtttcccaattgtaattcctttctttatttatttgctttaaaaatacaatatgacaaaataaaaactgttcgtgcctgccggtcagattcattggtgggttttcttgcttgtcgctattatggcgtacagcttccgttttgcgtcactgccatccgggaatgaattgaggtcgtaatacgtcggagccatttgtatgagcctgaaaacccaagattttaattcgaaattaaggcctgggtttgaataacgaatgatttcagttttttaggggtttaaaaatcacttcccgtcattccacattattacaaaataatattatcacataaaaatattaccattctgggcgcacatccgtcactgtccgaatgtaatttttgctggtcacacaaattcg

SEQ ID NO: 7858 - DNA, 1528 bp, Heterodera glycines
  unsure (1)..(1528): unsure at all n locations
gactgttcgaactgcggcctcccaatagtctctttccggctcgggtgtatactaaatagatcatgaatttcaaaaaattntggatttcacttacgaatatttcaactggaaaagtacggccagggaccgaaagtaacggacagctgtcgaagtaattctgaaatttccccgcatctaaagtggcactcatcacgacaattttgagatcctgacgctgtcggattatttcctaaacgtgggaaattttttcgcaaaatttggaactaggtaaccttgatcagccccatcaaaatgtcggtggctaaagtgcgttcgtgagcttcatccaagaggaccacgttgtactgctccagaagtgggttgttcatagcctcgcgcaaaagcattccatcagtgcagtatttgagaactgtccgatcgctgacacagtcttcgaaccgaattgaatagccaacttcctggcccaactaaaaaacaattgtgaaaattaaagctgctgcacaccaatgcacgaaaagggaccaaccgaaacatcgagttcttcggcaacccttaaatgttggaagttaaactaagtgtcacaacgacatcatttttcttacctcgtggctacactcatcgccgccactcgcctcggctgagtgcaggacaccatgtacttccgattggccaaagcgcctttctcccgcgcaaagtccatgcaccactgcggaatttgtgttgttttgccactgccagtctcaccaacgagcgtaatgcactggttcttgttcaacaattccatgaacttctccctgtagtcccagacgggcaaccccatcctcttcttcaacaagtcccaaaaccgttgcgtatacggccgtccagttaatggattgcgcttcgactaaatatatactttcaaaacataaaaaaaagattcaaaccaagtcaatttgcgtttcttctcttttgaaagtttgtatttttgcaacagtcgcctcagaattgtcatcgagatgtctttttcgattattagccgtttcaatttgaatgtcttgtttattaatcaccggggcatcaaatttttgttttttaactgccgggactttaaattcgtcagagacttttctttgttccgcagttttagtttccatttggaaggctatctgttgtaaggattgaaaattagattatctatgtatgacaaactgcctagaaaacaagtgacataaaccagggttctcattgtcagatgaaatttgacaagttttctaacaaatgtttaaaaaaatcaacgtgtaattgatgggcttgcgggccgatatgggcagctgggaaattttgaaaattcaagtgaattttaataataaaattgtccaaaatgtcgaaatttcactgatttttgagtcaaattgaagaaataagatagtgactataggcgccgccggatatctaatttaatttttatggttaattttgtaccaaaatggattttcgaggaatttctctaaaaccaaagccttaaagcctcatttgaaaattagct

SEQ ID NO: 7859 - DNA, 4022 bp, Heterodera glycines
  unsure (1)..(4022): unsure at all n locations
ccccccccccccccccccccccccccccccctccccccaaaaaaaaaaaaaaaaaaaaaaaaaaaaaaaaaaaaaaaaaaaaaaaaaaaaaaaaaaaaaaaaaaaaaaaaaaatatattttatgtgtaagtgggtgttttttttcgtttggtattttcccccccccatcccccatggccagccgtagcctttttgggggtttttgttatttcaaaatttactttttttaatttatcaaaggctggggatattgctaacctctgattaattaataacaataaataaaaatttcaagtaatgtcacttttgaattagcataatagaaaaagtaccgatngggttaaaatgctcgatgtcagcttctcgggtcccggacatcatttccannttcanccagtcaaaaaatgtcgttcattattccatctgatataaataaatagcatttgccgcgcctgcagaaaaaaaggtgtgctctgcacatcncattccaataataatatgctaattaatgataattattgttttgctcagtttattatcgttgagccaatctccgacataaaacacctttggaatttaatcaattaaaaatgctattaaaaaaattgggtaaaactttaattggcgtagccagtggtggtgatcagatatcgaaaacttaccgagactcgagaacggaatttaatcttgcgattaaaaaaaattaaatttttgtaattataaagcaatttatgtagaaatttttgtttatttcaagaagcaaacactaaaattagagtccttgggatttatgtgccatgctctttggactctgcccatcgcttacgtccaaagcggacccgattatcgaccttattgacacagttcttgattaaattcgacgcatacagatataaaaagcggtacatccgttgtgactcatttcaaaaatctaaaaacgatttttacacgcaaaacaacaacaataaaaagcaaagaaagaaagtaaaagggttgtttaaaataagaaatggaaaatatcgacgaattctgctgttcacatgaaaaatgcagtcttctttctgctacacagtaggactgacttgttactcctattgtacggtgcgagttccttgctttttccgctgctgttcaccctgtacaatcacttttgccttaccgttttgtgttacggtactttttgccatggaaatctgttttttgttcacttgaatgttcgaattccctctttgttgtatggtatgattgtcgtttgtcgattctaccgtattcagcgggctgacatcgcttttgttaaagtcaattttaaatgaactgtaattgttccacatttcatcgttaattcggtagattttctgtaaaattttttattgttgttaataatttttatattttaatttaaaaaatatgttaccacaaaattttttgtctcattttcgttgtcagtgttgtcaatttgcttaattttttaatcagttttgattataaattttaaatgatacaatgatattatttattacagaattgattttgatttgtatgccgtcacgacgttcgctgattttaatctctttggttatagggaccgtaatatttacagtaccaccggtcagcgtctttttgtagacaacaaaatcttgctggaggataaagttttggctgctaacgccggatgcctttgagatgcgtaaagtgaattcaaatggttgcttttccatgtgtgaaatgatctcaaactttttacagtattcctcctcaaagtcgtactctaatttgtcggttcgtttaaactgttcaatggtcattcgctcgagctttaactaaaaatgaaaattttcaaattaatgattttggatgaaaatagaggcattctgacaaaataaaaactcaacacggaaaattataaaaaaaaatcgcggcaattaaaagaattaaaatacacaaaaataatttttcggattttaatttttgaaaaatgatttacaatttaattttcctacatttcaaggttttaatatgcatagttaacactttcgttttcaaatataaagttatgccaagaaataagaaggggtcttaccagtttctcttctctttgatttaaaaaacctgtggcaaaaattttaacaatttcgatgaacaattcattgttggcacattgtgttaaattttcctcagcttttgcgggcattgaaattgtaaaattgaatttgttttgagcaactgtaccgagttgcgtttgttttccattcaattgtttatctgtgcctttatatttgtaatttaaaaatataataatttaaggacaactttaaggtacgcaacgcggaattccgactttcgactttttgaactcgaatacttatgtatatgttgtacgacaaagaagcaaaaaattaccgaaaatatataaattttaaataaacgatttataaagtttgctataaatcaaagtgtaaaaagccttactctcgaagaccgagtccgaaaccccgtgagaaagacagcaaaaaaaaaaaaactctagagggactcgagaccgagacgctcggaaagcgctagtatataaacaacttggcctgcctttttcaaattttcagcaattttctctgaattaaatcaaaaattttaaaattcaaatggggtatttcttcggaaaggggagggcgaataacagccaaatattcctgttacttacttttcaaaaaaaaattatttagggggtgcgacatttggcatcccttgttttcctggtaacgggactgattaattccatttttaccattttcgaggaattgcccttcgttcacattctgctctgaatttttcgttccacacagagtatgttcggcaattaacttctgttggtgaagtgaaaatggcacttcaacagctgctccactattactgttttgattacagcaaatttttatacggtaattgtagtcgttggatatgggaggcggataaatggacaaatttatttcccttttagcagcgcagacggtgactatgctaattgcaagcaaaaagccaaagagcaaaagctggcagaacatttctaaatgttgcgctttgaaattatttcgctttaattttaacttattttattttttaaaacgttaaaaatattataaaaaatttaaaaaagtaaaatgtaaattaaaaataatataaatataacgttattaaataatgaaaatttatttcccttcacattatatgcatatgcataaaaagatattcagcaataatgtaagtgtaaatcacatgaaatagggcaatacatatagatgaatgaatacgaatatgcgggcgagcatttttacaaatgaattttatgtgcattgattttgcatttttctcagaatatacaacataaatttattccgaatcatattacgattagggatgggatttatatatatttttaaaatacatattcttgctgagaaatgcacgaaaaagacctttgtagcgcgaaattcttaggtttaatctccaatatccattaaaaaatatttgactcttttttatttagtaaatattttggcatttttcataaatacaaatcctatccatagttatatattcataaaactattaatgtttctatattttatagttcgatttgtccgtaacccatgtccgccatcgtcgctgacgatacacaacccaaacatcgaccaaataaacaaccgagcagagaatgagcgcggcgaaaattgtgccgatgagcaacggatccgtcgacggcacgacatgccattggagaagcaatgtttcatcactgtccatatgtagaaaattccgatgggaaatatgtgcaagaattgtcacatttgcacaaagcattaatccagcagaaaggagcgcataagttaatgactccttaattgataggaagagatttatggctaaacaaatggaatctttanaacgaaatttgtcattagaccgggaattttgggctaaaccagaaccagaaaagccatgaattttcaaaaaaattttaaattttt

SEQ ID NO: 7860 - DNA, 2240 bp, Heterodera glycines
gtataaattgaaattgaaattgtcttttgttaacagatttcaccaaaattgtaacttttatgaattttgggtcaaattttgaaatttttaaggggacatttgtggtccagcgataatgatcacgataggcgctgtttttctcaccaaacagaaaaacaggagaaaagaaaagaaaataaaacttaaaaaattataaaaaaataatttagataattttgaatttattataatgaagaataaataactaccataataaaccattgtttttgagttgcccatcgattcaatgttctcagtttgatcacaacaaaagcacaagaaattgtcagagacgctgcagcaacagcaattgaaagcccaacttcgccgtaaaatccattgttgaaaagagaaaccaaaataataaaaaggcaaatgcactggcaaaacaaaaaaaataattattttgttttaaagttagatttgtaattaaattgaaaaaaaatatttcaatgaaatgaataaataattttatatattttcatagcgcctaggataaattttctttggattattttaatgaactatataattaagcaaataagtagatagcggatggacgagaaaatcaaaaaatatggcaaaaaataagtaagaataaagcacattctaaaagcataaaaccaagcaaaaacgctatttacttgatttttaggcccatctaaatgtacaaaaaatttgaaacccgtaaaacccgcgctctaacgataaaaaaaaatcaaaaaaggttaatcaaagctaacgtcctaagaaattgatgaggtcgaaggaatttcccaactaattttgaccaatcaagttaaattagaaccttttttaagtcagcaataactgtggaatatttttaactttgttggctgggtaaaaataaaaaaatttttaaattaaaatttaattcaacaaaatttcatacaatttccgcaattttggcaagccattgaccactttttaagaattcttcgtcataataagcagctgaacagcagaatagatttgtcctacactgcttgcattttatgcttttcctaatggaagtgttgaagtcgtgcacaaattggcgctcggagcccaaatacctacaaaaaaaaacgaaaaacaaaaattaaaaacattaaattaccattccgaatgaaactgaacagtgcttgaaatggtttcaagaacatcatcactttttgtcttctgcatattttactgagtgattatcattcgtaaataattggtaaaaacaatttttttcactgccatttaattgtctccattcgcgcgtacacaaagtattagagagaatttgcactgtcattagcccttttaatctttgcacatgagaaaaaaatagaaatttagctactaaaacatttaacccttaagatttttaattagttcgcttagattggtaaaattcacaagaaaaataataataatttcatgacccattgaaaacttatttaaaaaaaacaattaaaccagaaatgccgtcgaaatttttcttacaattacaagaagaacaccattgtttaaaaatgattttttgaggtgaaaattaaggataaagctttaactttttaaaaatccaatgttgatgctttatgacattgtcgtttaagtgtggggttcaagaatttacatgtaaaataaataaattaaaccaagtatgtccaaatgtttatgtgcgaagtaaaaaaaaattcaaaccaaatgttcaataaattatgtataaaattaacaagttgcaggaaaaataattgaaaattaacttagaccataaagaatactattcgaataattaaatcttagaatttttggattcttggacaagatttaaaaaattaaggcaatttggggtcatcagcggcaagctttgaaaatttctgctatttgttaaaaaagcggaacatataaatgtgaattatcttttattttttgaatggccgatgggaaatttttaaaaaaataatgcatttttgatttttttttgtttttaaaagtgacaaaattatatgtttgatcaaactagctgtaatgaatcgtaaatgctatagtgaaaactgccaaatcattaattttaaggcccgagaaccaaatgaattaataaaaaattttttggttttttatcatataagcaagtttttgtgtcttttaaaattttaatattactgggaagcaagaatttaatttatttttaaacatttttaatttaa

SEQ ID NO: 7861 - DNA, 3352 bp, Heterodera glycines
aattggtttgagatttattgcttgaagaaaattgctgtggtcaatgatgatttggtcaaaagaattcggaacacaatgccatttgtcgcttttagcggcatcattttgaatttttccgttttcgttatgacatatttttacattgagacggagaaacaccatttacaagttaatatatattatttaaatttatatttattaaaaaaataaaaataaatattttaataattaaattttaaattaatatttaaagactaaatttttattataaataataaaaaaatctaataaaaatatgtagaaatttaaaggaaataatcagaagtttgccaagtgattattttgtgttggtcggtgttgttggacgaattttggacacagccaattatgtgtacacatttaccagtgccctttgttgggtagacgttttgctacggtaaaccattaaaaaataaataaataattaaattactttaatttagttataaaaataccaaactttttgtaattggtggcaaatgtatggaagaaagtaaacaaaattacaaaattgaggaaacggcggagttttaaaaaattggatcatttcttgcacaatttttttgacaatttaatcatttttcttaacaaattctattatcgaaagagtcgctcgatatcgccggattcgcattttaattttgaaaatctgatgcaaaaattgaaaaaatttgaaaaagtcttcggattccgcactctcctaaatgttttttttctggttacgggcctgaagaaacttttcattcttaattttggtttcctgtatatttactagggttcggaccccgtgggcgggggtggcttttcgcgggggcgggggatggcgggggtcagagtcgcgggggcggggacgggggcacgaaaatttcgcccccgcggggacgggggcgagggtttggtttgaattactccaaaaaatctcacaaaaaaaattatttttatgcatgatgtttctcataattatttggcctcgttatcattattttcatcatctttttcatcttcatcaatatcattagatggtcccaaaaataatttgttcatgtttgctttgatgatcaacaagttttgagccatttcaccagaaagccttaaaattaaattttttattaaggcacaaaatgttaaaaccgatttctaagcgaatttgcgtaaaggagccccgctttcgagaagacacgttcactacaaacagaagtagccggtgttgtgagaaaaatccgtgccagccttgccaattctggaaattttggtgcgttgtcgcgccaccaacaaaaaacatcagcgtcaattgccggacgaacaatggccttgtaatgagccaattgtgattcaattttggaattgagatcagcattaatttctcccgaaagtgttgatggaattgacccggcacctggcgatttaggagtaacccaaatgtcatcttaaattcaataaaatcaaaaaaattgctaaaatttcgaacatcgaacactctcatcgctgcttccaccttcgtccaaagcactcaaatcgacgttatcatggtgaactaagccagaaaaggcggcattttgatcatccaactgctcatcatcgaccgacacatttttttggccctcaactgaattcaaaaaattaaaattaaaaataaatattcatggacttgatttggcaaaatttttcaattcttcctcaatatctggccataagtttttacgccaaatgttttcatcatacgcaaatcgtgggtcaagaatagttgcaatttgaagcgctgtgttatgtgccaaattagaaacacggcgatcgattgcatttgccaatgaattcgcaagaaattgaactgatgagttgaatggtgtcaaagcgagaaagtcacggattttttttaaagttgggataacagatgcagcgatggatgtttcagtagaaaactaagattgataaaacattgtaactaagtttgagatgaaaatcttctaacttttcgagtctccgcatcaaaaatgtccaaaatcgaacagacatgacgcaataaatcaaaatcgactgcatcaattctcggtaaatcattagaaattttttcgacttttgcccgcttaaccgttcgaatttctgaatgcattcgatcaaactcaagcgcaaggattgtttttttttgctggcgaaattgagaaagcattgcataggtagaattccacctggtgggaactgactaaaatttaaaaaatcacgccatgttcattttactgtttttaccatgatcagttttgttgttttttgaccctgttcattttgctttttccgaaataatgcagctccttttgttgtacggcactctttcacccattctctcactttctcgatcagatcagataatttcggttctttcaaaacatcacatattgtaagatgcaaaaaatggttaacacattgaaagctaaacaatatttttaaatattttaccaattatattttacctttcaatttctaatattcggcatgttttgatcatgttttttgcgtcatctctgaccatcataaccaatttttccattgaaaacccattattaatcaaacacttttcaatgtgatctgcgagattttcgccggtgtgagcatcatatattggcgcaacattgagaacaaaatcgcttcgcacaaaattttcatcgactgaatgaattgtcacactaaaaaatgataatataacattgattaggtttttatagtttttaattagtaataacctctgcaatgagggtgattttgtaggtagttgccaaccatcgcttgtgatgctgtaataaccagtaccaatcttgtctttgattttttgttgaagattttcagccattcttggaatcacaatttttcgaaaatgcgattcactgcgagtctgaataatatctcattctaaatagtggctgactgtcaaacctcaaaattagggtatgcacgttgcgttaatttaagaagaattgaattttcaaaaactgaaaaggcgcagttttgctggaccataaaattagtcaacatttcctcaacttccttttgctcgtcatgttttttaagcaaaaaggaatcaattgtcttaatttgtgaaataaacttaatagccttaaattataaccttattttttggcttttccggctcctgcaattgcaattcattgtattcctctaaatgcatcgacttcaaatggctccacattcctttggtcgatgcatctcctcgattcaaaaccatgtggcataaattgcattgtacattcatagattgtcagggggggaaaacaattccaaactttagaaacacaagagtcca

SEQ ID NO: 7862 - DNA, 2779 bp, Heterodera glycines
  unsure (1)..(2779): unsure at all n locations
ataaatgtgatttttcnaataatttcttttttaaattttcattactancagtaaaaagataagcaagatcctctntaaaagggattaaaattacttttgataaaaatggcatgaaactaataaattctttcaaaaaatttccgtctattttttcaaatttcatgaaactgctgtgtaaaaggggactctaaaagttaattttttaaaataacttttattttttgtttattcttttattgtaaaaaactaataacttttaaggttaaatatgtttatgatttcatttattattatgaaattatttcaaaacttagttttatttaaatttcagctttttatactcactcgggaaattcctaaagatgggcttgacacggcacgtgctgccgaatcgcgtgccgaccatgtgttgctgctcggatcaaccattattttgacagttgaatgtgtttgtgaggtgtattgcttttttaaatttaattatttatgtaatttaaaaaaattgatttttctaaaataaaaaggaaattatattatttttagttggtcgaaatatcatatttttcaccaaagaagaaaatgcactttgtgaccaaacttctggacattttttacagtttatttacgcaggtaaataaaaaaaaaagaattaaaataaatttatttttaaaatttaagttggcaaattggtttgagatttattgcttgaagaaaattgctgcggtcaatgatgatttggtcaaaagaattcggaacacaatgccatttgtcgcttttagcggcatcattttgaatttttccgttttcgttatgacatatttttacattgagacggagaaacaccatttacaagttaatatatattatttaaatttatatttattaaaaaaataaaaataaaaattttaataattaaattttaaattaatatttaaagactaaatttttattataaataataaaaaaatctaataaaaatatgtagaaatttaaaggaaataatcagaagtttgccaagtgattattttgtgttggtcggtgttgttggacgaattttggacacagccaattatgtgtacacatttaccagtgccctttgttgggtagacgttttgctacggtaaaccattaaaaaataaataaataattaaattactttaatttagttataaaaataccaaactttttgtaattggtggcaaatgtatggaagaaagtaaacaaaattacaaaattgaggaaacggcggagttttaaaaaattggatcatttcttgcacaatttttttgacaatttaatcatttttcttaacaaattctattatcgaaagagtcgctcgatatcgccggattcgcattttaattttgaaaatctgatgcaaaaattgaaaaaatttgaaaaagtcttcggattccgcaccctcctaaatgttttttttctggttacgggcctgaagaaacttttcattcttaattttggtttcctgtatatttacctaataatttttaaaaaagacattaaatttatttgccaaatcttcttcaaatagaacagcatacaaggtcaatattttgagtgtttccataaactgtagttcgagcacattcacaagtaacaaactttcgtagcgattccttaagaaaaaatggggatgtacaagttttttttttaattttaactaaataatgtttgttctaaactgattaaaaatttattaccgcgaagcttttcacaaaaatattaattaaaatcttttaaatcattaattaaaaaatagctttttaaatatgtcaaatttttcaaataaacatttgaaatttatctaaatgaaattaaaatatacctgaacatttgtgttgcagcatgatctcattgcatgccgaattgaacaggttgtgcatggaaagcatttaaaaagcattgacaaatccatgggcccgactgaagtgtcaaatgctaacggagtcgaacaacaaaattggttttccttgaaatatttaatgaatttcttaaaaatattacaatggtatattaatttaaagcattttttcggttttagcttttttatggcaaaaaaaattggtctctttttttgatgttttcgtctcaaatttctgaattaaatatgatgtactcataaaaaactcaaaaaattggcaaaaaaatcaacaaaattcgatttataaaattttgcaatttcgcttgccttcattattttagtaaccagttgactcaaagcaacaaaaacgcaataaattaacaaaattatggccacagaaaaactaatttgttgggagaacggtgacagcaacgacttgaggaaattttcatttggtttcacattaaatatttccaaaattcccattctcgggctttaaaattaaaagaaaaataaagcaattttaatatacaagcaatcgaaatagcaaaggagatgcattcttatgtgtgtcaaaagcgttgtcatggaaatattgttgaatattaatggtggacaacaagaaaatataactagggttttaccattataacggtcgatctttttacattttaattaccgaaaatatacggatatttttgaaaaaaaatgaaaaaaagacaatattattaaagaagaaagagatccacacgtattaataacgaataagaaaatcgactacataaaatcattattaacataaaagaatatagggcgagggagaccctgaccattattaacataaaagaaaatcgaattttagtattttatatattttttatttattaaaattaagatgaa

SEQ ID NO: 7863 - DNA, 2034 bp, Heterodera glycines
  unsure (1)..(2034): unsure at all n locations
tttttgaacaattttcgacattgaaagaatttttgaacggtgctaaaaacattgtattcaatccaaataaatatacggtgtgaaattcttactaatatttaaaaaatgaaatttagttaatgaatagtttttaaagtttgattagcgctaaaaattaaatttaaaaaaaaagagtgtgtacgaaactcgcatcatttcttgtcccaccttcggggacaagaatgtcggaaaggaaatcccgaccgaaaaattttagccattccgacatgaatctcaaaattttttgatcccgaaaccagattatgggccgaaaattttggccgtcctggtccaaatcctggctttttctcgtcccgtgacaaccatagcgggattgggccggggacatcggcagcttatctaattaaaaaaaaattagtttaaagaacttatttttagaaaataatgacccaacatgtaaatcctgatcagatttataaatgggtttccgagcatggcaattttggtggcaaaaatcctttgctggtgtctgaaatagtatcagtgatcgatctgttccgtacaatgccgcacttcaacatgttagagccaaaggatcaagtaatctttgatattaaaaaacgaattttaaaaaatatttttaatttatttttgttttaggcaattcttttgagttttgttgctattccactaatttatctgaatgcccgtttttactcatcaaaaatcaattcaccgattgtaaaaatcattccgaacagctcatttagcccattatacctttattacaaaaatccattctacgccggtgataaaacgtaaacaattttttgtatcgggaaaatattttattttaaaaatttttaattattttttatatttaagaaattttgtcagtttaattttctatggttctttttattaataaaaaaaacataattattagcatccaaacattgtccgaattaatgtatgtcaaaacgatggatctatttaacaaattgcaacttacggatgaggaatttcttttggttcgtgctttgatatcgtcacattcaggcaataaataaattatttaaaatatctaaataaattaaaaatattattgaaacaaattaaagaatattaattttttggaaataaaaatacaatattctcgatatttaaaatatgcataaaaaagcaaaaaaagagttgaaaagtatcaaaaactgtatgaaaatcaaaattggaatgaaaccttaaaagtctgaaaattttctattttaaagagcaatttcaaaaagatttaatgaatttacagattaaaaatatagttttaataattttaataataattatcaaattcaaaaagtttttatttcaacttttcagcagttaccggtctgtccgctgctggtcgtctcaccctgcagcatttgtccgaacattatgccaatctgttgatgcattatttgcgcaccaactacggcaacattgccggcgcacaccgttatgccgaattggtccatctggccgagtcggtgtttttcaacgcggagcggcaccgtgaattcttcacctatttggccatggtcactgaccagggccgtttccatgccgcaattccgcccatttttacgccgatgattttgcatgggacgttggatgaatgaaccaagcaaacgacatttattcgtttttgtggatggaaagattttaaaaattataaattatgaaaaaaaagcttttctggctttttaaatttttgattctgtttaatttaattttaaagaatgttatgcaaaacaattgtccgatcattgatcaattctcgatcctttatcattttaattacgaaaagatcattaggagtgatcaaaggagctttttgaaatagggtcgatcgaagtgtgttggttccgatttaatgcatttatttaccaaatcattgaaaaaaaggtcaattttagaaaatgtcaaaacatgaataaagccattanaatttataaagaagtagttttaaaaactgttcattagcccattgacaaatca

SEQ ID NO: 7864 - DNA, 4640 bp, Heterodera glycines
cgacgactcagcgaacaacccttgcaacaagagcaaggccttaaatccagtacgtcaccagggcgagaacgcagaccacgctagcaagaagccaacaaacggatgcaacgacaccccccggtacgatcaaatcggcaaaatcagcaaaaagagacttgggaacgaaccgagacggagcggacgttttctggtgttccgacaggggcagtacgatttgggaacccaagggcacggaaaattcacctttctgccgtcccccgcctacactcactgctcaatggcacaatctggcaattgagctcttcgcaaaagtcatcaagccagagcaaatcgcattagcatggcattgctccatcaaacgcaccagtgaacgttattatacaaatttgttggccgataagttcgtcaccatcgagaaggaatttccaccggtcaacaagcggatctgcaaacaaatggccattcaccaggatgcccattcgccaagtctgaaatgacgaatcacgaagcacaattgtggtcaacgaatgacgaattggaagtcaacttccctggatcaatcaccggacttttcaaaggcgaacaaatcagcacggcgacaaactgctttgctcaaccagcaacacttttcgtaaaacggcacaatctgcagatgttttcgccagtccaccaagttcagaactgtcaatacgccaccgaattctgccaactgcccgacaactcaactctgatttggaaatcaacctgcaatggcaacgaatgccaaacatgcgactacgagaaagcggaagtcatcaacagaaaattcactgcggcctacggagaatcaatggccacttggatctccgaagatcaccaaaaggcattaactttcgccaaaaatgcgccagaactcatcgcctgcgatggcacacgcatcgtcatgtccgaacagaacttcggaattgccaaggagcaatacgacgacattgtcagcaccacgacaagatggaaaagaggcatccgaccagaacagctcgcatcacagctctcggcatcccaagtggcagcaagcgttgcgttaaatcagctctacacgaggtgatgtcagcgaaacacgagggcaaccaacccgactctctaggccagacgcttactacggcaaccaaacatccaagctcgttggatcggcgaaacgacaatggaagtgtttccatgtgtcaacatttcgctacaggacatctcatacaggccaatgaatgaatgtcgcctctacattcccgtgactgcgcactttcccgaccgagctatcgcagctttcctggatccggaacttcgcatcatctcgctgacagcacaacaggcaagctgtaatagctaccggttccatcatcttcaactgcgaagcaatcccaacatctggttatggattgactctcgaaccggcacagcacgacgaatgccgaaggactacgtccacgaattgtacgaaacaacgatcaaccaaacgaatagcaatttggaacttcatccattgatcttccacgcatggcaactcgacaatgagtctgacgcgacacgcttcccgcacatcaacgaattcatcaactcggagcagttcaaggacaagctggaacagcacattacggcaaggactgaagctttgggcgcgttgaagggcggaatagaaggattcaccatgcgctggctaaaaggccttatcgacgaagcaatcacatggtggattcgagtcgcctgcgtttattcaaccttcctcatgctgcgcggcattgttctcccatgcactctggcgtatttactcaatcccatccgagtgactcttctcagcctcgttggagtacgcccgcactcgacattccgacccaccgtttccaaaccactcgggatcgaagagggaatgccgctgcatgaaatgccacaaacccccaaaccaccagcgcgcagggcagagcaccgatccatgtcaccaatcaaattggacatgatcgccagaacggctcggtaccaacaaccacgaacacagagccatctcgacctcacagaagactcgccctttgggaggcccagacgaaaagaattctgacgggcccatcttttcacgccggaatgtcggaactctgggattccgactgccgatcaattgatcagcagaattgaagaaaggaagtggcgacccttccccctccctttcacatgcgtcacaccccgttccactcctctgccccccatttccctccaaattgttaattgtttttctgctttccttccatgccccgcgcacaattaatgaccaatttgtcaaaaccgcaacttttctgccgccgtccccaattcggcgaatgagactccaaagaacgatgaacccccaaatttcccgttttccgcccattttgttcatctgttcattttgtcccccgttttttcatttcgtgcccaattttcggcccattttcgttctgctcacatttgccactttttatttaactttattgttatttaagcggccaaaaatgtcccccaatttcacaaccaaatttcatttggcaattttgccgtttctctccccgcccccccccatttgcctttaactgtgatggccccccaattttgatcattctttgaaccccccgattgttgatctttgatctatggcccggtgccctccatttctgtttctcccggtcccattcattgatttctgtgatttcccatttgccccagtaccgaatgcttcctttctgaaaattttcctgtcccatcccggtccccaattcatttgtgattaatcccccggtgatggcattttatctgtgatcaattttgtgatattttgttcaccatttttaaatttttgtttaattacccaagtttgaggcttttttcccggaataaattttgcttaatcaattctcggcgtttgatttggccggtcctcgtccctgcctgccccgaccccgcaccggtagaattcacatttggcccgacccagagcaatcgggacaaattggcgctcctgggtggatttgctgtgaaccacggattgactcgacgaatcccggtgacacaggggaagggaaaagcaaattagagagcctagacaaggaccctctgaggcttgtctagtgttcatagtttcgtatagttattgtcctccgaggcataacttcacgagggacgtagcggacttagtgtttaccctctgaggaagcacttcgtccgaacagagggttggaaggtgttgtgtagtggacgaagtacttgccctccgaggaagtacttcgtacaaaaagggtgttcaagcgcgcacaaggccactgacaaataaggaaaaaggcaaactaacagtcctccgaggctttagtttagccataaggcaaaaggcaaacaccttgtcctccgaggcaggtgtttagtcacagaaggtccaggaccaaggccagactgatcccggaaaaagacacaaaacaacaagtgcaccacaacacacacacacgcacaaccaaactgcacgcaatgtctgggccaatacaaaaagggatcatcaatgcactcaaagctctggacaatgccaaaagcgccacctcactccttctacaccccgacccggacctgtcaaactgggaaaatgccgtcaacttggaggctcaatttgatcgcgtcgtcaaagaaatccgtacaatagaaatgcagatggacagtctacgagactcatccaacgcttggattgaacttctcgcccgcctgaccggagacgacaaagacaacggcgaaaaagaatacgtcaaattcgacaagaatgaaaaaatcgccgaccgatacgacgcagcaacaaccaaacttcgggatttgcgagatctcgaagcaacacttagtgccgcagccaaactgcacagaggcagagccgacagagaagcaaaggcggatcaattggccaatccgcagcaacaaccgcccatgccaccagcaatggcagcaccaatgacaatgccaacattcacagcaccgctctaccaattccagccaattcaactggataaatttttcggccaaaagcgaaaatggcccgaattctacgaatccttcaaatcggcaatcggcagtcaatcaatcagtaaagcgcagaagctgaacttgctccgcaatctgctgggcggagaagcgcgagaactcatagcgagcttccggctggaagacgcaaactacgaaacggtccttcagctgttaaaggacacgtatggagctccggaggaacacatcagaagtcttcacttcgaactggccaatctcaagccgtgccgaagcctccgtgagaccaaagactttctgcttcaacttgagcggcttacaagggagctgaacaatgccggagaggacatcgagggaccgcaggtgttcctcatgctggagaagaagctgactccaccattcctacgaagcattctcacaaagaaaggagaggatccggcaaactggacgacaaccaaattccgggatgtgctaaccgaagcagtccggaaagaagtccaaatccaagaagtgatgggagaatatggcatcactacgtccaaccaaagcagaagtcgtctcagcagcacctgtacaagcaccgagaacacccaaacaaaggtcacgaaggccta

SEQ ID NO: 7865 - DNA, 1233 bp, Heterodera glycines
ttattatattttccttttattttttttgtctcattctgttaattctttttttttatttaattatataaatggactatttaatctatttaaaaatattcgattttataatttcatcaataaattaaaatacaaaaaaaaatttaattattgtcatggataaaccttaaaattagttttctttaattgtgatttatttacttggtaacggagcaaaatataagcttctgaaaagacttttgagttgtcatatttaggccgttaacctcaattcttgcactatctttgaattgaattgtttagttgtatgtttattattaaattattaaattttgtttgtgataattgttaacggagttgcattgtaaatttcaaattaatctttttaaaatatttccattaactattcatttataggcaattacatgttttttttagtttttcttaaataaaaagcataaaaattttttattttagaaatataaatattcatagtattaattaaattcccgtgaagagaaaattccataaattcagaaaaactttatgagcaacagattattcttttgtttgtcgtatttattcattatttaaataaataattagttatcttataacaacaataaatttaatgtattattattattattattttatttatatatctgaaatattggctgattttaaattattttttaaattttctttccgtataaagttcatctgacaatttgcgaattatgtaaataaaatatgtataaaaaatgctaaaatatgtatgtccccaaatatgtattaaaatatgtaaataaaatttgactactttatatattttttttaagaataattttttccaaaatgctcgttttggtcccaaatgctgaaaaattgttaaaatgcaagcacatttaaaaaaacttaaataaaattaaatagatttacaagcataatttatttattaaaaaaggatggcgtcagaaaaagggcgtttcgcgaaaagtgcaaaaatggtcaaatttatctgaaaatttttgaagaaataatttggttggtaaaattttaatatttaaagttatataaattaatgtgaatttttagtttttccattcttccattattttataaacatattattacatttaaaattaaaatgagaaagagaaagaattttttttattttattagctatttataagatataaatgatagttttaatgtttatcattagactctaga

SEQ ID NO: 7866 - DNA, 3674 bp, Heterodera glycines
acttcgactttctatctgcggcgttgttagagcccgaagaccgggaataaacgcagcagacggcattgcaaattgctcaaagattgagaaattgcacaaaatttttgctcaaagactgagaaagtgccgaaactctcgagttagcccgtcgaccatccatgattttcgacgaatttgtggcgttagcggcgagagctgaagcaacccaaaaagcgtcgaagctttcaatgctaaaggcaaacaattctcgaagattcgacagcgaatttcaaatgccgcgatacagcccacggccaatgcaacagcattttcgccaagaaaattttccacaggccaataaccagcaacaaaaccgcccaacttgttataattacggaaaattcggacattttgccaggcaatgttcggagccacaacgaaaccaaggcacacagaataacaacagctcggcaacaaactttgttcgtcaaaattttcttgttgaacaacaggaaaaacctccacaacagaatcaaaatctttttgttggtggcatttcgatgagtcctgctgatgtggaaaaactgtttggaaaggatgggaccgaaaacgagacgaaaaatttgaataaggtttcgatcgggagaataatggccttaaaggtatcggtttgtggtttgacggcaaaagctatgttggacggaggtgcccaaatttcgatggtttcttccaaattctttgcaaaattattaactgagaaaagaatcggtaccgaacagcttcgcccatctcgtcacaacactcgcgtgatcgacataaatggaaatgcagttgagtgtattggaattgtgtctctcccaattgtcaggaaaggcaaatgtgtgtggattcgtttccacgtctcacacgcatcttttggctaggaatttgtttttgggacaaatgcattggctcgactaagttttaaacttttcgacgaggcaaatgacgaattggtcagtttttcggaagttaataatgtggaacgcaattctgtgcacgtcatttatcatgcgaccataccatctcgtaacaaaaatttggttcactcggcccagcaaatgaaatttaagagtaacgctacggcaatttttacaaattcgggcaccaaaagtgaagtggaaagcaaacggacgtcggaattttgtgccaccaaaagcagccatcggccaagttttcgtcaaaagcggaagaaagctgaaaaggcaccaaagaacatcgtgcccaatgtggagaaccgaattatcagaaattgtgatgagaaagggcacaaaaagttcggcccaaaggaacaattgggaaagaaattcgaagtgcaaagtggcgatggtgaaaattcggtaaaaagtggaaggatttttcgaggcaaaaattctgaagttcaattagggacaattgaaattttggaaggtcggaaggagtttgagagaaaaagattgaagttgggcagaaactctcaacgagaaaagattggacgaaatgtctcacttgatggaaatggcccacgacgaattatggcacaaatttgaattcgtttcgacaaaactgtgttttctggccaaggagagcgaatgcagaccagatgagccgtgaaactttgccatttgatcggggttgggtcgagttgaccgcctcgtgtccggattcaacttcgacttctgctgatcgacaaccaatgatgcgcggacttcggtgcaatggcagtgagctgatcccaaacggacctcacctttcgacagccggatgcgggatgtgcagctgatcggcagggacgcctctcgtcagcggccggggatgtgttattatttaaattagtgcgtaattgcttggcgttttgaccatttattgatgtttgttttattcattctcatttttcatgcacttcttctcccctcttagagttttgtcatgtttggctgttctcagtaattttggatttgattgattgtttggttcccacctcgtcttccgactttgttttattttgttttgtgtgttttaataaagtgaaagcctatttggtcatttggttgtgagtgttcttcaacagaaaatatatttatacataaaataatatacataaattaaacataaactaattttaataaatgctctataataataaaaaagcaacaaaaatatatatatatataatcatacacaatcttttaaatacgatattttggtctaaaagtaaaatacattttttaattagaaaattttaaaaactttaaaatatcagttttgaaagggtggaagattactaataaaaatcggactgaataaaaattaattcaaaaataaaagcagtaaattttaaccaaaaatattctttaaattcaaagaagattgcattataaaagaatcggacgacttaggtcaagaatacataataaaaattcatagactgagaagaaaatgaattaataatgtaaaaaatcgtaaaattagaaaataatgccgtataaattggaaaaaataatatacatgcattctcttcgtgttaaacaataactttcaactaatacctccattctgagtctgcaattgagtgtcctaaatacgttttttataatactaattaataatatatcaatcataccatgttgattgaatgtgaaaatgcagaaagataaataataaaaaccaataattaaaagcaaattttactattgatacaaaatttaattacaaagtaattatattacaatcatacaaaataatattaaatctcatggacccttgaaacgggacaacgaaatgtgcctatttttttaaattaaataatctaaaagaagagatttgatttgttcgaaattcataaataattgtaaaattttattaaattattaatatgaaaagtgaaactaataatattaaaaaaccggaataaaaacaataaatatataaaaaaaactaaaatttcaaagcgctttaatgattaagatatataaaataaataatgaataaattatgaggaaagataatcaaataaaatggatggaacggattcaaagacttgaataaactgattttaaaatacaaaatttatttaatactaaattgaaattatataaaaataaaaacatcaaaatatcatggaaaacgaaacgcttctctagcatgaatttttatcaaaacaaatcactaatacggaacaaaagatgaaaaattagtgaagtagcattcatgcgaggattgtgggaagcagcatgaggactgcaaaaaataacgataaattttaattgcaatgcttttgtaaaaataaaaatatttaaatgctttaaaaaatattcatttgcgaaattttgaaaatatataattaacagaaaatagtaaaagttccaaatttaatcagagaaaagaaaacaaaaataatctatcataaaaatgaaagtaacaaaaaaaacaataatatattgaaaaacctaagcaatctaattattaataaaaaaaaatatataaattaatacgaaaatgcaaaaaaaggattagaaataaataaatagaaataaaaattactaataataactaaattttaaatgtaattggcacacgaggcgaatcttcgagggagaaacatgcagcgaaacaagaaaatgcttgtcgggcggggagggaagcattccgtaacagttgattgtgttttgaaataa

SEQ ID NO: 7867 - DNA, 2465 bp, Heterodera glycines
  unsure (1)..(2465): unsure at all n locations
cccntcccccaagttcaccaaattttctttggataagcgcgccgcaaaaaagggtgtaactgtcccaaaaaaaaattccaaaataatataaaaattacataaaaatattttgaaatcattaaaaaatttttcaaataaatatattaaaaacagtttgaaatcaccttttacatggtcaagaattttaaaatttagcctattaaatatttaaaaatttttaattatatttaatatttttgaaaaattccgacttccgacatttttggggtcggaattccgacttccaacttccgaaaaattttttggcctcggaattccgtcttccgaaaaatttttgacctcggaattccgacttccgaaaaatttttggcctcggaattccgacttccgaaaaatttttggccttcggaattccgacttccgaaattttttggtgtctcggaattccatccctgccacacacccatcataattcaaaataaaatgaacaataaaccgcaaattacgcttttaaattataaaatatatatgatataataataatttattaataatcaataaaacaaaaagttaaaaacggactaagagaaaataattttatattattagcaattggaacattatattataagctattggggtgacaacagaattagtttcacaaaaaatccattttcttaacccctttcaaacattgtggtcgacaaacacacaacccaggcgcatgaaaatttaaaaaatttataaaattaaattgattcaaattatttaacaaaactataattacaccttgttaacaaagaaaaaatatattattaataaatcaaataatcttgtaaacgaaaaaatatttaataaacgaatataattgaaaataaaatttaatattatgataaataatttaaaaaatttaatctatcttcaaaaaaaagagtttaaaaatcaaaaaataattattaaattgaaaatctttatttgacttttgctttatatatttcttcgtatgaagaaaataaagaaaaaatcattttttgaaaataaaagttttaaaaatctgagaagctatgatgcttgaaaagatataagtttataaattattaaaatatatccaacttaaaggaagcctagccatcggcctaattaaaaagttattgaaatctttcaaataaataataaattttaaattgccaaaaaggtactgattaattgaaattatgcggaactagaacctataattaattataatgaaaacataaacatttattcaatgtttattattatgacgtcctcttgaccgatttctggattgcgtaatataacactattcaatatgaaaattataataaaatttatgaataaattatttattttagaaaacaataaataaaataatttttagttcttctttgtcattaaataagttaattttatggtaaattgcttcgctgataaaagttataatgaataaaatttagatttctataaataaattaaacctagactggtataattagcgaaatattgaagcacaaccgagcctatacgaattataaaggaatgcatattgtgtaattgtttataattttaaatatgttctataggataaaaattgtgtcaaaaaatattctaaaatacgagtaacagctatttctgaaaacaattaaactaataaatatttagaagaatacgttatcagccagctgaatataaaatgctttaagtccactgatgatggaaacatcgagacaagacgggacaaggataaaaaattagttccttaaagaaacaaagataaaatgagataatcatttaaaagacaaaaaaacgaatgtaaaaattttaatttaaaataattaataaattaatgatattgtggaaaggattcagttacgacgataacgcgtggaagtctgagaacacttggaaagagccaaagtgctttttgaagagttcaaaaaatgaaagttaaaaacagtgaaaaaataaaataatttattagaaaaaaaaatcaaataccttccaatgctacaaaaatggtaatgggaaaaaataatagaaaataaataaaccaataatgaagataaataatttaataaaaaatatatttaaaataatttaccaacaaagggacaacgaaaatcagcccaaaaaataataaaattaaaaaataaattaataaattacaggcaaagggacaacgaaagtcatcaaaaaaaaagtgggataaataaaataattaaattttaaaaatatattttaatttatatgtaaagataaacaatttatttgcaaatgcatattaacaaagaagattttcaaaacagagggaagtgggtccatggggaaaactacaagagtaaaataggaataaacgacgtaaaataaatttttaaaaatatattgaaaaatataatttaacgagagagaaaatatttttttaattaaaaaatatatgataaaataat

SEQ ID NO: 7868 - DNA, 3672 bp, Heterodera glycines
  unsure (1)..(3672): unsure at all n locations
tgcaggtctcaaaaatatnnctttattaggttttggccacacctagaaaataattatggaaaaaagaaaattaaataggtaataggaaaagaattttctttttaggtagcaaaacacataaaaattttttcaaaatttaattttgtttgtatttcaattgaaaatgaagaaattattaaatattttaaaatttttttcgattaagtaaaattttaaactaaaaatttctcaagaaaaaaacatattttttgaataaatttttggaaaccaattcttagggggtggggggtgtattttctgcttttttcgcagaggtttgaaaattttcgttttttattgcatttttattaaggatttttcaaaaatcttaaataggcgccaaaaacaccaaaataggcaaaatcaggcattataaaattctcgttgaaactccaaaccaagcggaaaatgcgtttttcgtgctaatttgtgcgcattaagtgcgcataaagaaattttaggaatttgcctaaaaggaattctaataattaaaattattattttattaaattttaatttaccagcaatttcatagccctgggcaatgttttccttcagatcctttatcgttttttttctattatatttaggatcattataatcattttccattgttcctattacaaatttgaattccacttgttgcgctacgacgcttccaatgaaaagtgccgaacagaaaaggaataataaaattaatgggacggaaaaggagggcattttttgcgagaatttggccatttttaggggcaataaatgtgcgagaattttgcaaactttaataaattgggaggcttaagaaaaaattaattaattaattaattacataatcaaatggtaattttgcgtgcgaattgcgaaatttggtctatttttttttgcggcgctttttccaaaaaaaacttggagaaaggggggggtgggtccggcgcgccgggagaaattttgaaaacttgtgtgaaaatgttaacagattacgattctaagcctgaatgagtggcttcactcccatcaaaatttcaaattttgctttttcaggtgtttttcgaccacggttttactgtaaaactcagtcattttnttccgggttttcctgaatttctggggtctgctgggttttccgggacgggccaaattttgcgggtcatcttgctcttacatgcgcgaccttggctatttttttgacaaaaaaggattaataaatttgctccaaagcaaccaacttttaatttattcttgctactattttatattctaattattagtcaatttgcatcaaaatttccagaaaattcattagactcaaaaaagccaaacccaaaaaggtgtcagcagttatttaaaaaaaaaatttacattattcacattcataaattgtttaaataataaaaatgaaaaataaatgcaagccgacccgaaagtttggtgccagcaggcattttgcaaatgcatttctgatcagtgccatatatcatctggtgattaaatttttgatcaaacttatgattataagtgtcaaatgcatggggttggcgtagtgccgtgccgtgaatgaatggccacggcgtgccaaattatcccatgatttctgtaaaaggcacatttgcatggcattaacatttacatgtcataagaattaatataaggttttattcccaattgtacgttttttcccataaccatcacagttttttctgtttctaaaatcgctgaattataaaataaaattaaaattcataattttaaatattttaacgggggggggggctaagaagaaaataatatcaaatatacagtagtttaattcattttaaaataattgtttatttggcggaaaaataaattatatttcagcgttttttaaacgaatgccggtcatcaattcattagtcaatcaattaataattaattagttgtcaaatttgctcctcctcttcctcctcctcttcatccttttcttcactttcttctgttgttgttccatcttcggcaagtggattttggtgccgattgtcaacacttttggcaccatttgcggaggatgatgaggtggacaattggtgggcaggcattgagcgcaaaaaattgataggattcttaaatatatatatatatatttatttttttaaataaaaatttttttataaatgctaatgaaaattcgtcaatatttggtacggtaattaccaaccattttactgtgaaaatgctaatttttgactcaaaattataattcttcataaaatttttcggacttcaaaaaatttgaaaaatggacaaaattgttgaaaaaaaagagaaaaattttttcaaagagttgttcaaacttgaaaatgaaaattaataaatgagaatgctaatgaaaactcatcaatatttggtacggtaatgatcaaccattttactgtaccattagccgaaaacccaacgaaaagtaagaaaatgctaaacaaaatgatttttttcataaaaaatttgccgtacctcaagaaaattttgaaaaaagggacaaaattgttaagaaaaagcgaaaaaattttttcaaagggttgtccaaacttgaaaataaaatttaataaatgctaacgaaaattctaatgtttggtatggtaattagcgccattttaccgtaccattagccgaaaaattcgcgtattttaatggactttaaataattattttaaaaagtaataaaattctcacactggacgtccggcgatgggtcagcttgaaggtggtcttcacctccttcagtttggcctctttgtccgacagtccgtcactgtgcgcagcggacagttccaacgaacgctccaacgacgaaacctaattaaaaatttaaaatttaaatttcaaaaatcttttttttcgccataaccaccattgtggaggaggacagtaatgactcgagcagtgtggcggccatcgctgcttcttcggctgccaacgctttttgcgtcacgggcgaagggtcggccatttcggcaccgatcggacaacaactgtaatcaaaaatgatcaaacaatgatagaaatgccgtccgaattaaagtgccgaaaacctagaatgccaaaattttgagatttgtttggaaaatcaaaatcagtgtcaaatagctcaatttttttgagatttgatccataatttattcgagaaactgatagatgataatattgcaaatgatgccatcttgttagatggccaagagttatggcttcttaaacttggctgagacggagttggcccatctaaggttaaacaaaaaatgcttttcccaatgatcagaactgacagtgtggtgttgttctgctgcagttgttcctgctcgggctcgcagtccatggccataatatttttgttattgtttgttgttgttcatcacatttaatgccattgctttcacatccaaacgcagggtgatgaccatcacaaacatcaattttcttctgcttcgaaaaaattttttgtttaatttcttgannatnnttagaaaaaaaaagttcaaccgacgtttagtcattttctatctggngtttgatagtcctgggtctggctcctaatttaacatcttgatgaatttatantcagagaagtattctattcaaaaaatacctatcaaatttncaaaaaaa

SEQ ID NO: 7869 - DNA, 1448 bp, Heterodera glycines
gtcgggatccaaggataaatccggtttaggtcctttcccgtgcaaccctaagaattaaataattaattaattacccaatgcgccctgttgttcgagccgtcgacgactccgttctcgtcgaattgacggcttacgcagtgaacagttgcgcatgaatgttgcggagagttgggaggccaccggtcgatgcgcaaccccagcggcagaagcgggcggacgacgcctgcggagacgagccttggaaaaggacactctcactgattggttggaattggaacaagactctgctcagcaaagcaaaaaatgatcgggaacgaatgggcttaattagaaaaaaataacggatataaaaatgatcaaaatgggcaaaactgatcagtgattatgtgagcgtgtgatcagaattaaatagattcgagaactgattgggaaaaatcaatttttaatcggactaagtaatttgaataaaatcagattagtttggtgttagaaaatggctgatcaagaacagagttttaactgtaaaattaaaaacatatgtctcagctggaaggaatcacagaattttggaatcgattgatcggggaaattatgccattatagatcgatctggtcttactcacctctttatgctgaaaatgatggtgatggtggtggtgatcttttgttggtgatggccatttgttgtaattgctggtacccggtgccgttgtcgtcgttggactgcttgaatttctccggtttgaagttgctgttgttgtaccaccgccttggacacattggcacgtgttcggtgccaaacaacatgtttttgtgccattgtcggctgcactaagccaaatgttgttgttgttgttattgttggcattgccatcgacgcattcatcttcctgaacgaaaattttatgagtgaaaaatcaaattatttttgtctcaaatccgacaaaaaaattcagtctcgattaagttcattggtcaatttaaacagtttgatcactcgagaaggaattacaatagaggattttaaatcagtgatcagaaaccttggaacataatttcaatctcaagcaaaaacattgatccaaaagtcattgatcatctatctggattaaagtctcggaaagtagcaatgatcagaaaaaaccggattttgatcagtgatgaaagggtcatttcgttgatcacttggttaaacatgaggtttagcattcattctcgagtcaaaccactgatccatgtttcctccagctcggtaggcgagattgggtggtttttactaattgccaattatggatttaattgcctgacaaacgcccgaatcagcggacagtccggaggcacgggccaccgaatttcgggcaaagaattggctgatttgttgcggttggatgccaaattgacagttcaagcaggccatcatatttgttgaagagcaattattattatta

SEQ ID NO: 7870 - DNA, 3219 bp, Heterodera glycines
  unsure (1)..(3219): unsure at all n locations
gaaaatacagcagatgaaaaataatgaaattttttgaatgtcgtgccgtaccatgagcncattctggcctcttcctgcagttgtccaacaacaactttctgttgctgttgtgccgtaatttgtggcaccattgccgtcgtcgtcgctggcaattgatgatgcaatttcatcatcatcatttgcatattccgtttatttgttttacaatggcgacaactttttctgcgtttttgggcatctactgcttctgctcctcctgctggtggtggttgggttgcgggtacttgttggtctcgttgttgttgggggtgttcattatcatcatcattatcttcagctgatgaacaatcccgagacgaagacgaacaggaggctgctgagcctagaattggtgaagaaatttgtggagaatcgccaggaaaattttaaatcgccagggttcaattttcaaattatatacctagacgatgttctcctgtccctcgcaaaaaatttaaggaaaattagataaatttagtttttttttttttaaattttgtaagaaattttagtactcctccacgtggataaaaattttgtgagaatttggaaatttttttgaaaaattagacgaatttaaacatttataagcgagtagagagacaaagaaattagggcaattttcgaaaaaatttgacaaataccgtttatttatttatttttttacctgcgaccatcggcgacgaaatttgttgacgtgaaattttcgaactaaaagtaaaaccatatataaatttagcagcaaaatagaagaaatagagaatgaaatatttcatcaaattttgtaatttaattttttccaaatttgtcaaatttaaatttgtgccaaatcctctcccaccccgaagattatcggcataatgttgttgctgttgctgcggttgggccatcactttttggccaatgtgccgtcgtccagtgccgtcatagtcatagtatgtcatgcgaagcattgccggacgagcctgctgtactgcttggcattgagctcgcccaacagttggcggcgattgactgaagaatgaagcgccaaattggacaattaagagagttaatttaacgggactgaatagctaattatgataattaatggacatcaaaatataaaatgacaggaaaagtttgagagtgtgaaaattttcgaaacaaaaactaaccgaggcttgaccataatatgcgagatcaactcttttcagccatgagaatcaggagaccgagaattttcggtaatttagtagttctcgggccacgactcgagaaaaatttcgggatttaggtcttggactggatctcgattttccattttcgagaccaaggccgagattcttttcaccccaagagctccaagataatttggccataaggatcagtaggagacggagatttggcgttggaaatttaccaagagttgaccctaatttgtaagagtcaggagggcaaatggatttagttattctcgatttttggaaatcccgaaaaatatataaaaaaaggaaaaatatgtttttttttttgcaaattgccttatgcatttgggcctttgctgtccaccaagtttgaatgcactgcttgctctcattggccattgttgttgattttgttgttcgacgggttcttcatgcccatgggtaagcattgccgccgttttggccgtttcggcacgtaacagaatatgccggagctcctccttgctgttgttttgctgtataataattaataaattattttataattaaacaatgccaagttcaaaaatggtaataatatttataaaatattaaaaattattttaaaaaccatttttttcaactattcaaaatgtatttaaatcttttaaaattaattatagaatgactaattttgaatgaattaattcgtcattaataaaacaaaaataaaatatgaaattgaaaaaatatttattattttttaaaatcaaattaaaaaatccattaaagctaaataaaaaaacactatacatattaaaaataaaattaaaatatataatagaatccatatgttaaaatataaattaaattaaaataaaataaattaaatcaatttaaattaaatttaaaaaaataaaataaaataatttaaataataataaattaaataaagtaaaattaaattaataaattaaattatattanagaatataagcattccataccagttttggaacgttcgtgcgcgccacggcatcgtcgccccgtcgtgccgccattgtcgccgcctgttggcgcagctcagcatgccattcccgcactcggcatgccactcgtgcagtgtggcgtgccaatgcgcgtcgtatgccaaccgctcgcgcgttgcatccgccacgcgttcgttgtcgcgctttcgctcgttcatcagttccgtgaagcggcacatttttgtgtgcattttgttcacccgttgcagcttctcctcgtacatttggcgaatctcttgcgcatgtcgaagctcgtgcatccgcttcttcaccagctcttgctctacgagggaagggggagaaatttggataattaatactaatatgagaccgagtagatttgggtgatcaattaaggggtaattagcctaatgtgatcgattaagtataattagccgaaatcgagtgatcggatcagaactaggcgcaaatttaatcaatgctaatgagcacacctgagatcaagtggattttggtgatcagtcaatcgcaaatagcgcctaaggtgatcaattaaggctaatagccaaaattgggtggtcggattatgctaatgaaataaagaacaaggttttgaatgataggacaaagccaacaatgatcaaatcacgttggacaaattctcggcacggcacctaaggaccggttaaatttccaaaaataggactaaaagtgtctacttttattaataaaaacacttaaaaatgtcaaaattccatggattttcgtaacgatttaaaattaaaatccctggaaattttaccccgctgctgttcccccataaaatccatgccgctgttgtgcagtttggccattttatcggtaatgtcacgcttccactgctcccgccggtagccccagccctcctcctgcaattcggccaactcagccctcacattgctcaacaaatcctcaaatattgtaaatatttaattaattagtgtaattaattagcataatggtta

SEQ ID NO: 7871 - DNA, 3699 bp, Heterodera glycines
ttggcattgtgcttttacgcaacttttcgcaaattgggctttggaaaagtacgcgtggtggtgtgccctcgtcatcttcgccctttttgtggctgtttgtttgttgataattgttttccgcgaaatctcttcaccggatcctcaaatttgtcgttttcacaaaagtctgtgagtgttcaaactttggaagttttttcgcacttaaatctctcctcacttttcccataatatttacctaatttattttattatttatttttcatttttttattaaacattcaaatatccacataatatcacttcgtcttactttgctgatatttcaaaatctattttggtcccttttcgtgccttgattttattgtatacacgccattattgtattaaaattaaataaattccactgacaaatgatttatcttaattatctttccgtaaaatttatttaaaacatttttgggacggaagtggtcttgttttttggtcggcgggtggtaatttggcgaagttggttcccaaaaaagattgaaccaaccaatcataatttaaaaataattatatatggatgggaggccgggcatagaaaaataaaagctaaagcagagaaactggccaaacaccaaattttgttttgaaatgacgtgatttataaaaattctaacctttaaaaaggaccaaccgggctaatctttaatcttttaatagtcaactcatcaatttgcagtggttatgaaatataaaaccaatccgattaaagccgattacaaaattggcaacaatgtgagtttattgtgtgtttgggtggcattttcaacaaattcacaaaaatggcatttagaaataattgacgaatccatcccaaaatctgattgttttgaggttaataaataatggcatccgtatttttaaggttcttggggtcggaatcaacggaaaagtggtggaatgcgaacatcggacggacggaaagaaattcgcattgaaaattctgcgggacattccgaaggcaaagcgcgaggccgaattgcactttgtggccagtgggcacgcgaacattgtgaatgtttacgacatttacgaggtgcggctggttttgccattctcatccatccaattgctgctttcttatttagaacaattacaatggcattccgtgccttttgttggtcatggaatgtatgacgggcggtgaactgttcactcggatacaggcaaaaagaaacaaatatttaacagacactatttttaaatttggaatcggttaattttaatttgatttccgttttaggaacggtctggcggtgctttcactgaacgtgaagcgtccaacataatccattcgatttgctccgcagtttcacatttacatcaaatgggaattgcccacaggtctcccaaataaattttgctcaattaaactattatttacattttacttattggcaaattatgcccaactatttcagggatattaagccagagaatctcctctacagcgaaccgagtcccaccggcactttgaaactcactgactttggcttcgcaaaacgatccgaagatggcgaaaaatcactggtcagtgactgttggattggactttgggcaactgtttccctctaaagttggcaatttcttcaggtcactcccctctacacaccttactacagttcgcccgaagtttgctttttgtgaatgcgtcctaattgtccgtaataacccattaaaggtcttcagctcacaaaaatacgacaaagcgtgtgacgtgtgggcgattggcgtgatctcttacattttgtgataattatttttgcttgattttgctcatttcaacgcccttttcagattgtgcggttacccaccctttttctccacccatggccttccaatttccccgggcatgaaaaggtgggttttcacaagagaaagcaatctttagaatgaatgaatgatgctttcgttttgtttagccgaatccgagctggccaatacaatttttcgggccccgaatgggaccgcgtgtcagaagcaggttccttccgccaatcccttgcctttttgccattttttgttttattctcagcgaaggacttgatcagacgttgtttggtcaccgacccggacgaaagggcgacgatcactcaactaatgcagcacaaatggatcactcactacaacaaaaatccggcgactgcattggccacccaaaaagtgttaaatgaaagagaggtcgactggtccaacttttcggtgattttttttctttttccgcaaacaattgctgacaaaagcacgtcgaatggatcaacttgagaatgtgaattgtgtatattagtacgcattttttgttgattattttaaattttggcgacccgaaagcaggaaaatgtcgattttcttccccctgtgccatttttggagaaatttaaaatctaatcttttgcctcatcgaagaaactaacaaaaattaccagcaatataaattcataaaaataggaagagatggaaaatgcattagcgacgatgcgagtgggcgacgtgcacatcaaacaaatgggagacgcgcgaaacgcacttttggagaagcggagaaaacggacaacggaggaggaagagcaaaaagagacactgccggaggggacaacgacggaagagggggactgaaaatgacgaaacgggaaagaatgccaaacacagcccaacaacgacgactaatcaaattgccagatcaaacaaacagctgatatctccatttttcaatttcatattgctaaatttttatttaatttaagaattactaactttttaaataaatttttgttttgttatcccatttctttaaattcgctgcgaataatttatatgcgaaattggtgatttaatgtaatcaaaatcattcacaaaatgtcaatatgtctcaataacgaaattcccatcggttggcattggcactcttttcgccgttcatccccccttcgcctttttcttccctttgtggtccactgtgtccactacgataatgcccgtgtgaagggcgaacagaagtgagatggtaattgaactgatggcgaagaacagaatgtggtgcatggagttgcgctccttcttctccgccttgcgcagttccctctcaattcggccctcttccattgtctgttgggcgtccattttcagcttttgccacttttttctcgccatcgcctgttccttgatcactttttcgggcagtggcaaatactgaaatggcaaaacaaatgctattacaaaattacctaaacttacaatactcaaaatggaatcgacgaatcggacgaggtttggggtggccgagaggtgaagctgaagccgatcattgggcagaggggtgcgcagcagcggagccaaacagccgaagacgagcgcatcgatagagcatggcctggggaggggggaatgatataattgaaaaacaaatggaattaattgtcagacttgtcgccacagaaatatttgttgtcggacaactttgccgaaagtaaattcattgcctaaaaataaacatcattggaaagtgatgggaattgacatttttttccaatgcctgaattgcatccaaagttagctgttgttggttctttctgatcgctctgactgttgtgtccattcgtctccgtctcctttccatgtaataaatgttgtatgggaaggtgacctgttgggcat

SEQ ID NO: 7872 - DNA, 900 bp, Heterodera glycines
gataagaatgtcctatgagaaggaaatagcaaaaggtaagaattcactttttaacacaatgcctggtcggggtcctcgtaggagagaaaggtttcccaaccgccatttgccgaatagtcgcgacgaacgagttcgacttggtaggggcggactttctcgtggatttcctgacaatgggtcgcttttttcgaaccgtcctttcgatttccccccccatcccttcttttcacctgaatgcccacttctcgtgtccgcacatcgcgacatttcactcccaactgtttcatccttgccatggcatgttctcgcaaattgccatattcgacaccgctcgttaccaatggcatcggaatgtctcgttgcactcggtaaacgcgtgtccatgggggcaccaaagagagaatttgggcgaccaaatcaacgaggacctgaagcagaaatcggatgtaatgtactgaagaaatgattgttaatttgcgaaaagcaagataaaacctgtggtgggtaactttggtatttgtttgctgaccaaagttcatagaggccggtcccccgaatgacgagtgtcgggtaaattttgaggccgtccggtcggaactcggggttttcaaacagttcaataaactgacaatgaaaacggattttatcaaattgattgttttgttggaatgacctgttcaatgtctcgttcaatgtcaacgtttggtctatagagaaataataaattaattaatattaatataaaaattaaaatttacaaattcggcatcatatgaataacactgaaaataaaacagaaatgaaaaaatgagaagaaaactcctacactttgtagcccgtgtccttggacatgtgaaaacattcgcaaacggcttttacctaaacaattcaaatattaaa

SEQ ID NO: 7873 - DNA, 1732 bp, Heterodera glycines
  unsure (1)..(1732): unsure at all n locations
atgatctccgcaatgtttcatggtccaatccgacgtcacaacgcaacaaaatcaaaacaaatgccgactttcggagaaattcgtcccaactcggcctgatcagaagcgaacttcgcaacgtagaaatgttgttgaaagcgatgccaaccaaaagcattcctaaaaaggcggaaaatgaaaaaataagcggagaaagtgccgaagagaggtggcaaatgggccaaacgaaacaaatggccgacgcaaagtgcggaggcccaaaggacgaaaagggaaaaaagcgatcggacaagctgatcaggcacttgttcatcggtggaaaacaatgtcaaattgggagaagcgatcgacgaattgacgacgatcagaggggaaatgaaaggacgcgcgaaaagagcgaccaaagtgccgtagagagagaggagaacgaacagcgaagtgagcaccaaattgacctggcaaaagcttatacatatcatttctcataattctttttgctattttaaaatgccaagaaacgaatgccaaacccacttgtttattggacacaatccgagacaatttccccaacagaaagagcggcattttacagttggccgacctaaacgcgaaatggacaaatggatgaaaaggcaaaggggggggggnnnagggaggggggagttggcatttgtcaggggacatttggctaaaatgcagacaaaaactgagactctgcgtaaatgctagatattaattaattgcttgtcattactgactgactaattgcggattgtctcagtcgatctttcagcgccctaatggagagacaggcttaaagtttaaactgtctcacgacataaggcgataatctgtgggacgaacaaatggaggaactaaagaaggggaatacgtaactaataattggattatgaaaatgatagttgaaaatgcgtcaggataacaaactccattcttgaaataagatatcagataagtgtaatttgcctcaaatgaaaacaaggaaaataaaatataataaagaaaatggtcaattttgtgtatttttttgtccttttattactttgaaaatgcaacattttaaaaatatttttattcattttttcaattttaattctattttcgattaaatttcctttttcatttgtttggttttctttcgtttcttcttcttttactgcttttgctcagctgacaatgccccgtttcagcacattcccgtggttccatggaagcgaaatcggttgnttctgtttgttgtcgnntttgtgcctgccgttttccngcgtgcgtttnnnttgccttgntcgtttggttggtgccgctcggtccggtnttttgtcccctctgtgtgggggttcgtcctntggtgngggtcggcgccgttttcgctgcgtggttgccctgtttggtttccggtggttgtttttcttccttttgntttgnttnctntttgnttggtgggctctcgncgcgggncgcgttgtctggcccntnggtgcggtncgtcctttgggggcggcnctcctccgcggcgcgcctgggccgtttgtcgggctcccggggccnngtgntcggntgggcgntctcttcgcgccggttgtcctcgctgtcgccgctggnntncgtgcgctgnttgggntggctcgaagtgagggcctgcccncnttggcgaatgagtgagtccctgacaaatgcgggatgacggggtaattgccgaaccgcaagtgga

SEQ ID NO: 7874 - DNA, 3471 bp, Heterodera glycines
  unsure (1)..(3471): unsure at all n locations
tttcttcngtttcttcttcttttactgcttttgctcagctgacaatgccccgtttcagcacattcccgtggttccatgcaagcgaaatcggatgattcaatttgttgtcgaatttgtacctaaaaatttaaaaagtgcgtttaaattgcattgatcgtttggttggtaccaatcggtccgatattttgtccaaactgtgaagggatacgaccaatggaaagggtcggcgccgtattcgctgaataattgccctatttaatttccgataattaattttcttccatttgatttaattactatttaattggagggctctcaaagcgggacgcgttgtatggccaataggagcggtaagtccaatgggggcggcacacataagcggagcgaatgggccgaaagacgggcacacggggccaagtgatcggatgggcgatcacttcgcgccggtagtcatcgaagtcgcagatggaataagtgcgctgaatgggatggcacggagtgaaagaatgccaaaattggcgaatgagtgagtgccaatcggaccgggatgacggggtaattgccggccgaagtggaacgaatgccgcagagggactgcgaccgggtgaggcggaaggagcggttcagctcaactgaccgatttattccgtccatcgccgaccaaaagcacagatcagtggtaaaaacgatcaaaaataactgttagaaaacaaacattcaaaagaaatacacaataaataaataaattgatcagtttaactttttaattttcgtggaaatggcgaaaagagtcaaaagtttcggttcgtttcccattgcaaatcgattgatcagcagctgggaaaagcggcggaacaattgttcgttcggagtgttcgccgctgaacagacggatgagagaaactccgtccgattcattgggtttaattgccacagccaagcggaccatcgcagcattaaaactccgattggatgggagggaagtcacacaaagccaattttaattgattttaattgccaattttaattgattttaattgtcaattaatggcatttgtttaatcatatcattaaatatcaatcaattttgaaagtttcatttcgggttttcctccgtttttcacaattcctcgtgttcctccgcctttgggtgtccaaatgtgcctctgattagattgtattcgccgtacgtctcggtcagtgcgtgccaaaacttcagtctccgaatgtccgcccgttctttcattttcggcttcggtccgtccaccagcaaatgtctcatcggttcttcttggttggccattctccaattggccatcatcagctcactttggggctgcctttgtccatttttgaattttattaattcattttgcctatttttaccctttcaaaatgaaatttgcgtatgcgtcgacgagcatttccaccgtccgtttgcttttctccgtaatattcgcgtgtttctgtgccggttttgtgaacatcaaattgtgatctgagccgtggaaggcccctaaaatgcttatgaaatgccaatgttcgctttaatttgatggcttttcgcttgcttttcactgggatttgctccgcaatgtgtgaaggctcaaaataggcattttcgtacagccaaattggccatcccaaattgattttgagccgcgactcccaaacacatggcattatgtagtgcaaatcggtgagcacctttggaattgttcacattttcgaggccaactccaaaacttcgctaaattaccatactgtaccgttccaaccaaaatgcattgtctttttcttttggcatttcgtattcatcgccaaaaaatttgacaattttcgcttggacttgtttggcgttctgtccaaagtattgctctttggccacaacttcgcggacgaatgcctcaaaatcggtggccccataagtgccaatcttttcactgggcacgacatattgagtcaaagaatcattttggcgctgaataagtgctgaaaaaacaaagaaattggcatttgaatactttgccaatttgcttactgtaaatgagcgattccaattgggaaaagccgaggagagtccgtttgggcggggattcgtggatgagttcggggaagtcgcgggggaagaaatggccatcgaaacgggggccaaatttgcaaaagttcacgtccgatcgagtcggtccctgtgaaacgaaaaattgaaaaacaaattcaattcttttcagcagcagaagagactattttttcgatcgcattgtgcaattcttcgacgcttttctctcggagacattcttttaattccaacgaatcgtctaaaattatttaattaaatactttttaattaaatttttgctcattaaattaaaattggttcgtctctttaccggtcgggcagttcagctgctgtgccaacactttcgtctcattagcgaccggtgctcctgtttttgtttgtgccaaaattgtgccactaatttgaattgcctggtgaaaaaggtctaaacaccaagtgccatgtttggcaattgtccattcgctgcccatttgcctcttgcgaatgggcacattccgagtgccgaaactgcggctgagccggcactgaaccccagcaaagtgatccgtcgcgggtcgcccccaaatgcttttgcctcggaacggacccatcggagcattgccaaaagatcccacaagccgagattacctaaaacgagaagtgctttcaaatattgagcgaatgtcaccagcatttaacccacccggcattgtcttgtctccgctggaggcaaagccgagaatgccaaggcggtgctgcacaaccaccgacataatgccgcgccggacgaacttctcgccgatgtccgagaagtcgtaccgatgtgccgagccaatttcaaagcctccgccatggattatcaccaaaatttggctcaattttgaagcgttcgcttcctaaacccaaatttaacaattgataagcaaaaagggaatatgggcttcgttttctggttgccttgtgtggagtaatcacattcaaataaaggcaatcctcggaaaagctcagttgggcgtcgtcgttcgcttccctttcggagggccgcgcgtggggcacacaagcggaagcggaacggaccgcggagcgcacaccgtcccacttttgaggcggaatcggcttcttcaatattaaatattttaaattaaggcgttctgggccactaaaggtcccaaaccccttcctaatgccnggcaangttgccgtnctttcccccccccccccatttgcttaatctgcgcatgtcacttcaaaacgaagcgcaccgacgggcggctcggcgtaaggaacgcccaaaaaaacatcgacaaaattcggcggagtcgcgcagagaatggacaanaccgcgaagagagcncgtaattttgtgtganccnaaaacggggaagaagaagcaaaacgggggaagtgaacgg

SEQ ID NO: 7875 - DNA, 1759 bp, Heterodera glycines
ggagtatcggcaaaatcccgtcaggagcaccggtccctgttcggtctctaattcttattgaaattgatcagagaatcgctagattcatgatgtcatggttccagataagatctgaatgtgatcaaaattaagaatctcaggttcgatcgtgcacgaaagaagaagatttgctctttttctgtgaccggaatccctagatcaaggttagatcctcagatcgcccgagtttctgcctagatcgagattaacgaactgataggcgcaactaattagtcccataatcaactcactcgccgatctcctcgaacagtgtgtaatattcggagaagcgttcgaccctatgaattaggatgccgtcatcgcatcgggaaaaacttcgcccaagattcgtcaaaatggttcaactcatccacatggaacgcatgagaagcaacaacggcgtcggtgccggtgccattgatttcggagcaatcgctggaccaattaatcccattccggacccgcaaaatgccatgtttactgaaaaatgatttttgtattaggcatggattgcgtagggcgctcaagcggaatcggcacggaccacagagcacgcaacatagcactgaagagccggaaacgacttctctcaatatgaaatattataaatcaagccgtatttttccactaagtcccaacccttcctaatgccggcaaagtgccgtctttcccccccccccccccccatttgcttaatctgcgcatgtcacttcaaaacgaagcgcaccgacgggcggctcggcgtaaggaacgcccaaaaaaacatcgacaaattcggcggagtcgcgcagagaatggacaaaaccgcgaagagagccgtaatttgtgttgaccaaaacgggggaagaagaagcaaaacgggggaagtgaacggagaggaaaatggggaggagaaggaggggaaagaggggaaaaagagggccaattggcatcgatggcaaaaagagggaaattaaaaggggagaaatgggacaatggcaaatgggcaaaatggcaaaatgaacaattgccattgaacaccagcgaagtgagtcccaagggattcatttgctgatttaacccaataaatgaaaacattgagaaaataattaattaaatttaatttaaaaatattcttttaagaaattttaacattttcacagcccactttggatctgtctttttatgattgaatcaaattttaaatttaaaaatggtaaaaagaatttgcttaataagggaaactaatcagggagagagagaagcatttggtaattaaagctgattaaataaataatcgaaaagaatttttcgtttttgtttaactcgcggcagagatggatttatccaaaagtttgaataaatgtataattaatttagcaaatccctccggctccccgccaaactcgtgcccggtgcacagcagttcctgcttatcatattcatattttacataatattttgaattttttttatctaagttttgttgtaaattattactttttcagaaggcaataatttttgatgagagaaataaaaaaccaaaaaataaattaattcaaattaactttttgtgctttttcggtttaaagaaattcttttgtttttcaataaaaacttagctccgtttattttttatcaacagaattggagaggaaatggaggaagaaaaatcaatcaaagaccaaattaattacaataattaggggggggggggagaaatgcatttttaaggaaataa

SEQ ID NO: 7876 - DNA, 5552 bp, Heterodera glycines
ataagtaaggaaatcaacgtaaggaagggaacacctttttgttgcttggaatacggtaaatcagttattagggttaactttttcgatgtccaatttttattcctttttcggtggagaatggtgtccgaaggaatggcaggctcatctgcgcaaaaagcggcgactcgggcgatttctagtctcagtcctgctgtcttctatgttcctaaaggcgattgcaagatgctgcatatggtgttcaaatgttatcagaagcggaccaatatgtcatcaatgtaggagatcacaacatcattgatcactccttcagtacaggcgtgtcataaatcgttgaaaagtgctgacggcgttagttaagtctaccggcataaccacgaactcaaaaagggcatgttcggttgtaaaggcagtcttttcaacgtcttctttatccatttttatcggagcattgaacggtcatgaaattcaagatacacaaaaacttttgaacccttaacactaagggggttttgtctatgatgttgaatccatgtggaaaaaattgaagaggaatttcaaacagcaatttgggaacaagactgaaacttacgacacctacttcccagaatttatttggcgtcagcgtttcggtgatcgtgaaaatgttttttataatttttggctgcatgtctctgagttttatccatgcgaacattgaatttttttttgtttttttttttcttttttcgtgcgtttggagcgattttgttggataaatgtgaatttcgaaaaatttgagttttcgatttttgttcgaattcggatcaggggttcggaattgggtgaaatggatgccatattcgtgctcagcgaccccgaaaaccttataataaatatttttatgacttttgaaattttttaaaaaaatttcaaaaaaggtgtgataccatcggtactattacccgaaaattttgaattttcgactttttgttcgaagttgggcccgagaatttattaacaaaatgcaagaggaaaaatgcacccctaatgatttttcatctccaaaatttattcatttattttacaacgagaattattgattttaaattattcaatactggtctggcttctgggaaacatttgttttcctcgaataccgcctggaaaggcccaggaatcgagtcgtttattgacaagtattatgcataacaactgaacatgtgatacagacttgcattacaatatattcactgtacatcaaatgtcaaaaatatcgtcctcattgctccctcaaaatcacaaccaactgcagaattgccccaagatgcccttccgtttcctagcagcattgtactgtgccaccacatcatatgccttgcgattcgcacgcgtggccattccgacagggaggcacagttggacggcggactgcatatcacgaagattcatggtcttgcggcggttatagagagcaatgagcgtagcttccgctgcaatgcgatccatcaaatcgttgaggaacatgaaattttgaaaaaattggatgaaaaaaattaaaattcattgcttgagcctttacggccgaaactcacgactccatgatgttcaacacacgcgttgagatttccttgtccgggtgagtttgcttcagcatccgtcgaacgtacagctgaaataggcggggggggggggagaattacccaatttggttgttttttaagcaagttgtgaactgtaccttgtacgactgctttcccgcttctttccttcgtcgtgccattttgataggtgttgttgagaatggtactgttgatgaacttgagcaaaactgtctgtttctgtaactgaaaaaaaaatgacaatcagaaaaaagggcctcagaaattacgcgtgtgcaattgacggtgctggcaaaagtgaatgatgaaggggatgaaaatgcaaacataattctctgcttttatagggcttgaaaatgagtggctggaatcggtaactaaggcataacaagttgcttataaatagcgcgaattttagcaatcattttctttgctgtatttattcaacagtaaatcaagttgccatacaaggaacattctaaaaaatattcatttttcattcgcacataaatttaaatattctaataaaaaaggtataaagtaaatactgaaactttttgaaagcatatcagagatattgagtttttctttcgctttttctcttattatgtatcagttgcagttgctcagttttctttcatcgttttcgcgctttctgtccacagcatcgattagaaagcctccacaaatctttgccgaaatgtgatttgtgttcttatgcagagaaattgaacactgagagtttaataactgaacccaaaattcgaccaatttggcaaatcgctgtcgacgctttgtcagtgcttcggaatctacagagatttgcaggagaacctcttcagtattaaaatccattcttttgttgctgttgtgttccccattttcacattggagcaataaaaaacggaaagatgatgaagtctctgacgccaactcaaattttttttctaaataatagcaaaatgaaaaagagaaatttgaccgaattaaaccaaggttagcttggcgctcctttactgacttgacccgatctttgatttggcctccattcactttaaatattcggttctttccaacgccgtcattctcataaagcatcagaaaaagtgcgtcacattccttgtggaactgtgaaatattctaattgaggaggattcatacaaatgaattcacggcccacctccccgattatttctttgaatcgtcgtgcgttgtcaattctgagtttgtacgcattcaatgcgtttctcagtcgataaattcgcgtttcgactttgtgcaaggattcgcccaatgttttaagctccttcggtttttcggagaagccattcgcttgacactttctctccaattgttccatttcgtcgttggcatttgccaattcgttcaatttttcctgaatttttttctaatccattctattcgtcctcatttgacctcagtttcttctgtcagtcttatcctttccctctcaataaaatccaagtaaaaaatttctccgctgaatttcgtccaaagttttttccagcagtcattcacagccgtaagtcccctttctccgtgctcgcctatccaatcaaggagcagtcgcaccgatgcagcaacacgagccacagagagttcgtcgacacatttctgtaagtcgacacgtagaaaagtttgatggaaaacccatctgaatgtctgaaatttttgtgtcgcacctccgccggccaaatgccgccgttccgttcagtgattaacccgacacttgagctgcacgtaatttcaaattcgcgttctttttgcgttttgttgtgacgtccggttgataataatgaattcattgaggaaaaatccgtaaccgaagaagaaaggccattgtaaataagcgaatccctttgtcgttgtgcgatggctaaaaataaaatgcaaataaattacaatctaaacaattcactcatttaattatttacaaattcactactttttgcttctaccaaaggtctcgcatttctcgcacatccaatatttgccaacaatttgggttgttcctccctttgttgacctttttcttcgaaaaaaccaccaaatttttcctgtgaaagcatttgattttgattctgttgaacaattggcatcagcgaagtcggagaaaataccgaatccaaatcgtgttctactaattcaattaggattgtacgatctgaataaagtggattttgaaaatcaaaattgactcaatggcctagtgctcacaagcatacgagttcattctctttttagacttggctcctcaagagctaccgaatgataaatttattcggtttcgatcgtttataccgtttaatcaacaattgttcctaaattttgttaattccttgctctttgaccttttctcatcaggcgcaaaagagacgccgttgaaacgttcgcggaaagacttcccaccgacaatgaataggaaggattggcagcgaaaaacactgaaaatgcctaaagcgactgttttagagcgggagagaacaatttgcctgcttttttttttgtttattaattaatttttttttcattatcacattgctacggtagccctgtcaatggtacggtaatgcaaagttagactgatgagaaagtgaattctttgctgttgtgtcggttacaaaatttgtctctgctttttccgctttgttcaccttcttcgcatcgacccatttccccgctcgcatttttccgcgtcctttgccaatggcgccgctttcgtctgtatcggccaccaacgatttgcgttgctgcctcctcctttctgccgttggcttttcactccaaattgactgtaaatcgaacagagtcgccaaaccgatgaaattcaaaagtttggagtggggacaaacgatcacctgacaaatgtttgtaaaggccaaccaacgaagacttaaaaagaaaatcacaactttttctcactttgaaatcgtatttctcatgcaaaattacgtccagcgctacgcgatgctgaataaaccaatcttgctccaacagaatgcattgccgaattttataagccaaagcgctttgacatgcgcgaagaacgagtcgtaatgcctaaaggcgcctccgtgactaataaacatcattaatccattgtgttttaatttataagtgcatgcacaacaacagactttcattggcactttgggcgcgtcgaggagcacggtgatctgttggtccatggccaaacaattcgcagggcattgaattcgctcagcggactcatcagcagcattttgagtgaattcgcgcgaagaaaagacgagtaatgaacaaatctgattgcatattgaagccgtggaatctgtcatttacatatgttggtaagaggttaactttaggtggccccgtttagcatgaacacctgccatgaaatcattggtctccgactttttggatcggaattccaaaaaatgtggaattttttaacagcacccaccgttaatttatattccccaatcccttcccctggtaattcacacattgtgtcacagcagcactgttgctacgcattatttctcgaaaacagccagagttaagcatcaaaaagatgagattatcacgaggcaaatcatcttaagtgttcttttccatttttatcaaaactaacaaattaactgctgataagcaagctgttacaactttgctggatatctctggcattttgaggctgcaaaaaagaaagtgatgctcgtttagagctgttattccgtaacgtgaacattagacgtaaatttgttttaaaagaggaaattgcgaatttggaggataaattttgaattaatgaatgttattatgggctgcatttgcttttgatgaatgataaatcccgctgattgtgagctaccgcaaatcccgtccgattactgccgcagcgaatggaaagagggcataggaaggaacaatcccatcccacaacaaaggcga

SEQ ID NO: 7877 - DNA, 2884 bp, Heterodera glycines
atttgttattcaagtgactaatgtatattttaggatcaagaaatgattatacatagaataaaaaatatattaatatgtcaaattatataggatttaaaattgtttataacaattaacagattaattatcctttgttacttttaaaacccaatttaaaaatccatgtccaggcctgggcaagccaggatttttgctggacctgggtttcctggatttttatgcataaaattgtggttcagttccaacattgaatttatgtccagcaagtccaggcttttttcaaaatactgacctccctcaagcaaatatttttcaaaattctttttttctaatttattttcttacattccttcctcctttatttcgttgtttatctgttccatctcttcaacatttcgtggttccttcgaagctggtggcgtggcaatcacaaataataggaaaaggaaaaaaatggtaaaaaataaaagtgatttcataattttcctggaatattattgttttataaatatcagagcataatcggggacaagaagacaaaaaaatgtaaaggaagcgccaaaaattttgggaggcctaagcggaggtttgtcttaccaaataccaaaagaattgaaaatcagagggtcaaaggcctttcgtggcaatttttaatttgagatttttaagtgattgcaattgcaatatgaaacattcatttaaaaactgcttatttgatgatattttgtaataaaaaaatttatggatagagtgaatgaatgtcttagttttcatttgccttttaaacaaatttttaaggaccaaattctcatgatcatcaaaactgaggacatcttagaacccaataatgccatttccaaatcaggacaagtttaaaacattgggacatgccaaaattggcaatgattcctcgaaattccggacatctcaggatacacgattgaatatttctaaatcaggacgaatttaaaatattgggacatgccaaaattggcaatgattcctcgaaattccggacatctcaggatacacgattgaatatttctaaatcaggacaaaataaaaaattaggacatgcaaatcggcattgcagtaatgactcattttttagatttgccttgatttggaaatcggaaaactgatgtcttgagatgtcaagaattttgaggaatcatacgaacccagaattacaacaatgccaattttaagctgatgtcctcagacgtccgaaaaaaattcataaactcgctattctagtgtctaaatttttcaattttgaattttagaaaaaattatttagtttaaaaatatagcataattgattttttccaaaaaattaaaattttccattccgtcacattaaatattaacattttgagtttttctttaatatagcgccaaaaattttctttcgaaaatgtttttgcaaagaattgaaaaccaatgggtcaaaggctgagaaactcttggaatttttgacagatttttaagagatttgcaatattaagcattcataaatagtaaatgccttttcactcataattttaacaataaaataaaaaattttatggatggagaaaggataattttattggcatttaattacaatttttgagtgccaaagtcttatgattctcaaaactcatggcattttgaaagattttaactatccaaagtgacaataaaattaacagaaaatgcataaaactgtaaaaaagaaaattaattaatcatttttcatgtaacagttttaatgagattttttttagagattttcatcatttttcatgtgaaattcataattatatttttattaaaaagttttgaaactttccgtctcgcctctgaaagctaataattaatccaatggttttttgaaaatagcttaacaaagaaaatacaaaaaaagtttatcatttaaaattataaattatacagaattaaacatcttaactggccaaaaaaacaattaaaaattcataaaataaaataaagtggaaattgacgtgatgaaagaaataaatgtaattattctttatttgtcttgctttttattcagataatttctacttttatatgcaaataaggcaccagtggagcccttttcagtgatttatcaattttttaattattcaataaagcaccaatagatagagccctattcagtgatttatcaattaaggcactaatagagcatttttattgtataaacagtgatttatcaattattttattttaaattaataaggcaccagtagagcgccctaatctgtgatttatcaaatgggcacttcgaaaaaattcatgaaaaataaatatcaaaataaattttagttaaaatttaatgctagttaattttttcggccttcaaaaaaaacatgaaaattttgaaaactttttcccttatttttttaatttacccaaatatccatccataaccgggctctgttaggtaccatgtgatttcgtcagtaagggatttcgtccgtgataataattatttttttacaaaaactaacttttaatatttcataaaataaataatctaattattattaacttaaatatgtagactcaaaataaaattctttgctcgattaccaacctataattcggccggtcacttacatatattaattaattgtatttgtgcctagtctttgctacttttatctcctgtatattgttaatttctagatggtctctagccattatcattctatattaacctcggaatttcacttctaaatttcttactattaattttgtctttccgcattttgagtttgttgattgccttgtcatgttttctgcctgcaaatcgaagccacattaaaagcgtaaatcagaatgagttcgacaggacaacaatttgagcatactt

SEQ ID NO: 7878 - DNA, 3228 bp, Heterodera glycines
tggtgctaggtcgtttcgtaaaaagtgccactatgggcgtttcgtaaaagtgccaggtcgtttcgtaaaagtgccaggtcgtttcgtaaaagtgccaagtcgtttcgtaaaagtgccaccttgggacttttcgtaaaagtgccactgtggtcgtttcgtaaaagtgccattataaaaatatggttgagtatagagttatgaattcaaaaaaaatttaaaggtgccaattcaaaagtgccatcacaaaccaaaactttacagtggctatttttgggctccaagtacatataagtttattatttatttagtaatcagaacgccaaaactttgcaaaacttaaaatttttttgggattttcccttgtaaaaaatagaaatagccgatctcgaattaaaaagcattttggtaaataaacaaagcattatcctataaatggagtaaaaatatgagcctgtgcaaaatttgaaaaaaatctgaccctttggtctattattgaaaaagttataagctaaaaaaaattcataaaatcaagggtaaaataaaatgtttaccttttattgttcggtgcatatcgattcagtgccgacgattcagtgccgacgattcagtgccgacgattcagtgacgacgattcagtgtacgttgaaaaaccgacaattcagtgtcagaaaatttggcaaaaaaattccaaaaaacccaaaaaattgcaaattttattaattggaaaacataaataacgcggtcggccagtgtaattgttgatgagggccggttccgtctcaaatatttttggactcaaattttttaaaatcaataactaatttagaaaaaaaaagtaaaaattcttttacttcgcagcctaccgcagcctaaatatacctggttttttaaaagttgtggttaattaaaagtatattcgaaaataaaattttttgaaatgaatttaacattgcaaatgtccagtaattctgctcgggattctcagtcttggtcctcgtgtcgggaaatttagcagccttaatgtgtccagcactttgtttgcagcgaatccggcacccattttggaccccgaacccggaatataaagattaatttacataaatttcgtctaattttcaaaaatacaccccctgagaaatgaaaaatttcctcaaaaattttgttattttatacgcctaaattgaaactttaacacctattttgaggtttttagaaccgaaaacctaaatattttggcagtttttagttttgaacacccaaaaatattaggcatattaaatatcagggctgccaaaaacatgcaaatgtatttttttcctgccttttccatgctataaataataggaaaaacacgttctttttttgtgtttgcgtagaaaaatcggtatttttatttgcatattttgcatatttcgagatttttgtgcatattttggctacttttcgtgcatatttttggcagcactgttaattatatctcaactttctgttcacattctgaaatttaaaaaaatttgggtccaaaaatatttgagacggaaccgactcttttactactaagacggaaccggccccagatttatttagcatagagtataacaatacagatcaggcagaatttctaaccactcaatttatattgtatttttagtggttttttgaaatttttttgccaaattttctgacactgaattgtcggtttttcaacgtacactgaatcgtcgtcactgaatcgtcggcactgaatcgtcggcactgaattgaccggctccgctgttaattaattaaaaaacaatttcattatgccaatttaaaatatttaaaacaacaactaacaaacgcaaaattaaatgccttaaaaacattgaattttctaaattgaaactaattaatatgtatcaaaaaagattttaaattgggcaattctctttaatcgccactgccaatgtctttctttgacgccgaggaattgatcgattgtctccgttacaatttgacactgcacgacaactcatcagcccatctcagtgcacaaataatccaacccccgcggaggttgctaaatttagggttttttcttaaattattattcgcctcattagcagtttgtgcgtcccatcattatagcgagtagagttcgacttgagacctgggtccccaggcctggggctacttggttttttccttgaaatgggttttcctggattttttttttgtccagaaagtacaattccaggtcaaacattgaacaagggccagactttttttcaaaatgtcgaaatctaattcaaagagaagcaaaaaaaaaaccaccaaatatttaacaagatagtaatgtgcgtttttcctctaaaataattaaattattttaaatttgtttgaatgataacgacgaatgtgtctgggtacaaaaagttggctaacaaaaattcattcggctcacacgcaaatgttttaggctttgctttaaagccccccagtgttatgccttgtatatgaatctgaggtttgcccgccctaaaaatacatacaaatggtggttaatagcattggtaatcgtccttataatttcttttttcactgattttttatttcaaaaagattttcgatgttccgttaaaaataatgtttttcctctaaatattgagacgcataaaatttgttgggattttaaatatgtaatggggcgcataatacagaaataaatcaaattagaaaactcgaagatttttttttttcaaattttcaccctaaggcgtgcaccagcggaaagtttgccattagaattggtgctgaagggaaaggcaaaaaatggaggaaatgatgatgatgaagatgatgatggatgggactgttggctggagcaggacgagaaacggcctttgttggtattttttaagagaaaaaaaattaatcaaattattttgagttaatttatggaaaaactatagaattgggtccgcaaaaaaaccgcccaaaaagggttccaatcaatctctaatgacctctaatcatcgtaaaaaatattcccgaggtgcggaaaaatcaaaaaaccggtttttgcgccggtttaaatcacgaaaaattgcaccaaaaatcagccaaaaccccatttaaaataaaaatttccaaacaaatttggtatcatccgaaagctcttgatgaactaaatctaaaattcaagaaataaaatgaacggatgcctgacaatgataggttttgaacggt

SEQ ID NO: 7879 - DNA, 1045 bp, Heterodera glycines
  unsure (1)..(1045): unsure at all n locations
tctgtttctctgcttttcatcgttttctcctctttttcactgttattgatttattccctttccgccattccctccaacgcttttgcctttgtattttaaaagtgcgttcatttcatacacaacagacacatgtgtataaaccacacaaataggacagcaaaaggaagcatgcttttcaatttattgagggcattacgaaaacaatgagatggacgattaggacatcctccaccaaacgcccaaattaaaattcaatgcttttgctctattttaatggaatgtttagccatttaaaaattctcttagcttgcgcaattaatacaattttaagcaatttctttttcctgtgttttaaacttccttttcgaaacaactgatatttcgcaatggctcgtacgaaacaaacggcacgcaagtcgactggtgggaaggcgccgcgtaaacaattggcaacgaaagcggcgcgcaagtcggccccgtccacggggggcgtgaagaaaccgcaccgataccgtccaggttgtcaccaggaacattttgaattactcggtcctatagaagcgggctttacttggcaacaatccaattttggccattttgacccaaacttgaaaatagagatttatggacattataaaaacggcatatgattatgttacaaaccaatacaattgcatgaaacccttttctttgtagggaccgtcgcactgcgtgaaatccgccgctaccaaaaaagcaccgaactgctcatccgcaaattgcccttccaacgattggtgcgcgaaattgcccaggacttcaaaacggacttgcgctttcaatcggctgccatcggcgctttgcaggtgaaacagtttatagctaaagaatcacgccaaaatgagtcaattccagtccaatacttttgattcaatgaatcacaaaaatggaattactttccttaattttaaccaatttttgttttttttcatattatcagtgatcgcttattgtcagcatgagaatattgtacccggtgaattaatatnttccctattttaggagg

SEQ ID NO: 7880 - DNA, 2919 bp, Heterodera glycines
cttttattttatatttcaacattagtgtactaaattaagtaatattttggtgattttcccttcccggcacctttcaacacatttttttattaacataaaaaaacattagaaagagcacaaaattttctgcctaaatttgggaagagtgagtttgggtaggggataagagaaacgagagggaaagggtgggagagagagtacacatagagtaggattccagagaaatgagagggaaagagagagctaaagtaccattcgtgtaactctagccttgtctactcccattccaaatagtaataattattttcttcttgccttctccttgctgggcacacacccacccctcatgggtttgggacctctatgaaaaatactttttggaacggggccagtccgtaatggccctttaaataattaattatttcattaatgaagcaatctaaactttggaaatgaaacgatcattttcaatatccggcgggagtccaaataagaaattgattcatttataatgcagtcaaaattcaagttagtcagatttaaagcaataaaaaattttttcaccaaaataaatttaaaaaacattaaatttgctagttttatttcgtgtgctattcgcataaattgcgttcgttcattgacttttttggtctttgtaacattcgcaagggcccggctctccgtcttcgcccgcttctcccggcggtccggcggggccgggcggtccaatgcttaaattccaatatttttgttaggtacccctcaacccgaccgattaattaactcatcaatgagtttgaaaatagtgttgccaaatacaaaacaatggtctcaattttgcactttcggtactgtttcgcccacggcgatttgcccaaaaacgaacccatggcgcacaatttggcgtttcacttcggtcccctcctttgcagcattcagcaccgtctccccacgtttgtttctgttagccagttgtttgccatcgacgctttgcgcttcgcttttcatgtgcttcgggcatggcgccgggtctccgggagggcccggaggcccgggagtgccaggctcccccgggggacccggtggacagccccccttgacatggccacgtgcaaaatgcgtctttgcaacggcttctccttcttttgcacgtttgactggcacattcggttccaaattcgtcttaagattaaaaggtttgaacaatgattcggaataagataattagtatcttttggtactattaatttgattttccaactactgatggcattcatttgcccagttttcgctcttttaccataaactccttcggcactgctgctgcttcccttttgcgtttgctcgcattgtcgccgcattttccctggggccccttttgccccgctgggcccggtgggccgggaggccccggcgggcccggaacacaaccggagacgggcgtggtcgtctcctctccttccggcgaggtcactaaaaagggatgcggcgttaaaagcacactaattgtaagcaatattttgaattttgaacggtcgggcggaccgatgtcgtcagtgccccctcccccgcccgtcgaaggaggcgtttcagacgtttcttcggtgggacattcgcatgggcacaccggcgcagggcattctggcggaaaatgttcacattggaaaagcaaccaacaccaattttttttttttttgaaaaaaccggtgacagtcagaaaaaaggaaaagcaattgaaagcggattaattaataattgaaacccgttggggttgtcaattctgtcgtttctgtcgtcgtttcttccgccggcggattgtattttgttgacgctttgtagcgacgagcgaatccgacatcaatgaaatggacaaagaacagaagcaaaagcggcactaaggcccaagtcggtggcattttcgagaatgattaaaaaagaattctctttagtgatccttcgttttgagaataacttttcttttatgtttttgtaaacgatcaacggccttttaaatgcgtttttcgccatcttttaactttttgacattaaaaatatcatttttgggagcgtttaaaatggcaaatgaatgacaatgtttgggtgatcgacaagaatgattgaaatttgttcatgcttattcataaaaacatcgaaaaaaagaaaataacaaataaatggcggcgattgggcgacaaatgcccacacattcaccgaaacgaaacgatacaattacaaagcattttcaaatgatgaataatcctttctttcgctggaacgcaatgaatcattaaacaatattgcctaaaacaaaacaaaaaatattttttaattattaattgtaatatcgaatttttaattttgtttttcaaattgaaattgaacatttcgagagtctcggaatatttccaaagattctccgcctctgcgcgaatcgactgcttctgcagttgtttaattcaacatgtatttaatccgttcttttaaagtttttcagtctttggaattcaaattcaaacaattcactctcttacatacagtaggtataccatagataccgtattctttataaatgatgaattaaaaataaataaaagataatttttgacaattaaattcgtcaacattgaataatcacgctcatgctcttctcattcttcgcatgttcggccaaatgatcagccccacgaacccaaaagtccgccgccgcccggctgcaaaattgtgccgcttgagaagccatcggtgaagctgaattggcgcttctctcggggggacaaagcggcgaaggacaaaaatgggaggagaagaagcagaaacaggaaaagagagaaaagagtgaaaaggcggatgggggaaggcatcggagggttaatggtggaaaattattgaattaattcttaattagatggtaatggatag

SEQ ID NO: 7881 - DNA, 1370 bp, Heterodera glycines
gtaaaaaaatttcaaaatttattcaattttgtgctttttttataatccttgcctctctcctccactcaaatttatgaatttatatttttttaaatgtattatttttccattgctccaatggcttttaaaagttttattcctttttggatgaagtgattttggataattggatgacgatcaagtgaatgtaattagatcaataacaatttggtaaacaaagtcaataaattatgcacagagagagtaattttgggttggagagccgagaggaacaatggggcgggggagggaaagttggagcagcgaaagtgcgtgtgatgggttggggttggcagagaaaaagggtaaagaaatttaacaaaaattgaatcaaaaaataaattgaaaaattgtgccgtcgtcactgctctctaacacatccgttcgcatttcgctctttctctggttcacaatgtctcgttttctttgcgcttctctgtcccttccgcgtctgtgccaccgcctgcgccactcatcaacggaagttcggcggtgcctgtttctgaaaagggggagaaaactgttttggttccaaatctgactgatcagaatcggaatatttcgggattggattaacagtgcagcattttgatgatgtcatgtttcttgagttagaaaattttgggatgcgcaaaaggaacagacactaggctgatcagtgatcacttaaagatttcataactgactgatcagggaaaagtcaaaaaaaagtacgagtaatcagatcatcgttaaaggcagtaatcataatttttgagcctaaggatgaagataaagggggattatcagtctgatcatctcacaaaggagggggatgatcagtgagcatcttcctaagaattggttaaacctcccaaagaagggctttatcctcccaaagagggatgatcagtcttattacctccagaaatgctaatcgtttgacagttaaagctctaattgatcgatagctaggaaatgatcagttgaaggctctgatcagaattgaccgacctgtgccgcctgttgctgctgctgtggcacggcattgaccggtgccgtcggttgctgaaaagggaagaaaatgcgttgatgccaaatttgactgatcaggatcggaatatagattaatagcgcaatttcgatgatgtcatgtttctttataagttagaaaattttgtgatgcacaaaagggacagacactaagctgatcactgaaagcatttgataactgactgatcagggaaaagccaaaagaaaatacgaacaatctgttaatcgctaaaggcactgatcacattttttgagtctaagaataagggcaaagcgggattatcagtcttataatctca

SEQ ID NO: 7882 - DNA, 2710 bp, Heterodera glycines
aaccgacctgtgtcgcctgttgctgttgctgtggcgccgcattgaccggtgccgtcggttgctgagagtcggccgcctcctccgggaactccaactcccaaatgcgcttcaaatgtttgcccttcacgtcacgcggcgtgccaaagttggtcatcatcagcttctgcgagtcgccctcgttccagccggcctgggagggaatggtcgcctccgacttcttcatatcctcgttgcgctcgcccttctccgcctggtgctcgcccttctccgcctggtgctcgcccttctccgcctggtggtgcgtgccattgcccatgcccgcctggaggttcggcgttggcatctggacgaggaaattattttatttcacgtcagatttttctataaattttttcaaacttagaaatttcccaaggaaaaaattcttaaaaaattttttataagaaaatttcaaaaagaattgtttgttaaatttttttaaagtttttcaaaaaacagtaatttatcataaaattcaaaaaaattgctgaaaatttttcaaatttttttttcattaaatttttcttataaaaaaaatttctaagaattttctccttgaaaaagttttaagtttaaattttttatttttttaaaatttctgcggcgagattttgtcccgcccccccccccaaccctattgggtattaaaattggaaaacttgcttcgtagatgatgggaaacagcccatctgtaattggcgaaagattaaatattttttaatttttatttttattacgtttcgggaattcggcgtttgtatagctgaagcctctcaggccccatctgcttctgctgctgctcgtcgtcgtcgtctgctgtgcttccggcggcacttcggcacttttcggcttctcctcctcctccgttgtgcatttgtttctttcttaataaaataatcgaatgttatttaaagcattaaatatgtcaaatggatggtgtttacggcatctcttaacacaactaatgacgatccaaacaatgatcgctccggctccaatgcctccgaagatcgagccaacaatgatccatggcgaagtaccacctgctgaaaatgttcgaccaaattaaattttgaaaacaaaatttaaatatttaccaaaaaatcgtttaaaatgtttcaaatttttttcttggattgtgccatttccaatccaagtgccgccccgccatcccctgctgatgatcgcgcttttcccatctattaattaatattttttaccctcgactttttccacgtgcggctgctgctcctgttggcccaacgactgaaaaacatggaaaattgcatttaaatatatatttgttatggccacttaattcgccttcacatttacctgcgcttcggccggtggcgcactgctcgcgttgctcggcccctgtttttgtggttgtgctgcaattggtcctgctctgttctgctcatcacttgcgctgctgcctccgacgtcgttccccgccgacacctgccattttcaagaaatttgccatagaattaatagtaatgaatgagggatttttttgaaaaaaatttccctaaatatcctgctcggcacttcgcctgggcgcgagcaggtcatccccacctttctctacaacattttttaaaagtttaaaaaatatccatccgtaagaaatttaaaaaaaactcaaagattttaacgagagattaacgattattagtttttcttttggcacgagaaagtgtcgaaaacagtcgaggcattcccggaactcatattttatgactcttatcacatacatctaagtggtaagagaccctaaaaatgccagaaaagcgattaatttaaaaaagtattaacccacccgtggtccatccgctgcgctcggagcactgttctcgctgctcgactgccccggtttctgctgtgctgcttcggcctgctgctgctcacttccgccgctggtccctccttcgttcgccgccggcaacacctgtcaaaaatgaatgataatgatgtgttaatcgtttcatccatatcattttcatttggtgaacccaaaacattaattgttcaattagtgaaagggacaaatgtgccgaaaagcgccaccggaaaatctccaaattaggcaggcagttgctaattgttattttaaaattatttaaaaatggggatttctgctggtgcatttaaatattcccgtgacaaaatttttaactaccgtatttattcgattatatccaccccctcgattagaacccccccccccacctttcgaataaagccccccttttgaagggggttgaaaatagagcacccggaggcaataatcgaagaagtacggtattttgaaatttggaagaaaatttgattctatttcactttatgagtccaaatcttcagtttctttggccatacttttttcttacttggttaatacctatattcttggtatcaagcgaaagtctaaagcctatagaaatttttgtagacctaaattccgggctaaagcaacagaaaataaaattattcatgaatatattcaaaaaagctgcatccttccgggtttctccctgtaatcctttttttttgttgggggtcgcattttgcccctttcctttatttatgatcccggaccttaaagctttttgttcgaaaaccaaaaatggaaacattgaacaaattaaaaaaaaaaaattaaaaaccc

SEQ ID NO: 7883 - DNA, 838 bp, Heterodera glycines
aaaatgatttaaaatttatttaatattaaataaagtcgttagccgagattatttttaattttttgaatattttagagtttcaatggcgcctatactttccaaaataaagcctaagcatttgtaatggactttaaaatatttaagaaattcaaaagtaaatctggttaatgttttatttaatattaggtaaattaaaaaacttagaaaaatgtgtatttaagcatcaattaattaaattttaacatatttataatttaaaaaatataaaaaatcattggaaaaatcagatttttgatttttgcacttttttatgaatcgaccgacatacatagcaccgttacggacataaaagggggagaggacgcggtgcgcatttccatttggcccttttctttttaaatttaaactgccaccaaccctacctcgaaagtgcttttggtgtcatttttggttttttgttcattctggccgaattttctactagcatcggacgaagcgaaaaggtagtagaacatgatgaaaaaaaataagatgtatgtaaatttgttcattttgaaatatgactggaaaaaatcagtgattgaatatatttttgagtgttttggaattccatgaccgactgattggctgatcagcgatcggtatttgagcaccataccattgaatagatcagttgaccattgatctgtcaatgattagccgacctgacctggtttttttacttcttgtctggatcattttcggtctctgatcagtctatcattgacctagtacataaatcacagagatattcagggcaggagaggggggtggagtgatgaagaaacaaaaaaggaga

SEQ ID NO: 7884 - DNA, 6257 bp, Heterodera glycines
  unsure (1)..(6257): unsure at all n locations
tcccattttctctctcttcccncggctcacttcgtccaattccatgccacccgtcgttgtcggagtttcgcttcctccttcgatgggttcgctctcaaagctcgtcgctaatcgcggctgtctcatgcgccttacgcttctgaacatgcctaagccgcgccggtcgcgctgcgaacgtctcgagaatggcagcgacggacttttgctgaccctcgcggcgaccgtcgccccttcgccgccgtcgccggacgcattttcgtcttccgcgtcctccaaaatggtcgagtcttggagagtgccggtcaaactgacctttggtccctaagcggagcagcaaattgggaatgagcaaagcaaattcagaaattcactcaaccccttgggagcgttcggcggattcgcccgatttggactgaatccagcggagtttgcccagtgcggtggagctaagtcgccgtgccgtggattcgctgcggttcgccgcagaagctccgcccagggaactgccggaatcgctgtgcaattcgccgccaatggtcggcgtgtgggagcggggcacttctgtaacattagttggctcattaaaggcaattaacttaaataattgcctttaatgaattaactcacccaaattgcgcgtgatgaagtcctccctgagcaaatacaattcactgtgcagtgaacgaagcattgccaagtgacttttcctggtcgggtccgatcggacacgcgcaattctctcacgcaattcgcccacccaatttgcatcgatgtcattcactgtccgttggttgagctgagaatggaaaaggatgaaaagcctaaattcgacagaatgccaaacccaaaaactcaccttattcagtacgatggattggagcagttcggtgaccggcagattagtgccgagcataaacttcagaaagggactcagcgcagcaccgccgcactttttggcgacgatttcgcgcactaattaaatagggacaacgaattgacgaacttatcatcattatcattcattaccaattcgcgcaattcgcatccattggccgatggtcaattgtttgtggaaagcgatcccaatgactttgattgctgggcaaaaaacaaatgccaaatgggccgtatttgtccatcaccatctccatctcactcacccaacatcaccgtcagaacgacagagtcgcgcattatccgagtggtggacactgtggcggagtatccgccgcggtcggtcaccgaaaccgacccctgacgacctccggcagtgtctgaaaggcagaaaagttaaatcagcagttttgatgggaaatacccttcataagcgaagttgccaaactgctgccactcattgccggcgccacgctttgcttggccaaagagggcggagaaatggcattttggagcagactcagacaaaagttcaagtctttgggccggaactgtggcgcttcttaatttgggtttgtgaatttgttaatgatgttaaaacactgccaccacctttgccgggaattgcggcacgcaaaaacattgggataagaaattggcacagaattgcctcgggacgttccgccaatgggccaatgttttccacaccgcaaatcatctcgagcgaaaaaacgagctgaaaataattgaaaaaacccaattttaaactcaattaattgctttgagattttacctgtcccaaattggtcatcagaaaagaggtcaatcggagcacgacgttacaaaacgaagctggcggagagtgggcactgagcacagtctgtggggcgtggacagaagacaggtaagcgccggccagggcaccggcactgtgctgggcggacagagtgaaaggcggcacggtttggtcgtccaaaatgccaaaggggtcgccgagggtcagccgcaagcagagcaaagtgatggtctgaatgaatgccaaatgcatcgcccatccctttgacttgggcacaagccgatgtgacggcttttcattaattttggcttttaaccctaattaccttcagagagtgcaaatgtgcaatgtacggcgagttgagcagcgtttggtgcagtccgaccagccaaaaactgatgacgccccaattggcacggcgtcgcgtggacggccttttggcgattttggcgatggttttgtccaaccgacggagaatgatgttaatggcggatcggtttgtctccacggaccagtcgaccacgggcatcacttgcgtgaagtaatggcgtagcccagcacagcccaacgagttcgagtcgtacggggccaacttcaatagagcaacggcaacttcgctgagtttgatgtggcatttgtggtccaacagctcgggcattacaccacgactgtagtcgagaccgaccgagagtcgaccgagttccttcagacgctcggagccgagctgaacgaacattgaacacaacgtgagcaatctaaagcacacaaactgaaacaatgatggcattttgtgccactcgcccgtctcgcggccctctgaactgttccttcatcgcttcgttgtccgtcgcggctgtcgttgttccgtcagcggatccggaaacggtcagtttcttctcagtcttcgctgaggcggtcgactgctgctggcgactcacttcgtcctccacaattgtcggcggatcaaagaattgcggagagtcggccccaccaccgccaagcgaacgaccgcgacgcgggtcagtcgcgtgcggacgatttgcggaggatggcgccagcgaagcgccaccggccgttccaccgcctccgccgctcgcggccaaatcaaaggaccgggtcggcccacgcgcgagcacgtcgcaactgttgaccaaagcacgaagttccacgctcagcgtggcataagcggacagctccaatttaagcgcagcgagcgcgttggccgcctgctgttgtcgctgatttgtctcctcttccatatgccggaccaaatggggaagcatcgattgcatgcacaaaagcatctgatgggcacgccgactttcgggcgcaaacgcacaaattgtgctgcaacaaattcaattcggcttaaatgtttaatggccctaacgagcaaaaaaaaatgccggggaacggaaagaacggcagaggcaatacccatttcaaatgattgaattcgaatgcctgtttcggttgggaaccccagattcggctcactcacacgcagctggccatggcatcggtcagaatgttgaaagtgttcggctcgtcgcggtagcacaagtcgagcgcctgtagcggctttgggtggggcaacatggccaaaatgtccaattggtccaacggttcgttcattcgctccatggccaacagcnaagcgaataaatacttgggccttcacccgcatcggattagcctcgaaaatgctgtcgctttggtccaaaaggtccgcgcaagagccgaacatttgcagcagaaaaggcttccgatgcaacacgtagaactgcttgcagacgaactccaccacctaacaaagaggggcggggaaggttaattttgaaaaacaggaccaggatttaggaatgaaccaaaagggtggcactttttataagccggtctatctgctgctgtccctagattatgcaataaaattccatgatgtaaaaattaaccggctcttttcggcttagtatttttctcatgaattgggggagggagtcgtacatggcgtacccccccccccccccacggagggcacctgagtgaacattcggttgggctgtcgctggctgtagcagcggagaatggtgggcataatcagggaaaatccctgggaggcgaacagcgagttgaaatggatgctcatgcccaaataggcggccatgcatcggcgtaggatcagcacatcctcgcagtgaatgatctgacattcgttggcattggcattggcaccccaaacgaaggctaaccgaccataatgccattgatcacgttgatgaacagatgcaagtcgccgaacatgaacgcattctccatcttctcgaacatgttcgcgatcagcttgctccatgcgaatttgtgcagtgcgtccgtcgtttgcagttccgctccgctcgtgttttggtacatgccgaaacacgtctccaccgcgcggcgtgggaaggagggcaaatgcgtgaattcgtcgtggaggaagaaaatgcgctgcggaatgaccgcctcgggcgagtggcgcagggcgttgtgcgtcagcagcactttgcccgtttcgatcagcttctgctggagggcatgctcgcggatgcgctgctgcgcttggccaatgtccaaacggaccaattgcaattggggataaaaggagcggtggaagaagtaaaagtcgctggaaaagaagggcacataaaagcattcatttgtcattgggagggacggaccgaacaaaagcgcttgggttgtgcagtacaaacgtcttcggatcgtacagaaagaaatggtgcgcctcgtgtgcctgtatgttgtagaattcgatggaatccgcgagcaaatgttggaattgggtgtcctccaacaccgggaattgggtcgggatgccgccctgttgcgagtcgggtccatgcacaatcacctgaaagcagcacaatttgccgatgctgcctttctttttaagcattccctgagtcatctcactttctttgcgcttggcacattggcagtgaccataatggcctggtcgcactgctccttcttcagcgtctgctttaggtccttgaagtacagtccgtggacgaacggcaccaccaaccaacacaaactcagtgccaatgccaacgaacggtcgctgccttcgccgggggttcgcacgtaaaacatggccaagccgaacaacgcgttcaaaagcgtgtgcgcagtttgagagggcaaagggtggaaggaaagcacaaggcgacggagcagagccaacagatactccttgaagacgggggggggcaaagattgaaaacggagagaaaaagggacggggaatgaaatgccaaagggaaaacggattgaaaatttaaatgcagttccagttttgcttcacctgttttgctcggttggtgagtttttcgaagaaatgccgaagaaaaagtgccgtgtcctccacaaagcaactccaaatcacacgtcggcacgtttcgccaactatttttaaaaatgcataagtcccggggtacaaatgcctttctttgctccgggcaaaattacctgagactccgcttccgtccacttgcgcatcgtctagcagttcgacgatggtcggcacaacgctgagaatcgcagaagggaacaatggctgcgcgacaggcacaacttgtcgcgcctggtgaacgggctcaagcagtgcggggtcatcagcttgggaagagtcggcagcggtcaattggtgctggaacaacgccggttcataggccacctgcaaaaatgcaagaattaatgtttaacggacagatagtgccgggggttaaccggtaggcatatcgagagtctctgtctcggggaatcgtaaaaagtaagggtatcgagtcacactttcatgcggctgtttcaccgccacttccctcccccgggcaatgccctcccgctaattgatcattcccaggtagcagttgctgtttgcccgctcctatgatcacctgttgcaccaccgccgtcgctcggagtgggtactgctcgcgcaactcgcgctgtctctcctccgcccgtcggatggccttgcgcaccatctcctgcttctgcttgcgccgagtccgcgtcatggtcatgatggtttggctggtcgactgctcctcctccttcagcgacagttcctccactttggttttcactggtggcatccatggcggatcaaccaccggcaattggctcaaaccgatggacggggacggcaaagtgaagtcaatgctcgggggcggaatctgtccaatttggcacaaattttggccaaatcactcaaaaaagggcgtgccttgaaaatcaattgtgcgccttcctccattttcagccacacgtgaaatcgttgccgccacagaacgaaaaaacgctggacggccgcatttcgaacggaagggtcggcggaagccaattcggcggacattaaatcggaacactctttgggacatttgacggcacagcaaatgaataaagcggctgaaacggacggaggcacaattaaatggaaagcaaaaatcaaatggaaaagtcaccggcagtggccaccaaatgggaatcatccgaagcgatcagcaaa

SEQ ID NO: 7885 - DNA, 2270 bp, Heterodera glycines
tcgattgtagaaatttaattgtaagggaaataatgatcgaaatgctaacctccgccttttttgcgcgactttcttcgatctcattcagcttttcaatgatcagtccgcgcagtgccattggcattctgtccacgccgctttggcgtaccgtcgcactttcgcgacgcggcggattcgacgagtggcgtttctgttcaaatataaattataaatcaaaattgaatattaaataaatgtttttggctatctctgcccactttcgcttctctctgctggttgttttgccatcgctcaatgaattgttgccgtctgtcaattcgtccttcgaccgttccttggccataaaccacagtcagtgcttcgaacaaacgttggcattgtctggtgaggggggggggtgccaatgtaaaatgccatttggcaattttccgtccattttcaaattgccaaaacctgcaaattctctcgaagcaccatttggtgcaaaactgttcgtggggacagtcaaagtcgactttgcggccaaattggagcagtgtgttgagccagggcatgcttctgcacatttcctcctcgtcctcttccgccacaacctccgtcaaatgcttctgctgctgctgctggaacattgcatttgccgttgcatttgtactgctcgagtatcgctccggcgacgactgttgctgctgctgcgtttgctgttgcggctgagtgacgcggagacggccgtcgccaccgccgccgacggcgccgacattagctgagaagcggaggggagacaattaagcaaacgaagggacaaatcagcagaagcaaaggcggaggaagaagcagcagcaaatggacagcgaaaaatcaaagaaaattcaaacggaggaatttgaacaaacgaaaagccatcgaaagcaaaaacatttcctttttattttgtcacagaaagcacaaaaaaaaataaaaataaaaaaaggtcaacaaaaaactaattgtaagaaaaaagcgaagaatgggagaagcaggcgacctttgcgggcaatgctcagcataaaaacgggcgaccgcggcgcctcgggcggcgccggcgtgtggcgttgggcgcccggcgcggccgtcgcccgctgctgcatctgctgggagtgcgtgatgctcagcaacatctcttcgctcgcttcatcttccacttgggtcgctgttcggcccaatcgcatcgaatggcgccaattgggcggacgcgacacgcgacttttgaatgaggcggtccgacggcggcgttgcacaaaggaaaccacgcgaccgcagccgccggcgggggacaccaccgcgtccaacaggcaatcactggcattggcatggccagtcgtcgcatcgtcggtcaaacgacgcacgacaggcggcactttatgggaaaggaaaggcggcaattgaagcaatgggaaaagggaaatggcgggaggggggaaggggtaaaagaggcactaaaggagagagaaaacggaagaaagtgatcaggcagggagagtgatcggaaagagtgcccgatcagtagaaagagagagaaagaaggggaaagggaatgtgccgaaatcaaaggcaagggaaggaaaataagcgaaagcaattcaatcactgcgaaagcaaaaagtgaagcaaaaaaaggcaaaagcaccgatttattcatccatttatccatgcttttcctctcacctgctgcattttccgccgttttctgctgcacttcgcccatttcgttctgttgcgattgttctgctgctgccatttgcgctttttgcgtttgcgagggttttcgaagccttaaaatttataaattaattttatttaaaatttagctctttttatgtgatggaccgaagcgatgcgcgcttttttgtcgatccaacagtgtccaccggatgttgcggcacagtgccggcggaggaaggcgggggcgtttgaatggcaccgccagagggcgaattccgcttcaaaaggcgtttccgcccctgggcaaggtgtcgtactgaactcaaataaaggaaaataggaggcgagaacggcgaaaataaagtgctagaaagaaaaggaaaaagagaaagaaaatcggaaaaggaaaaaggcagggaaagagaaacaaaagggatagaaacaaacggaaaaagaatgagaaaaaggaaaagggaaaaggaagggaaaacgagagagaaaaaaaggataaggaagggaaagagaaaaaaagggatagaaagaaaggaaaaacaaagcgaaaaaggaaaagt

SEQ ID NO: 7886 - DNA, 856 bp, Heterodera glycines
  unsure (1)..(856): unsure at all n locations
atcattagggtgcggatttttaggggcgaaaaattccaatttagggacttaaataggggcaaaaaattcgcgaaataggggcgaaaaagtttcaaatgtagaggtgaaatttattaaaattgccgttttctctatgtaataagttaaaattaaggcaaacatcatcctgcgtccctgcttcaagccttttttctgttgatttgtttcgttctcggcttctaggctaattggtttgcttcttcccggcgtcatgcttaaatttgaacaattttaaaagggaaattattttaaaaatatttttaaaaacctatttaataataatataagactcacattgaagaattttacaaatttctgaaacaaaataaacattcaacacgaggaaataacagtttcttaatttattttgattaaggcttggaccggatttttggcacagaatccggctgaataaaataaggtttattttaaaaaaggatcagtcgcttggtaattagcggatttttaacgcttaaaatttttttttttatttcactgccttaaatgccgtgccggaggccccaattatgactttttttttttaaatattgccaaaatcaaatccaacaacaaacctttggtgaagtacaaccacattctggttccgtgtcatatggacaaccatatggacaccctcggtcaacgcatttgccgctgtcccattggcacaaattttggccgattgcgtttggtggtgataaaagcagaagcaaaaaacacattgngataatcatttgagaaatttgactaatgcttttcattttaatttttttgaaggatggaaatgaaaatttaaatttgttttcggccttgaaaa

SEQ ID NO: 7887 - DNA, 6501 bp, Heterodera glycines
  unsure (1)..(6501): unsure at all n locations
aaaaaaaaattttacatgtaaagataagctgntcatcattatctaatntatgcaaaatatttttaaaaaatgcttttgaccaatctatgcatntaggtaaattaataaatttaaaaacaaaactttgatttaattaattgttgatttattttaattatttccatttttataatataccaaattttgcgttttatcaaattatatttttgggtaagtgatttattgaatttatatgaaaggtaaatttttaaagaatcccttagattttctcaaaaaaaaacaatttttttcaatttttaaagtttttctttaaattctcaggcgctgctggagaaaaaaaaatttaaattttcttttttagttttaagataatcttacacattaagttttatccaatttatgcgaaaatacaaagtaaaaatatataattttcatcattaaatgcatttaaattaaaatacattaaaaacattgatttaattaattgttcgttccatccattaattatgttcaatcccggtaaaagcagtaccaaaatgcatgaatcattccgggaatccatccgcatatccacagaacaatgttaatgaccatgtgcagcaacatgtcgtgtcctgaacattttttttattgcgattgaattgatataaagggctcccagaaaatgtgtcagtatgtcagtaatacatattttagcattaattatggtattacaaaaggtacaaaattgtatacaaatttagttcagattctttaaaaaattttatagattcaaaaaattgaagtttacccaaatcccaaaaaaaaatatctactgtattaaattttttttttgaattgcatatttttagtaatgtgttattaattaatgattttaaaaaattaatctaatctaaataataaacatttttagttgccaagaaatgtccatacttgcaatattgtgatccatttgatcaaacatttaaccaagactttggcttgaaaatttttcgaaaagttaaagttttattttttttgtaatggcattactgtacatctacagtacctccgtgtatcagtacagcagcaggtggaatgaacacacacagtatggcttccaaaatctgctccatgttccaggaccgttcattctggaagaaccgttttgctcttatcagttggatgtcaactgcgtcgttgccatcgacgattggcatagtctaaaaaagtaaaaaattctaattttataaataaaaacatttataaaataattttaatttaattaaaattattaaaaatttggcaactaaaaagtaacctgtggtatgtatatttctgggtcataaagaccgacacaatgtttattacaaataaagaaaaggaataagaaagacgagaacagcaacatcaatttttgatgaatatcttttaaaaataattatttattttttaatttttcaaaatttgtattaattgagccgatttaataaaaaaaaattattattatttatatacaaatacccggaaatatttttttaaagttttttttgattattgtgctaattgaataaattattaattattttatacattgctacgtttttgtcattttgggttattttcagttttaatttctttatttggcaaagtaaaatcctcattttcaaaattttttttttgccattttatgcacattttctgtttgttttttattgaaaaataatttccttaataaatattgattgaagacgtaaaatttattgcccattttattgcccactttttgccctttttttgcgcaaatagcgctttaaatgttcatcattattgcctcaacaggttaattgatcatatgatgaattaatttttgaatttatttttattatttttctcaacattgtcaaaaatgaaaacgaatttgagacattaatcaaattaaaacgcaaaattgaacctaaaaatggaaaaaaagacaaattgattctgattgcttgcttttattaaattaattgatgattgaaattggttttatacgggaacctgtagaaatattttcacgaaagaatttataatttagttaattattaaaataaaataatattttttataaattcgaaataaatagataatattttacggaacgtcaaaatgctcaaaatttcaataagaagtttattaaattttttttaaattttttgatttacttaagaaaattttctttttcaattgtaaaaaaaagtcattttaaaattgctgcaaaaaattctttcttaagttagggattattaattagtttaccgagtccgggcgtccgggtctgacacccggccccgtgtaaccctaacattataagttgtataattaagaaggataaaaattttaattttttattatattatataataaagaaaatattattttttaaaaatgttttctaaagtaaagtaaatttattaatatttttgaaaccttttttagaaatatcagaaacgcaatttataaaatatcattcattgaaataaaaaaaaaaactattaattttttttataaaacaattaaaaatgctattactggctattaactattcttaaaacaatttatttaaagagaataaataaataaataaatttaaaatcattcccgctaaaatatttttttctaatattttattttttatttaatgttttgtgccatacctttgggcgctcgccaatgttaatgtcgtaaatgcatgtgccaacattgataaaacatgccgtaatcatgcaacaaaacagtaaattgtaaatcattattaccgtatcacactttgataaggaatgaaaacctggaaaattttatattttataaaataattccgcgtgaatttttcaataattttatttaaaacttagaggattattagattctgctggattatcccaggcgaatgggatttaacaaatcccaatcgtctcatttgtccgccaatttttgtggttttcattcacaaatgtcaaatttaattttgtaaaaatgggcgaagaacggcagcgacagacaaaaagtgctgaatcaccaaatggattattttagggcgaaattgactaaaattgccttaattgagtctaattgacatttaatttgcgttttgcaatgatcaaaatttgagtgtcctcccttttgccccaatttagtccgttttatttatttagtggttaaatttaactaattaacaataattaatcaatgcaagggtgattaaaaagaagtaatatgatgttgctcaaattgttggatcatctgcaacgcagcaggtagcagcagcagaatgaccaaatttggcaacgggttatttttaaagatttttatagtcaattaagtaaatggtttttggtctaattaaaactggaattgctgcccgcaggcaagagggggagaggggcaattttccggtcccaaaacaaaaacaataaatagagaaaaatcggcaattttcgagaacctttcattatttcttgttggaaacaatttttataatttttaaaagaaaaatctatgggaatgaaaattgtgcatttaattaattgaatttattttttgaaaaatgcatttttggctttttggaaattgaattctttttttaaatacgaataaatgaatggataatttaacgattaaaatgattttgtttatttcaattatataatttttaaaaaaaaatatatttttgagaaataaaaataaataaaatgatgtttccaaaaaataaattgtctcaaaatgaatgttcctgtttgttttgtggccaatttgtacaaccaacagcagcagcagtaagggaacaccaaaaaatgttaaggccaccaatcaattttatgttgagtcatcgctgattgttcaattcaattcatatttcacaatgtgatgattatttcatgggaataatacgcaaaaaaaaaacagcaaaacgccaaatcatcgccaaaattggtgcgagaggaacagcaagccaaaaagggtggctgggctaatgatgagtctcgagagtcccaaacagctttctatcttggagttgtacgggatcgcaattcaaaaaataaaacgggctaatccgcgaaatcccggccttccttggattagagcactaatttttttttagatcatgtaaaaaaggattaaaaaggggttttatgcaattctgcgttgtactcgagggaggaacagccaaaaatgatgcctattgatgagtctcgagaattccaaacagcttttttggaaatgtacgggatcgcattacaaaaaaaaaaaatcgggttaatctccgaaatcccgggccttcctcggattaaggcccaattttttttctggtcccataaaaaaaaggattaaaaaagggatttttttttgcaattctgcgttgtactcgggtggttttcggggatgctgaaacgaatatgacatcagatttgtcacttgatttcactaaatgcccttttagtctccgttaagggtttagcttattctataaacattattccgtaattgatgatagtaaaataatagaaaaaataattgattaaaatataaatttataaaaaatcataaatagatgcaagcatatgacaaaatgtaatattcgtaagcactcccgaaaatctccgcgccgagtacaatgcagaattgcaaaaaagcccatttttaattctcttttttatgtggccaataaaaataataattatccaaattaggcatttctggtgaacaagttgtctttttatagtgatttttggcgttaaaacatgatcaatttatgaattttttgacctaattttgtaaaaaattaagggaatggcggtgtcgattggtaccgccaaaattgctaaatctaaaaatttactgtaaaaattatataattttcgcattatttcaacaaacattataaaaatgctgatgggtgtccttgaattctcctccccaaaataactttgtccaaaaaaataaattagcaatttttacattttctgccctcgcttcatttggagcaattaattactacacacagcagaaaagagaattgtttttgaattgtttttgaagaattatttttaaataacatccttgaaattttgacggtattttcaaggacatttaaatacatttttattttttccacgaaaataatgtaagcggcgcaatttgacactttagaacttttcttaaaaacgaccaaattcaactttcttggcatcattctatagccctcacaaatcagtgtcctctattagcctgaattatttcaaaaaacttaaataaatttcaaaaaaaaaaaagttatgaccagaaatgttcgtgcaaccatgcttttttcgaagtttaataaatttttcgaaattttgcagactaataaaggacattgataatgagcgctatcgaattatgccaaatattgaatttggtctttttttagaaaaaaaatacaaaataatgttaaatttagttttttgaagaaaattgagtaaaaaatagaaaattttccattttggattatttgaagtattatttccactttttctaaagtcacattgtttaaaataattttcaagaaaataccaaaaggcaaaaaggccgctttaatagaggatttttggaaaatgccaaagaaatgcgacatatgcatatgaaacttcattttacacgtgttaatctatgctaaaaaaattttcttgtgttttaggcccttcacagttcaggaagaaaatattcgtgagcacttaattggaaaccctaggcaattagagtaattaaaaaacttcgcattaatgagtcattagaaaatccattccaaacaaataaaaaaatatatcgcatagggtgtagaactttattcattaaatgagattaaaaaaatttctataaaagcatataaaccaaataaatgagtggggggggggggcgacgagggaggtgcgaaaaagcaagcaaattgtttgaacaaatttaaaaattggagaaaaaaacaattaaaaaattgatggggctgatcgaaatcatcatcgggctttttttttgttatccaaatatggaaaatatgttggcgatttgttgttgtgttttgtggttgatgtataaaaagcataaaatgatcggaaaaataaggcggcaggattctcatttcttgggccggttcttcaacaatgatgggggtctcgatcggtgttgatcatcatccttcatcgatctagcggaagaaacagtaccagaaggcgtggatggtgccgggaatccagccgagaatccaaagcctgaattcagtgatcataaaattgttttttttaaatctttgttttaaaaattttcctttctctagctatgttttgaaaaaatcaaaattgattgatttagataaaatcggtgagaagaaaagtggttgtaatcagaataagcggagaaatgatcagataaagttatttattagtgaaatagaacagatttcatcgccgttaatatcaataaaatattttgtttttttcattagaa

SEQ ID NO: 7888 - DNA, 924 bp, Heterodera glycines
gacggtgggcaaagggagtcgggcctttgatgggaaaaggcggtccaatcggtgccgaaaatcgaaaattcactttacacaaacacacaatccatgcccgtaaccagaaacaaattagtgaaatattttcccaaaatttattgggcgttgaagaaaattgttttttttttttgcacaaaaatgataaaaatttcagagaatatttggtcaattttttaaaaattctcaaaggaaatcaccggtccatgggtgacaaataggcgcagccgggaaaattttggctaaattttaagaaattgtcccaatttaaaaatgggcctttgccccctgcttttgttggttacggctgtcccaattcgtttgtccgtctctttcaacaattcgttcattgtcctttcttctccccctcttctgtgttcggttgtttctcttcttcccccccccccattttttggcgtgtcccagcaaagtttttcagcttaattcgccctttttttgcgggtgttacactttttcttttcttttctctttttctgatgcggtgcttaatttttattcgaaatgatatttatggccatcatccattaattaaactcaaaacataataataattattattattttcctataatccccccccccccaattttctctccccttttttttcatatcattttttgttcattttgttgtgcttccgttataagattcgttttccaacctcttacaattgttgcgtcatttgctatgttgataaattgaattttattattttttaattaaaataaaatattgcttttctttttttgttattgtattcggcagcctttgtcctttttctttttggcaacttctcgccgtttgttctgcttcttttgctgattgttttggtctgtttcctaaaaatggaaaattcaaaaatgg

SEQ ID NO: 7889 - DNA, 5039 bp, Heterodera glycines
catcatcgggaaatggtcgcggtctttgagccgttcgatgacttgcgaaggcgcagaacgtattccaaactttgcgcattggtcaccgagaaaacgagcagaaagccgtcccttaaacatggcaattattctaaagaaatgctggacatccgccagagcttttccacagtttttggagggaaagacggcgcccgggaaaacgaattttagtccagggaataatccaggtcaagaagagctttcatgattccgttctctaatgctggaaaatggcatttataaatgtccgaattgaaaataattttcaattttaatttcaaattattaaattaattaattaatcctaattatctcatccatacattatatttgctctttccacattaaatttaattgtttgtgcttctttcttaccccgtccgaaggtgttggtcgcgcatcgccgcgaattcctcttggccggcggtgtccaaaatttcgacctgtaaaaaatgaaaataaaaatttgccaaaattcattcatcagcagttttttgggctctgaatgtgctcccccattcccactttgtaaagggcgtcgtccacgaaacaacactttgtgtacgaatcggcgatggtcgggtcgtagtcggacacgaaatattgctggacaaactgaaatggcattattatcattttagcatttattaaggccggatgggctgggggattatggcgagactcgaaagggatttgctagtgctgctcgagaccgaaaatttcccgagaccgagaccgaaaaaaaaaccgagacttttctcgagtcgagaccgagagtctcgagcagcactaccggcagttcccagataaaaattttcaaagccttatttggcaggcaaaaaagcctcatttttacaaaatttattcaaaacacgtttaaaatgttccaatattatatttttgatttttccatgatcaatttgagcaattttgttagaaataagcattttttgaaattttatttcagtgacaaaatcactgacgaaacattagtgagcaatttgaagaatgaatagatgcggcacgagaagaggaagttgttgggagacgtcgatgtccagggccaatttgccttttcattccagccgcgttacgcgaaaagcgtggggaggacatcattttgtacattttgtatgatagacgcaatttttatttatttaatttataaatttttttagaaatattcattctttaatgctattgccaccaggggccgtagcaaaataaggtggttatttgacgaggtcattttaccacgaacttattaagcgattaaaaattctaattttttagttagtccccttttttactgaacagggtctttgttaattctcatagaaatggtttattttcattaagctttgctccggaaaattgccaaaacattggtccgggagttgcatgccacctgcaaaactttcgtcacattttgtctctatcttattactttccaaagataggataaaactattaaataacaattattcccaaatctgttgtgaattattttgactatatttaagtcatttttggttgcatttgagaaaagatatttttttactattaaagatatttcggcattttactcttttaattttacaacatagctatgataaaaatgaaatagaaaaaatattggtacaaaattgaaaagactatacacgtacttataaatttactcaaccaacgggttcaaaattggtcgaaaaaaattaaaacaaggaggcccggaaaatgggttctgttctgaatttaaaaagaaaagatttatcaaaagttagaaaaagcgcagcaacgtgccgccggcccaggaaatttttggaaattctaacaattttaaataatcaatccttcaaatccttataaaaaattattctaatatttttaaatgacaatttatagaatatgattaactctgcttcaacaattttaattgtatttaatattactttccaatttttatttacgtgttcaaatgcaaatccatcggtgagttaattaattgggataattaatttaaattatcaattataattagggtgacgacaaaatactaattgcaattatgaaagggtatccgaaaattaaaattagtgaatattcaaagcataaatacgaagctcacctcggcattctttattttatcaaaacaaattggcaatgcgacaaaattgaagcggaatttgaagaacatgaacggacagaatgccaaaaatatcgcaaatatttggatattttgtacgaatatttgtgccgagaatactttggaactcccacaataaaaccaaaatttgtgtttaaaggccgaattgaaattgaaggaccaataattgatgcggtaaaatgcttagccaaaatttcgctgttttattttaaatctcattggaataaaaaatatgaatataaattaaacaaacttttcactgattattttgaagtaaaactgttgaaagaggagagattaaattatgaatttaagttaaaaaatgaatcaaaattagcaattaatggccatattttacaattggcaattgaaactagggttgcgccccgagccctcggggggcaaaaaatcgggggccggggacctcggggggcgacatgtcgggggtcgggtcgggggggagctcaattgtagggggtcggggaccccgatcgggtagtgatcaacgaaattttttgacgaaaaactcaatttttattttaaatgctcgtaaatcttcctttttttcactttaatcatcggatttcattagcgccagcaagagtgagtccaagctagcctttaaaccaagggttacccttgaaaatttcccgaaataagaacatcgctgcgcaaaaacaagattttagggtcaaaaataaggaaaattggtcatttttggtgaaaatctgtgggcaaaatgaactcaaattttcaaaaaattctaccggcgaagcctatcggcaccgccggccctaaaatttgatagcattttgatcaaataaattgtaaaaatttactgatttgaaaaatgttgctaattgatattatttttgactctaaaatcttatttttggccttgatgttcatgtttttaaaattaccgatcggcaccatggttttagggggctggcggtgccgataggcgccgccggaaatttttttgggtattttaatgaattttattaagaaaattcgtttaaaatttcaaaaattttcaatatttcccgcctttgtggatgaattaacgggcgccggacttttcgacagcggacctttcgacagaaggacttttcgacagcggacttttcgacagtaaaggacttttcgacagaaaaaatttttgtttaaggggaggacttttcgacagtaaatggtagttttaaaaaagacaatgctatttcatttagtaagcaaaataattatttttgtttcgaaattatttccgtttttatggaaaagttaaattgggtccggcattcgataggccacagctcttaaatattggtagggatggcgctgttcacgtgtgttgtaaagcgcgagcaaattttcgtcttgttcaacataaatttctttacttttcatgcctttaccacgaattccattcatgccaaatttgacggcatccaagccaattttttgcaaaatatttggccagttctcaaatgggatttaattttttttaaattcaattgttattattagggattagatttttaggcatactaaatagacacttaaaaaggcataaaaagtccgaaataggcaaaaacaatacggggggcgattgatacagcgccaaaattcgatccctaatttggggtttggacaaaaaattccaagttttgcaccttcttgaagtccgctgtccgcttcaaaggcatattcaaaaccgccgcttctgattaactctcggccacgcttgctttctgctagaaaaaattggacaagaccagctggttcctctgcttcttcaaaggcttagagttcggccccaatttcaccttcttcgggaccactagaaccagaagacatttttcacagcaattcaaaaatattttcagtaatagttatgaatggcatggtcactcttttttgggccggtcgagaaacggaggtcaaacaaataaattatttattattgataagaaaaccattcatgagaactccaaaaatgcagtgcaataaactaaaatgccttcttaaaccccgctaaattaagatattttataaaccagtaatttataaaaatatattttttaattaaaaattcttattttacaaataataaaataaaaagacaagattaattattagaaattatttgtttttaatgaaaaatttgatttgttagtgtactgtcgaaaagtccgctgtcgaaaagtccttctgtcgaaaggtccgctgtcgaaaagtcctagcgccatcggcaccgccggaccccattttaccagatttttgaaagaccaaaatggcaatttaattttttggaaaaaaacggtaaaaaactttgcaaaatactgaaaatacgttgcagaatttttacttttcgacataaggaaagattgataatcccggattagactgacttggacaaccaatgaatttttaaagtgttccacattagtctttttgaaaaataaaatatcatttcatgtcaaattaacgcaattttcgtagatccgaaattccttaatgtgtctgtatgtccactgtccactctgttgctccttgttttactgtttgttgccctattcctttttctaccgtactttctacaaaacccaaaaattatcggtgctggtcttcgtatttgagcaccatttatagagagaagtcaaatcatttttataaattttaatttttttttaaaacacaatttaatcattttttatttgttatactagggctcatattttaagcactaaaaactaccaaaataggtaggctggaaacctaaaaaaggcactaaaaactcgaaaaataacttaaaagcggcacctaaaaatctgtt

SEQ ID NO: 7890 - DNA, 4646 bp, Heterodera glycines
  unsure (1)..(4646): unsure at all n locations
accaacaaagcctcggcaaatttttgacatttcaaacgcaaatatctgacattgtttaacaattattgtcttttaaataggaataaaaatactttttgcgaaatcgagaaagcttgaggttcagataattgaataatgcgcccaaaagaccgccaatcactccgacaatcataaaaaagggaagttcccaaattccgtaaacgttagtggcttcctaaatgcatattgtacaattagatatggaatacaaaaaacaaaacaaaaccagtcacatcgaaagtgccaaaatttgccaagccgttccaggataaaatgccaggctgtttgtagaaaagactcatgaagcagttcaacgtaaatgttgagatcatcgcagtgaaaacctgaaccaacttcaatttggcattcaaacaaaaacggaccattcgccaggtgagcgattggttccagaaactggccccctcttccaaactgaaaagcacgccaccaattggcgaggcaaaagccgcagaaacaccagcggctgcgccggcactcacaaaatcgcgcttttcccggtcatttcggaaatacttgaacaatccgaagtccacaggcaatgataagcaacgaccctgggaaataccggcggcgacaacagcgccagaatgaatcatgggaccttcctgaacaatggaaaatatattaaggtttaaagaggaagaagccaaacaatttgaggatttcgacctaattataagaaaaaaggtacagaaaaatttgtgagcaaaaattattaaaactcttttaatgatatttatttctaattacttttcctgcagccaatccgccacccacagaacatgcaacgccgactgaaaagatcgttgttttgtaaaaaagacgttaaaaatttcaccagctttggcaagaagtgtcttcaggcgcacaacgccaggtatttgtattccgttcaaaaaacatttaatttgcggaattccggacccaatggccactggggagacaaagataaccaaaaacgatgccacggcaaccaaagcgcaattgtataatgcccaaacccaaagaattgtccacgtacaacccgaactgccgacactgccctcctcacaagagtgaattactggaaaggaaaaatacaattaaaaataaaatttaaaatatattttttattatttaaacatgcaattgttgatgatgaggtggaattttagctttgaattgtaataaacgagcacgtcaatgaatgctgcaactgaagcggttgcaacaccaatcaaaaagcaaacgatccatcggtcgaccgtttgtcggaacaattttcgctgttttaaaactttgattgatgctcaaaagataaaaaaggaactcacctgatgccctttatccttttcagcagcacgataaagttcgttctcgattaattcatagtcgagactttcatatttctcggaaagtgtatgttccgatgcgccatcagaaagtttccgactgccactaaattgccgtctccgcacttcctcttgttctcgcagccgttcttctctccttcgtcttgaaaaaagggtcgatgtggaggaaactcgctctattccactgacgggatcttcatttgggtcgagactaaaaagataccaaatttatgaaagtaaaaaaacgcattaaagaaaaaatcacctgttgtgtgaaaaccttctgtctgttcggctccaaatcaatggacgctgatcagaagacaaaccgaaatttctcatgttatcaacatgaacatctcaattagaagtctttaactcatttgtcagtaaagcctttaggcaactttaaaattaaaaattttggcgctttgtatttaaaatttaatgtacaataaaaagcctaaaaaatcttttttttcaaactcaaccgtaacatgggaagtgggaaaagacaaaggattgagtgggatctatattttggtacagattatatgccttttctttcaatgggtttgttttctttcaaatgcatgcgaattggaatttaggttattattcatacaatgtctaccttttattcgttaaatgtttcttcgaattggctgaaatatttatctcttgggacggctttggtcgttggctatgcagtttacattgaccgtaaacgtcgccttgacccggaatacaaacaaaaaattcgtcaaagtaaatgggttttatctgatagtttgagccttctgtcttacaattagacaggaaacagaaacaagccaactttttctacgcaaaaatgagcggaggagttgattttcccgacccaagtgatccacaggcgaatgagatcttcttcttcagtcagatcactcttggagaggagaaaatgcagactggtttttatttatcgccagtccaataattacgttatattaaaggccacattgaggaggggattacgcatctgtcgaatgcaattgtgacttgctcgaagcctgacgaattgctcagaattttccaacagaccatcccaccggagtgtttcagtttgcttgtgcaggcaattcctggcgccaaaatggtaaattatcacgatttatggaagatgaaaatgaaaccattttttagcgtcggaatgcctcttcatcgtatcgccatgggcgagagccgattgatttagactgtgcaaagattgacgatattggtgacaatgcggtcgacaagaaaatgtttgttttgcaagatgacgagcttgaatgaaatggaatacgacaggaaagcaggccactccaaattatattttgttttgtttcgaataaatttgaaattttcttcatagttaatatttaatttggttgcgttatttccgaactatctattttcatttgtttaattttttcctttttttgtcagttaatctagaaaaagtaatggcttcacgaaaaggaaaggtcaaggaagagcagccggctgtttctctgggtcctcaggttcaagaaggtaagaatcaagcacctatttattttaacaaaatgtacttttccctaatgatggcttccacatacgttttacattatttttttcatatattctccgtttaggcgaaaatgtctttggtgtggcgcacatttttgcgtctttcaatgacacttttgttcatgtgaccgatttgtctggacgtgaaaccattgtcaaaatcaccggtggaatgcgtgttaaggccgaccgagacgaggcaagtccgtacgctgctatgctcgccgcgcaggatgttgcggaacgttgtaagcaggtccgcattttttatttagtttttctatttaagcctatcaaaacagtcccattgtgtttaaggttggcattaatgctcttcatgtcaaattgcgtgcaaccggtgggaccaaaaccaaaacgccggggcctggtgctcaggcagcgctgcgtgccctcgctcgttcgggtatgaagattggtcgaattgaagatgtcacgcctattccttccgactcgactcgccaaaaaggaggccgtcgtggacgtcgtctttgagttgattcaaatgcgtcccgatttttgttgttgtttgagttctctatcgcttttcttcaaataaactttttgttgaattcttcatttccttttttggggtcatgtaaatcccttctaaatttcaattttcatgctaggaatagattacctatgtgagtattcaggagtgaattcatatttatattatggatcgtttctgttcttttgcttttgtttcactctgtcggccccatacagctttttgttgtcgtttttccacttctcagcttcggtcaaattttttaaaatgggacttgcacaaccaatcccaccggaaatggatgaaatggttcaacatcgacacttatcttcaacctagaagaaaatttatccgtctaattgctaatcggtgactcgtcagtttcatttaacttttccgttgtctctgtttattttccctggttaatcctgtttagatttcacccggagcgaattttccaaatggggccggattttgcgtgtttggaatggttagttactctataggagttgcttaaatgtttttttgtttaggctgatgaatgcgggttccacttctgttctaatgtcggatggcacattgttaaaaagcaaaaagtatgtttttttatcatataataatgaactttttggcatcatttagagaaatgcagaattttttgtctcaaaaggggttcgacctgcgaaaacttaagacggttagtgcttttttgaggctatcaattgtcaattcgttaatcactttgtgtttctcaggaggcccccacggcgaaattgcttaaggatattcccttggccgatgcgttgcgtccctccgccagtgacttgctttacaatgaaaaatggcgtcacatttcgcccattcacatgaaagaagtgtccttccattttccctatctcccaatgttttactcttttagattgatgcttctgattcggtgatcaccgacgagggctttgcttattttttggaatgtcgaaacatagaaaaactgcgactgaatttctgcgattattttgnggacgaagcaatcgcacggcttgcgcaggggcggcagtcaaaaacgttgaaaggaattggtgagagcagaaatccatgtgcatctcaac

SEQ ID NO: 7891 - DNA, 2514 bp, Heterodera glycines
ccccccccccccccgccgtcgtatcttttaggttggttaggaaattaacattggaactaataaccaaactgtaactctgacaactaaaatattattgtgccgaattctgcaagtaaactaatactaaaaaagaaaatgccaatgaccaaatgcaaatttgccactccgtctgtctgaataatgccccgtttatcgatgattcgtttttgtcgttttgtgacggtttctcatgcttttttggcacaacatatgtccgaatgtcgtcacaaagtgtcggccattttccaattgctcccgtgtccagggccatccgttgtaaagaatcaaaggatttctttgttaagttgaccacctcaaaattaatgactttgttaattggctaattatagtgtttgtttctcttttcccactaattctgcggtgtccgtgccgcaaaggctgtcaatggccggcacatcgcagtgcaaagtgcagccgacgtattcgcaactttctcccaaatatttttcggcctccgtcgggtcgctgttcatcgccaaatgtttgaagttttgcatcagagaagtgaccttaattgctttttgttcgtttggcttttgtctgactgtccattgttttctttctctgctctcatcttacagctttgtgatgcctaaagggagagagagaaatcagtaattaaagcagccaagagaaaggaccaaaggaagggatttgggaaaggattaggattatggtaattaaaagggattattaggattacggtactcaaacaaatgaagcgattaggattacggtaattaacaaaagaagtgattaggtgtacggtaataaaaccataaaggaaattaacagggcatttatatagattcatagtttggtaaatatgaagtaagtcaaataaaatcaaagactgaaggttttaacgtcagattctttattagagcataaaattatcttaagaaaaatctcttttttcgggataatgggattttatgggggggggggggaaatactgtagtcaatgcctaagtaatatactaattaagttctaattgctcacccagcgcaggaatgaagacactttttggacatttcgcggtccaaagcgaccaaacaaccgaattttgtctttatttctgcaaaagtttgtcaattaaaacaaaattcttttaattttactttaaaatggagaatgaatattacaaaatgaaattgtaaatttaatttacctttgtaattccacacacaaaaatggtccactatttcggcacttctgctcaacaattcttgcataaatccttgtgggcattttgtgtagcaaaaattgaattgatgataaatacttaatttacaaaaataaataaataattatttttttaattgtttttttttgcgcacttgcaaaaggaatcgaagaaagacgaattggaaaaggcagccaagaattcgttgtaattcaaattcagcagtcccgtcgaatgttccgagcccaattgggagcgcatttgatcagtgaaaatcaaagcgcattggccaacacacgaatcggaagagggagccaagtggggactgacaaaagaaaaagggggaaagagaagggaattgagggggaggattgggaacactgatcacaaatgaagagaaatgctgatcaaaccgagtcagcagctgatcaaccctccgccgtcggtgaccaacctttgagtcggaattgccgggtccaaagttggcatttggtcaaaggcaaagagcgacgggggcaatgtcattagtgaaatgaacagaggcagaaacggagacgcatttgctgccggtgaaatcatcggcattttaatggagggacaaaagatggcactttccaatgattgcgtcactcaatcttttaagggataattgacatttgcctttaattgaccgccgctgatccaaaatattattatttggggttttgacgaacaaggaaagtgaaaagcaactcgtcacaccgaaaagcgggggaaagggtaaattgggaaggaaagcgattggtttgacaggcgacttttaagcagccaaaagaaggggagggaattggttggttccatctatcggagcaaaacggggcaacttttccccgtcccttctgttgcgtttccaatcgccgccattcctccctaaaagcaatagaactggcgacacaaacagcacaacaaatgtccatttctctgtaaacatttgtccaatcattccatttacgatcggcgcgacgctttcagaaaacgaagccaaccgaaacccaaaacatttgtgccgttggactggccataacagaagacactgacacgacaaaattcagtggcgattcgtttttaaaatattgaaacaaattattattttttaaatgttaaaagaatatttattgcctatcattttgttttgtgtgtcggtgtttgtttagtgagactggaactgcctttattactggacattgatttattttatttttgtattagaaaaataaaatggaaaaat

SEQ ID NO: 7892 - DNA, 2971 bp, Heterodera glycines
gcaatttgaaaggaaatcaaatgaaaggaatctgatcaaagccaaaaggattctgtgggaaaatgccaaaatcggaaattcatttacccaacgatgagaagggatgccaaaaatcgaacagaatgtattcgtccgtgtcaaagtgcacaaaaggcgatgacatgccataagagaaggcaccattaccgtaacccatcggcatcatcccattaccgtatccgccaaagccgtaaccaccgttcatcgtaggattaatgttaatttttcaatttgtttacttatgtattttcaaaaatttttttggtgcaatactttcggcgcgtaatgaattaataaaattgaagaatttgcgatgaaattgaaatgattctcttcaataattgctaatgttgaaattgtgccattgtctcctcacattgtcacctgtcgtttcagcgatggcatttgcagtcggcaattcttcgtcttagtagtttgccgacagaacgataatatttacgggacgacaaactttccattggttgacatggtaactctttgaattaagatgaaatagaacaaaagttggggataaatgaagggattcaccgaaaaaaagggaacggaacggcacggaaaaagaaaagggactgacaattaattggactaactaaaagaaacttactttgatcattggaagtgaatggtacggggattgtaaattaccaaaaatcgggcatttttttaattgtcgagaaaatatatcacgttttggcgttttaaatcagcctttctctctcctctcactccctccctctctcttccatctctctctctctctctctctctctttcgtcgccctctctctctctcttccatctctctctctctctttctttcgtcgccctctctctctctcttccatctctctctctctctctctctttcgtcgccctctctctctctctttctttcgtcgccctctctctctcttccatctctctctctctctctctctatttcgtcgccctctctctctctctctctctctctgtctacctctctgcccttctcactccctccctctttttctttcgtccctctctctcccttccctttctctctatctcccccgctctcccttccctctctcttttcctccctccctccctctccccctctctctctctcccttcttactcccccactctctctctctctctctcctgtctcactctctcagttccccctctaacccctccctctctcccttctcactctccctcactccgtccctctccctctctctcttccccgccctctctctctctctctctgttgtattctcactgcactttctcgtccccatcttttccactcttcccttcatagaatatgtgtgtttttttgtcctccccttttcattttcttcacaccctcataattatatgtgcatgagatgggtgaatgtgtgctcttttagcttcttcccccatttacccttttgtgctgtttcatctgatgttcacgtgccttcactttccctcgggggggggggggggacggcaatcgccgcacacccaaacatcgacagttgttattttttttatgaatttgtcgattggacggactttttggcaggaaataaattctgtaagcgcagcgcacttttccaaccaattgcatagtaattataactaatggcccattacttattatttgaatgttttggtttcggtttcagcatcaaataataattggtgataagggagagtatttgtcaaatcggatttacgtgaggaattaaaatgaaaaacggagaaagtcggccgtagttaaaacaaaaaacatcgtcggtctgtccgttttcagccctcccaaaattctcacattttgttttgttcgtatttaactgaattttccttcctttgaacggatcattgtccgtcgcacttactgttttcgactttcaattgaatgcgtcgagactctcgccacttttgggttgggttttatcttatgatttccctctctccacccttactcactcactcacccagctgcccactccgttgtttcccgcttttccaataacaaattgtaaacacacagtggaaagggccactttcacttcacgtgcgttttttatcatccattttaaattgtgatagtgttatttttaactaaaaagcagcagaacaacagattcatcggttaattaagcaaaatcccagtgacgatacagtagtagagtagccatttagtcgggcagctatatggtcagttgcatggttttttatttttaagtatttaatattaatttaaccgggtcggttcactttggcccgttttatgggatggccattgtcgcttgcctttttgaaaatcccaataaaaataaatttattgttttcattttttgtcaccgctgacgaaagacccaaaatgtaaaatgccgagagttggaatccccacaaggcctgcatttgatggtcaggttagggcctcaaaacttagtcctaccaaatcttggtaaattttggcaggttgttcaaatgttttgaaccaaatataaataatttttcgaaatttatcgacgcctcggcaccaaaaatcctacgcaaaaatagccgatccaaattgacacgaatttaataccggggatattgcaaaattcgctcaaaacgatgacgggcgaataggtgtgacggacgaccttccccttctttcattggtttgctcgtgttaattgaatttctgtccataataacaatgggtcacgtgggttgagtggaaggcacccgcggacatcgcctgataattgataatgccccaccctcaaaaacacattgtgacaatctcttttaataccctctgaacacgttcaatttttgtccgagggtgaggcgaggtaaaattatcgaatttcttaaaaaatacaaaggaaatggaattttgactgtctggacacaaagaacgagtttagtttttt

SEQ ID NO: 7893 - DNA, 2004 bp, Heterodera glycines
cagtttcgtaaatcgtacgggggtcattgcccattcctcacaaatcagttctcattaatgtcctcgccctgcattttccacccacccaccaaaatgattgcatttttccgttttaattttctccgcttttcccaatcgctgttcatttccctctcccttttcagtgccctatttgtcagcacctcactcccactcagtccgtcatgttggccttattcgcctcaattttcgaatgcatttttctgctctttagcacatttggcgccctggcttcagtcatgcgaccaaaggtaattaaaaataaatattattttaatggcttaaaattttcagatgaagggctttctgttgctcgcattgcttccgctggtcacatttttaccagaaacaatggcgaaaagtatacaagccgctgaaatgtcggaaatgaacgacgaattgtccgactaaaaagccaccgatcgcatcgcctgagggaaacacacagcaaacgcaaatctgcggacaccaaatattcgggtcttccatttctttttactcttcctttgtcaccaaataatattttcaaatgaaaaatgacgacctaattgattgtttttgtgtgtttcgtaggcaattctgggaccatatcgagaaattttcgattcctcagaggaaacttcccaaaattgtccatatttatttatttgtgcgtttgtaatttttgggtttgttcatttataattaaaaacatgtataatgcaaaattaaaacaacaggattaaaaacgctgttttttgagtatttcgggacgccacagcagcgggtgagaatcttctgactaaaagtggaagagaatcaaactatgaatagccaatcattccctcccacattttcttgccgctggttttgtaattaaaatataaatgtgaacatttctcaccgcttccgagtcctctttccacattttgatcgatttgtctgcctcccccgtgattagtcgtgtgccggatttgtcaaaagtaagcgcaaaaatgccgcgctcggagtcgatagagcccggctgtggtggcgggtgttccttctggaagcagaaaccggacttgaagtcccaaaagtgcatcgtgccaacatcgccttaaatgattaaattgtaaatggagggttgtggaggggaaaaggaaatttatgcagttaaaactaaaatttttagtattttataatgttttcttgttgacttatatctggtcgaaggatggattgtattatttatcggaaaatacctccagaaatgagcactccgttttcgttgacaaccaatgaatttatcattgtgttatgtccgctcaaattctgcacgaaatcgccgtttggaaatttccaaagtttgatgttgtcagtggacccagaagcgaacatattcagcgatggatgaagggccaaagagcggacacttttctatcaaaaacaccaagtattttaatcttttcttgtatgtatattcccgagactataatctttcgttttatatgccaaaaaaaaattcgggttgggaatgtcgttccagttgactacataggatatctgaagggaaaatttcagtttttgagggcacccctataactccgagttttcgccatacatgtgcaaggggtatctcggcccaagtgctatacgacgtatgattgggatagggggggggggggtgtctcgggaccgatttttcatacgaaggtccaaattttttctatggcgacgaacttttttttgctatcaaacacagctttttttgcggcgaccttttttcaattcaaaaaaacttttgtggaagggagcggtccggcggtgccgataggcgccgccgggaaatttttttgaattttttaatgaaattagctaaggaaattgatcaaattttaaattttccccccatcgtcgacgactcctccgttcccacgacgaccccctccctcttttacagccgcctcccttacgacgaacgaaggggggggggtgtccgaggcc

SEQ ID NO: 7894 - DNA, 2606 bp, Heterodera glycines
  unsure (1)..(2606): unsure at all n locations
cggcactaatgtgtccggtcaacgacaatttcaaatgtctgcttgccaagtcccaaatctaaaatatttttgttttacatatacatgtgactaacatgccttgatgatgcgatcggctcctccgctggcgaaccattcgttgttcggctccacgtccaccgcccgcacccatcccgtgtgcccagagatgactctaaaccgatacagaactttgctttttaagggaagacagccaatgaatgacctgtacagcttccacggcgcatgccattttggcttggttatcaaattggcacgggaaggaagtaaagcgcgcaaattcgcattgtcttgttgaggctttgaaggaacagtggcgaccattaaattgccggtaaaatcagcaccatcgccagctgtgatagccaaaggggcatctgacaaggaatattattggagattatgtggacattttttaaaataaaaaaagaaaaaaatgccgtggacaataatgcagctttttctgatattttgctttcctcactttcattgcttacgactgctgcaattgcttctctgttgcttttcggtaatcgaagcacttccgccgcctttcgcttcttcgcctcttcgaccgcattcattacgtgtcgaaagtcacttcggattttggtattgcgccaaattcgctctctaaaaaaatattttgatatatttattaaacggagattgcttgattgtgagaatacaaagcgaaatgcggcggcatgagaaaatttttggaggtaatactggagaattggtaagaacttgatttttttanataaatttttatgtaaaaaaacatgtatctgtggtttttggagtcgctgatcacgaatatgaccttagttttggccaattccgaatccaggacccgaactcagacaaaaagtcgaaaattcaaacttgttttatgtgtgagaatttcgactattgttcgagtccggggttcgaaattggtcaaaattaatgtcagattcgtgatcagcaacccagaaaacctccataaatacttttaacgacttttagaaaaaaaaaattttttaatttatttttcgccgggacaccaattctcccagtattatctttttggattaagggcacttttttcctaacttttatcgaattggggtgtaatacctgctagcccttgcccacccttttagtttagtgataaaactgacgctttttcatcattttctgggaatttctcatagtcgtgcaggaacatgtcatgcgctctcttcatagaccggaagacgtaattgtgaagtgccttatccttcgcggttaatggctggtgatctgttgcggtggacccggcttcatcagtaacccgattatgttctgatgaatggttagccatttcagtcaaaagttgaaagcaaatgaaagaattctcctaaaatctatttatagcaagaaaataaaaaatggagaatttacaagacttagtcgccattctgacttggatgagaatttttaggaaatacataaatattcggggtgggaccctaggttgtgaaagtttccggaattcatcaggtcccataaaaatccataacccggaaatttttaaatatgcgactgcggtgcgatgcaagtttacaaactgcattaaaaatagtcattttgtgaatttttaaattattaaaaagagaatcatgatttgattagatttaggtaagtccaataaaaacaatgcagaagaattggtacttatcaaaaccgctagtttttaaaataaaattacggttcagaaattttaatcaaagaatccggagttccgccgcggtcctaaaaagatacggggttccgaacccggaatactgtccctctcctaatataaattcatacaagcgaaaaacgatatctgaaaattataaattttattagaaaaatggttatttctcaaattgctaaaacactatggtcacacaaaaagaagagcatttttgcagttattgctacggcttacggggcgaacgctttaagggcacgtttaaggtaattgattagaatggttagagttgggaatttcttctaaattaagacgttttaaaatcttagttaattatttaattaataacttttttaaataaatatttttgataattttacagagatgaccgaattcgatacagttttgcagaacgagcccgtaaatatggtctggtaagttttgggcccgcccagcgacttcgccgtgtcactgttttggtcaatcgcgagtcgggcggacgacgggcggccgaccttttcaagcgcaatgcacttcccctgctcaatttggccgggctgcaagtgaatgttgtggaggttgcgccaatttttactttccattctttttctttattttgaacgcaaaaattcttttaaactttttttggtaatagtttagatggtagcacacctttttttacaacttttttttaagttttaaaattgtaaaaacatgtcttatgggcttttccgggggtgctgatcacgaatctaacaatcaatcccggacccgaattcgaacaaaaaacggaaattctaaattatcaaaattcacttttatgttcatatctgtacagaatgac

SEQ ID NO: 7895 - DNA, 3102 bp, Heterodera glycines
ggaataggcgttcagaattttttaattacactggagaaaacaatttggctcgaagagcaaaaaaaaggtcttcactaggcaaaaaattgaaaaaatggtcgatcgtaatggaaatgggctctgaccccccatgggggggggggggtcaaagtcgatcgtaagacctcttggctgaccccttccccttgcacaggtatgccgttctgcttgaattcgatcgtcgtcctttcttttagggtcgcagttaccccccgcctccattcgcccctttggtcgccccccttttacgcccggcaggtgtccgccattcgctcattctttgtcagtcagaaaacggctgaacttttagcggaactgcgtcaaattgaacttcgtcgattcatccaacaaatcgaggctgaggaatcattgaagaccaaacgaaatgaaaggacgtcccatcgtccgtcggtggtgggacggcattttgcacacaatgaataaacattcattccctttccaagttggcactcgattacggtggttattcggaagagagaatcgaagcccatctttttcaaatatggccgcagggaatcggcccgggcgatttgcgacagcaattgaattttgaagacagcgaaaacgaatcgcagcaccaagtaaaagtgggggtggggcggggtttgggagggcgggacgctctccaatttccattttcaaatttgcaattgatagcctcggcttggactgaatgcgtctgcgtttgacactttgcagcatcgtcaccaagtggtctcttctcttgacattgcccttcccaaagtgtgccaccatttccctttgctgtattttgaatgcttttaaggatttgccaattccgcccccggaaatggtcaaaaaaggcgaaagtctttcgccttcgctaagtcgcaaatcgctccccgaaatttgccagtcgcaccgcaaagcctcccaattgttggagcagcccgtgtccagttgggtgggtgggtggacggcatccaattggccatgttttctttcgttattttgacattttcaggtttcggtgaccgccaaaggcattttggtaggagagaaagaacatttttaagacatttcgccaaataggtggaggatttgttcgatttgaactcgccactacccgccattggccaattggagcccgagtgttctgaccccgccttggaccccgtacttcgcgaacttgacagtctccccgcttttcagtacagacatcagctgaccaaattctacaaaccggagaaggccctgagaaatgtttcgaatttgtcgttgttttgccatttacaattctcagactctccgatcactcggctcctccggcaaagtcgaacagattgaacacgtggtggcccgtctttattttgccatgaaatgtgtgcattctcacaatcagtgtgtgttttgatcgctttccgtttagctgacgaagtgcactgggctctgagcactctttcggcgttgtattggcgggtgaagggcgacccggtgaatgtccgtcttttgtttttggctttctttggccaaatggaaagagtcaaattcaggccattaaatgccttcggcactctctgcacaaatcgccaaatatattcaaagtgccatttccaaattttgttcgcaccattttgccttatctaaggacgtccctttgatttcgctggccaacatttaccatcaagctggcttccttcacagtgccctaatcgtcggacgaaaaggtgccgaaacatttcctttggcgatggctctctctctttgacagcattggaagcgggcgtcgacgtggtcgctttgcacttcactttggccaacatttacgcctctttggtcgtccctttgcctctgcgttaatccctccgtccctttagtccgattttccccacgccctccaattttaccactccacactcgcacttcagtccaattttgagccggccaatttgaggattttggtctgtccttttgcatttgtttgcccctattccaccgattccttctttaggccgtccattgcgttacaaacggaacacttttgccctactgacaatattacggattgccaatcatttgttcgccaatttttcattccttatttatagagaacggatttatatttactaaaaagcgccaaatgtgtgcttatactgtaatatgtactgaattaaatccccttaaactgactgctaaaaaatggatgtaagcaaaaacaacaacaacaaaaatgccaaaagttgcacatatattaaacaaaatgactaaaaagcgctttttaaatattgtcagtctttcttttagcattcgaacacttctgcctttttgtttcttcttctcctcaatttttccccttcaaaaatgcaatttaataaatttaaattaaaatcgttcccctgcaatttcattcattcagtcaaaataataacaaataatttggccggtttgttcattggttcctttcctccttatgtgcgttcttcaacactcgtcgttattttggcgttcttttttaaattctccaatttcgcgcttttgcagtcgtatccaattgccttggggaggagagttttctttgtactctctctctccccccctccctctctgtccatttctctctctctatccccttcccatctctctctctctctctctctctctctctctatgtgtgtgtctctctttcactcaccaaacattggccgaatgatcagttcagcggaaacacgcatctgaagatgttgtgtccaataaacgattctttcccttctcacctcatcagtgcgtaatttcgaagtgactcgaaaagaacgaagtatctttgtgattaggcacttctcttccataagagcaaaacgttggccttgggggatttgagcatttgccataactgtcggcactttcttcccccccccccctcaaaatgccaaccgatgcaatttcgagcgcccgcactgaaaggaatatagcagtagggatgcttcagatagtcgaccttcaaaaagcgctcgggatcaaaaactgaaaggggcagaacaaaagaagcaaatcggcagaaagaagacgaaacgaaccctcggg

SEQ ID NO: 7896 - DNA, 3415 bp, Heterodera glycines
  unsure (1)..(3415): unsure at all n locations
atatattaaacaaaatgactaaaaagcgctttttaaatattgtcagtctttcttttagcattcgaacacttctgcttttttgtttcttcttctcctcaatttttccccttcaaaaatgcaatttaataaatttaaattaaaatcgttcccctgcaatttcattcagtcagtcaaaataataacaaataatttggccggtttgttcattggttcctttcctccttatgtgcgttcttcaacactcgtcgttattttggcgttctttttttagttccccaatttcgcgtttttgcagtcgtatccaattgccttggggaggggagttttctttgtactctctctctcccccccctccctctctgtccatttctctctctctctctatgtgtgtgtctctctctcactcaccaaacattggccgaatgatcagttcagcggaaacacgcatctgaagatgttgtgtccaataaacgattctttcccttctcacctcatcagtgcgtaattttgaagtgactcgaaaagaacgaagtatctttgtgattaggcacttctcttccataagagcaaatcgttggccttgggggatttgagcatttgccataaccgtcggcactttcttcccccccccccccctcaaaatgccaaccgatgcaattgcgagagcccgcactgaaagggatatagcagtagggatgcttcagatagtcgaccttcaaaaagcgctcgggatcaaaaactgaaaggggcagaacaaaagaagcaaatcggcagaaagaagacgaaacgaaccctcggggttttcncaataattgcggtcgcggtggatcatcgacgccacaatgataatgccggtcnccgcaggcagcaaaaaatcctctgaaatgagaagcaaatctcagccaaacacttcccaccactcactgatttgcgtgtcctcagttacctttaaaaaggaaaggaccaattaagtgataagaaaatctttagataagattcggttggacctgtcgagcgatgagtggtacacttgggtaaaggctaaagcagataaggggacggataaagcaattggcatgcagcgaaagaccggagggtttccttcagacacgcttccaagtagcgcaactcgcccaattgctcgtagcgaagttcggcctcagggtcgggccccagcaattggtcaatttcacgctgaacgcgcgattggatctgcgatttgtgcatgagaaattccaattgcgcgaatgccgttgtcacctcgggattggcacccatcaaatgcaaaaaccaattcaatgctgtcgaagtcgtatcgtggccctacgggaaattgggcgggggggggcattggttcccaatcagaaaaacacctcaaaagtgaaggtgtccacttcctcctgaatgccggccaagtccaactggccgtgctgctccatgtccaacatcaaatccaacaatgccaatcggaagaagaagatgtattttatacgggtttcaacactccaaaaagaatctctgcttagtttcgagatttgcggaacggatttaggcattttctactggcaatttatattgtctaaaattgcatttgcctttgtcccttttgtccatttttatatgccattgccttcccttgggccctttcttctccgattacctcacccctttgcctccctccgtcactttcttcgccactaatttctcaatgcctcccgcttcttccatcgcttttttacgtgccaaaatcgccttaatttggcttatggcttgaatgacaaatgattctgcagggccttcaccttattagtaaaatcgtgtagaatttggacacatcgcttctgctctttgccagccccaaaaatgttgaacagaaattcgggataaaactgaaaacaccaattaaccttaataggcaattaagcaattccatgccaactgttaattaactggctacccatccaacagttcgcccattaatcgtcgtcccctccgtcggttgttcttttacctgcggtttgactatccgttggaaaatgatatttttgatggcgaacaccgcgtccaaatagtccgagtgaatggtccgttgcgcgtcaatgttcacgccgagtgccgcctcgcaaatgatgtccaaagtgcacagagtgatggtgtggaaaatgtccacaaattctccactttccgcaattttctccatcttttgcactaatgtggtgccatgccgattatacacctttttgaggggtgaaaagagaattttttgggaggcgacggacagaccggcacaaagtccttcagaatgtcgtagtgaaactgagcaaaaagagtgagtaagcggaagcaatcggacggaataaataaccaacggtgggggtgagcaacttgcgacgggggcgccatttgttcggcttactgagcaaaaggccgtcgccgatccaagcggacagaaaggagtagtggaacatcttgacaagcaggggtttggcaatggcagtgccacagtgggaatcaccggcttatttactttttttaagtgttagccatgggaaggggggacccgcaattagaagcagagggaggggtgtgggaggaccttcgtcagcagttttttgctgcccagcaccggctccacttcctcggcgccaaaaatgatcgcaagcggaatggggccgagccacgcccgcgcgatgcgtccgttcttctccccgaacatataagcgaggccctggacttgctcgaagaattctgaacaaacagtccacacagaacggggccctaatctgactaaccatcgggcttaagccggatttgatggagatttccgaccaaaggcaaagtggaagggcccgggattcgattgaccaactgagagatgcgcaagaacttccgactgatccaagcggaaagccaagcgaacagagaagcgatcagaaaaacaaccaaaaagcccatctgctgaaggggaatggagaagtgacctttgacggagacgacaaggtcgaggaggagagaaacaaaatgggaaaagtgggggggggggggaggtggcgaaattaaatgaatgaatgcgaatgggggggggggaggaggagcgggaattggctccacctttcaaaatcaaacaagaaaaaacgttttatttatgctcaaatgggtaattcaaagtccctaagaattcacaatttgtgaagcaaaactggaaaagagaggggaaggaaaggaaaatgagagcggggacacagataaagggagaaatcgaatggagtgagcgatgagcggaagaataaatggaaaggaaacgtaacagggcggtagagtcaaaaagggacgggggatgaggaaagaagaaagagtgacccgagcaacacgcgcaactgaaggtgtttggggagaaagaaagggaagacgaaca

SEQ ID NO: 7897 - DNA, 612 bp, Heterodera glycines
ttttgagttgtaattgtgttcccaaggtattgtgtttgagaaaaaacacagtttaaaattcggaatcaaaagcattcactgtgtgtattttccgtgtgttttgagttgtatagcgttctcatttgtaattgtgtttgtggaaagggtggaataaaaatacaaaaaaaaaacagtttaaaaacactgcagaacgactgtattttgagttgtaattgtgttcccaaggtattgtgtttgagaaaaaacacagttaaaaatcggaatcaaaagcattcactgtgtgtattttccgtgtgttttgagttgtatagcgttctcatttgtaattgtgttttggaaagggtggataaaaacacagtttaaaaaccggaatcaaatccatacaaaatctatttgtgttgtaattgtgttcccattgtaaatgtatttttgagaggataaaaaaaatacaaaaaatacagttaaaaaatcggatgtaatgcttaagaacgagtgtattttccgtgtgttttgagttgtaattgtgttcccaaggtattgtgtttgagaaaaaacacagtttaaaaaccggaaccaaaagatacactgtgtgtattttccgtgtgttttgag

SEQ ID NO: 7898 - DNA, 2694 bp, Heterodera glycines
ccccccccccccctaccgccgggggtgctgatcagcaacagagaagtgaatgcgttttttgctgataactgctgctactgatcacccgaactgtccatgataggaatgtatgaaatttcggtttctcattccctggaaaaggttgcggttatgcagtataaaacattgggatttgtaggctacaataacctgtgtatcaggacaggagccaatgcccaaaaaatattttcgggaatcggatttcccgaatccaaaaatgacgaaaacacgaccagcaaatagtcgggaccaaattccgcggattcaaaaatgccgtgaatcaataagacgactatataaaagtcagaagctgatgatggcaacggtcattcctttttcccaatttatgcatttatcacgactgggaatttttttctcccattttgcctgattactaatcaattactttctctaattatactgatgaggtgctatttgtgtattctgatcaccgattacagccctctgacagataatgttcattacggcctaacgaatgaccagcagaaaacaaaaatagttgcattaataattggttttcctccaccacgccgatggtggaggaagaagagctaaggaagaaaagtgtttgtgtattttttgtgcttttgcggtggtgaatcatccatatgcttcatccattcgtccctcatccatcattccaatattatttttattaatccggttttttttctgcccacgactgcaacacagcacagcaacacatcatcaaatgatgctggcgggcgctggtggtgatggggcggggggctaagacggccatcgcccgccgtccgacgaaaattgggcgcgacaagtcggcccatcggcccaccgctaatcgcatggacgcggccctaactcctgctccgccctccggaaaataatctccccaaaaataatgggttgctgtgatcagagcttaaagtgggatgaaatttagggaccataaataattttaaaaaaataataaatagtacttttcttttgagaggtgttgaaaaatttattaaattcgaagtgatctaccatttttcaaatgccaaaaattcatttccacataatcagagacccttttcaatgctttgacccgcttttgctgcagccggtggagacaaagaactaaaaaaccaacgctaatataataaaatttgtaaaaaaaatttcgtaaataaacttttaattccgcaaaaaaaattcccgtctatcagtgcgtttttgggtttcggcgaaaatttcacgaaatttgacccccctccccgtccattttctatggctgttgcttacccaatacattttttgtagccaccaaaattaaacaggacattgctcaaattgttggtcgaatttgcatgatttttcttctggtgttgaaccgccgtcgcctccccattttggcatcacttcaacaggcaactacatgaagagccattatcgtattctttcttcaatgtcagctttttctttggtccgttcattcaccaatttaaatggcacaattggcgttgacgcgtgcgaattgaagcaaacggtgtaactgacagaagtgcgggcacggacaaaaacccaaaacgaaatcaaaatataatgtcagagtggccaaattttttttttttaaatatgacaaaatgactgaaaaactaagattcggaccccaaaaataagatttttttaaaactaatagtagcgcgaaggaaacacagtcgtcgccccaggtgcgaggtaccaaaatttgaccctaaaatcttatatggactaaaaaggccgaaatatggacgaaaaagctgaaaaatggccaaaaatgaaccaaaatatgggctaaaactgcaataatataagtttaatttaaaccataaaagtgtacatatgtattcaatatttgaattaaaaaaaaacaaaaaaaaaatacactaaaactaccaaagatggatatcattaaaaatgccaaaatttattgtccgttatataaactccttcagggaattttgtgttccattgccgaatttaggccgaatgcgatttttttttgaaaaaaattatttttatttttaaaaagaaagggtctaaaaacgcaaaaatggcgaaatattgaatattcccggaaaccccccaaaatatgatttttataaaattttacttatctagcgaatatttaataacaaattatttaatttaattacataattattttatttttaatttttaaaacaattattttgcttttaatttgatcactttgcacttcgtacttcgtcatagcatcgtgcggacgcatttcttaaattccgtcaatgggttcggaaacaaaaaaaaagtgtatataacccataaaaattcataaattggctcaaattcaaccaaactaatatttcggctctattgcagttcacacgaccataaaaaaaagacatgaccaccaaatattattattttttaaatgcatctaaattaaacattcttaattcctagtatcatttgatatccctaataatcttctattattgaacaaaatttcaaaaatttcgtaattcttcaaaaaagtgtttattttctggttctcttctatatatattctttatttataaatacctattttccattttatatttttatcgtacggctgaaattttattttatatttaaaaatttaaattt

SEQ ID NO: 7899 - DNA, 2114 bp, Heterodera glycines
attaatccaatcttttaattgatctctcaagagcaatttgattgaaaaagaatgtgcacaaaaaatgccaaagaatggcgctaaaaatggcacaactctttggcgtggcatcaaagtgcgcacagtgccaatgccaacgcaaaaacacagtggaggaagcttcatcttagagacatcatttggctcacagaaatagttagtgtattttttaaattttttttaagcaaaaagtgcggaagcgaaatttttagatttttttaaagcaatttatacaaaattttagaaattaatgtatttatttgtaagaattctttaagcaattttgccaatgcagaacaacgccacttttctgttcttttctatttgaatcaaactgctgggccattcactcgcatttctttggtggaaaatggtgaaattagcattttgccttctccattttttcaaaatgccattctcagacatcgtcgctgggcgtgccatgcaaaatgattttcttggtacaaatggtacttcatcttttttggcagattatgccggcctttggcttcttggactggacatgttgccgatggcacaccaaaaagagcaaaaacaatggctgaagatgacgctgttcaccagccgaagcagaaactgcgccatggatgccttggtagaaaacggggccgggaatgacggggatgaaaaccccgggaatcatcccatcccctccggggttcggacaatacgtcagtgaagacaatccgtcagtaatggacaatccgtcagttgacaattggtcagcaaattttattatttaaaaaatgctcaaatttgctattgttcgattgaattaaaaaaatgtatggtattttaaaacattaccagttacttaataattcaatttaatttatgtttctatagaaattattttaatttaaaaaaaacaaattattatttaacttttttcaatttaaattcattttcacattttatataaaatcttgcgttttaaaattaaaatttctgttcatggcttgtccactgacggattgtccgggaaccccttcttccgtggatttctgcactttttatttctaaatttttcctttgtattacccatttttgatcaatttacctttgatcaaattttttccttttagtttatccaatcgacagaatccgttagtcctctcaaaatgccacacgtcgaccgttttggtctttttccgccaaaatatgtggacctaatttttcaagcccaattcactaacacggaacagcaaatgatcagcatcaaagcatgggccggtgccaaaaaatgtgactgtggaccttttgagtgccaaaattggtaatggaaccaatgagagtaattaattacggattaatcgatgccatttagacggtgtcaccaaaagggaagtgagcttcaaaattgggacagacagcgattttgaagtggaattgccaggagtaaaaataaatgacaataataattaattaaaactattatatttctttttaaaaattcggtcgagttagcctgagaaatttaatcatttagtcgtcacaattgatcaaaagtaatggagtgcgtttggctcgcggcagttacctgatggatttggacattgctgtggtcaagcgatgctttatgatcagagtgaacggtgctgagttcggcggcctcagttgtccaaccggtgacaaattggcatgggaggcgatcaatcggataaaggtgctgcacggacggacggacgagacccaatttgatagaatttttaggaccaaaaaataaatcccaaaaattgctgaccataaaacgctaataacgtaactcacaaatagagaaatcatcgcaattgatcgggattcggtcgggatcccgaaccgggagcagtcccgatcgtttttccaaaatcttcgagattacctgtcccttaggtagggaacagcgccgcagtggggagggttccaccctgctctatattttttttattattcctgagctaggactaccccgaggggactgagttaggttagggaaagtaatatagggtgtaaagtaggttagacggttagagatatctctacactatttctcttttactctagtatctctaact

SEQ ID NO: 7900 - DNA, 1072 bp, Heterodera glycines
cccccccacaccgtctcatagcctacctaagaggcacttgtgtcgtccacaagggtcacttaccttcttccaagtgtgatgccagaaggaacggagtgtgggagaaagtgggataaaggacctgagagaacctctaaaagtagcgcccgtagctcagttggttagagcacggcacggattgctggggtcgtgggttcgagtcccaccgggcgagttaccttttatgttctacacaaggcggcctttattggatattgcatcccagccacttgcaccttggaatggcgaactggtagccggctactaccaggcggcaagtgttcgggcgctacctcctccccttgaccttgggaaattcttgccgtgtcagagttgccacccgagtcccgcggatttatttatttttcccatcccgaatgccgatccacccgaaaattttgcccgtccccacccgaattccgtctcttttttcttggacactgttaccctgttcagtagatgagactaattaaacatcttaaatttggcaggtccaaggccaaatgttgctgctggacaaaccgattgtgaagcaaatggacgaccaatttggatgtgaagtgtgaaattttgtttgaattggtcactaattacactaattaatgcattttcacacatttttgaaaattgggtaacagcaaagaaaagagggctaaaaacactttaataatttttcaacaattattgagccaaagtgcggggaaaaaagcattaatgtttatttcggagaacgaattaattaattaattaattgccaatctccgctaaatttactttaaaagtttaaattaatttttgcacaaaatctctcagaaaaattcaaattgtggtgcttctggaattgatgtcgaatcagatgagtgcaatggtgaaaaagtgagtcgtttacttaattacacttaattactatggtcttgccagacaatctctgctggtttcaggggcgattcccacaaaaatggcaaattttgtgggttcttggctgatttttaaattttttttttttttgaaattatgtgtttgtcagtgcgga

SEQ ID NO: 7901 - DNA, 2433 bp, Heterodera glycines
  unsure (1)..(2433): unsure at all n locations
cagaagggccaacatttcgacgtaaagcatcgcgagcggagcaccgaattcgtcgccgcttttcgagtaaacgacgacagcaaccgcaaaagcaatgtgaacgaaattcagtgccaagggcatggtggcctaaggcaaagtgagcggatgaggagggccaatcactgactgaccaggacgatcagactgcgcgtgatctgcttgttcatgtccacgatttgctgctggccccacgtcttcccggacaatgcgttcgctttcactgttttcatcgtccgatgtgcgctgacaaagatcacagaatagcaaaaggcgctgagcaacagtccgtaaagagaagtgacgtgccccgtgtcactctgaagcacaaaaggcacggccctaattagcactttccttgccgaaaagccacaatttgtgccacgtacggaaacggcgtttacggtgacaaaaattgcgggcgatgtggggacggtaagtaattgggcaatttgttcgttgtaaatcacatcggattgggactttgaggcggcgttgaagaagaggacgcacagaaccaagtcgaaaaggagcagcagcagtagaagaaaagcgtaacggaggagggtaattttaatttccctgggaatattttaatgaattaattcattaaacaaagacaaattaataattaacacctgacaatttgcaaatagcgcacataaaactgaacgcaaaggccatggacggaaaaatcaatgagcaaaatccaaaggacgagaagaagaaatcggacagaggccgaactgatcaaaggcatccaagggccattgaggtaaaagacgccggcattctcgtggatgaagaaaatcgaaaaacaacgaattaacgggaaaaaggaaaagcggaacaaattcaaagggtacgggctgaacgagagcattggccaaagacaggaggaggtccacaacggcggtttggagcagtattcggctgtaagagcgcatttctttggtcgaccggaaaagcaagagccaaatgaggacggaattgaagcaaaagccgagcaaaagacacaaaaaggcattccatcgatggatttggccgatcatcggatagaaaagtaaagcaaaggttggggaaaggtaaagccaaatgggaaggtgaagcagaagccgacaatgcatcgggcgaaagtgccaaaggcagcaaaagcatttctattttcccacgctcggacgaagaaaaaaaaatcataacgcgtgcgaaatgtggtaatttagtccattcgaccaaaaagcttaaaatatcatttttaaggtttcattcctcgaaaattagaaacacaactctaaattcgaataaaacttacaattagtatctgtaatgactgatcgaaaatagctgtgggagctcaaattgctgtgggagcaaaaagacaggggccaaaatgaaaagatggccccataacagtcttacaaataaaaattgtaaaacattgggaaagggtaccgtaagcttgtaccgtaatttccgcatccattttaagcgatggatggttcgggttttcctcgacaattatttcttttattgtcaattttcttcaggactgaaaatggggcgccgacgccgaaagcggatagtactttcaagtttggcaatcattgcaattgtctttgtcggtatagtagtaattgccttgtttatcgaaatattgagaggcgcttaagacagctgaaattttggagaaaagatgttgactttttctttttatttaccgtttattcacttgacattatttttttttcgttttttnagcataaacatttgcaaaaaatgtgtaagtttnaaacaaggcccaaggtatagggccgngagaggggggggggtaatttatntaaatgatcctctcttgaaccaatcaaaaattgaaaaatcagtaaataatacttttagcagaaataaaaatagtttatttttgaaaaatggtggcattgcactaataaatttacctcattttaacagtgaaaattcattttctttcccatgattagagtccacgaatgaacgacataaaattttgtcttaacattgtattgtcaagcaaatactactgaaatctaacagcacgcagaaaatgcgtcagtggaaaatttaaatgtcataaaagcaagttcattgggttttcgaggtcactgatcacgatccggtatctatttcggcaaattccgaacccgaattcgaacaaaaagccgaaagtcacaattttttaaatttagcatttttagttcaaaaaggcgtacctaaatgatctcttaatgaattattgatggctttcagtttgtttccatgtgattaaaccgatttttccaaaatgctaatttagaaaacctggactttcgactttttgttcgcatacgtgtccggggttcagaattcagaacgatttcttat

SEQ ID NO: 7902 - DNA, 4579 bp, Heterodera glycines
  unsure (1)..(4579): unsure at all n locations
aacccgaaagtttatttgtcatcctttttcgggttaatacattcacaaaataataatgaaaatgtaaataaataaaatgcaaaaataattaatcggaatcggatgaattgctgctgtccacaaattccttcgagatgggctttttgctggggctgctttggctcttcttcggctgattttgggaactggtctgtcccgcggacgatggcccttcgcctgcttcctttttcttgctttggtattcgctcatctcccgttcgtatcgctctttgtcctccttcgccttttgctcgtaaggctaaaaagaaaggagtaattaattagtcagctaataacggacatcactttcacaatttatttatggaaacgtgttaaaattcccaagactctgtttccattttaaaaagtacggttgcccacctgtttctcctcagcgctcaaagccttccacatttgcccggcccttgccgccgtttccgtcacactgtcccccggcttttgatctgcggtcggtttcgatttgccagatgaaaaaggcggactgaattgaatggtttttaattggttctaaggttattattgcttctctcatctaacaataagcatattcttggttttgtttgatggctttaatgtttaatttgatgttatggtccaaaaactcatccggcgattttctcctaagtcggtcgttacccccctcctgtataatttttactttgcggagcaattctaacaaacttgggtacgactccgacccgtttttgagttccgttttctccctttctctccttctcttctctgttcccacctgatttcgtttcggtgcgttcgggtccttcttcttctcgcccttctttccctccttttccttcctcttttccttttttcccttctcttcctttccctcctccctgtccttcttcctctttttggctccttctttctctttttcctttcccttatctgtccccatcaaatcgtcggatacatccgtcccatcgtccgaatattcctcgtccggttctgagcccgacccctccgacgagtccttgtccgccttgcgcttcttcatctctttctccacgttgaagtcctcgtcctccgagtcgctttccgacccggccgctctctctcgtgcgtcgtcctttggtcaattaacaaattagcccaattcaaatttcgaaaacattaccttaagcttctctttgtacgggtccaactcttcgtcactgctgccagcaaatttgtccgcctctttgtacgctttctcgcccaatctctgcgcatttcgtattttcagtccctttgtctgtacgtagtcgaagagactgttatactcttccctaaaattgcattttaaaacttcccctttctttttgcgcttactttccgatgttactgaatatgatcgactgtccactcttctgcacaatttcaaagtcgaaagagcgcaaagaaacgtccgaccgcgcgaagtgaacattgtcaacttcttcaaaacgcatgtaaangcgccggtttgtgtacgtacacaaagcccttctccagcggataaagaaaacccatcgactggcgaacggcgcacgaaattggcgggagtgcccgaggcactaaaaaggcacacaattacacaaaggaatgactgaaaagccgaccccgtgaagttgccagggacgataatgcgcgaattaacaatcacacggaatattttagccattatttcaaacagataacccttcatgtgcatgtccaatttgttgttgtattgctgagcgagttgttccctggcgaaaaccattgtaaaacttacaagggaatcatccgaaatgtaagacggaaaatggtataaactttataccatttgataaagtttggtcgatttctttgtaacttttaataagcccttatcaagaaatcaaaaagttatgaggcctcaaaagtcgaaatttaggctgtgatttccttccagcaaataaatgattttttgggcctcatatttttttgatttattgctttaggggcgtaatattaaatatttaaaaagtgatagaccatgctctgccaatagtatcaaattgattcccactttaaccgacttattttcgagtggttccctagttataattataattgtgttcacaatctgtcactcactcagtgcagcctaattcgagctcaatgtagtcctcttttgagcactcgagcacaagaaaagggtatcgagtttggccctgccgtaccgctgggttcacctgaaacaaagacgaaataacgacaaacttcataaacaaatgaatatttatatcgagtctctaaacaggtattaaagtctcctaaagttcaaaccatttgtttctgcacaaggattgtgcccttatgccataaaaagggtttatttttgtggttttttcctttttttcctccatgattttgctccacttacgtgcaatacaaaatacatgtggcgtccgtctttgtgcggtagcaaaaacattcgtgttatcgttttaagcggcactttgtaatcgtaagactttccgtgaaaggataaatggttctgaaacactttgatttcgtaacgaccgcggggagtggcgagaagaatgtcagacaaagtggcaatcgcttggccggcttcgctttccacctctgcaaaacgcagcacttctttgcgaaactcctaaacgaaaaaaacaccaatcatttcaggaactcggcttgggaaaaccattcccgggagacgatgggttttggagctaaagaaaaagcccggcgcataaggtgtagcttacaagtaacagaatttttaccacataaaaagtgattttgttgagttagaaatatttagaattaagcggatttggcggcgttaagaaaattcagccaggattaggtataaaatatttgaaaaagttaaaagcttttttatccttgaatttatgcttgagtgaggggaggaattagggtatacgcatctcccgtctccgattcattcccctccgatttcctctcatctttcatagcttttttttacctcaactacatcttggtcctcattctcaggatcgtaaggaatgtgaaagcgcatttcagtcaattggacagggcattcctcgttaggatgaaattcgacgatcgcttccgattttgcggtttgacagcgcatgacatttgaaagaggaatttcaaacgccactttttcagccacattgaaaaccagattttgaccttaatcaaatgcgagtgacctttgttaagtgtttgtattaaattagcacatcaattgggaataaactgccaaatatcaccgattagataatgaaaaaaataaccttcaaattccgcgtcaccgtaattccatcctttcagagacaattcgttcttctttagagtcttttgccatttcgcattcgtaaaagcggaaaccctttcatagtcctaaattcaatgtattcaaacgcttaaaataattacaaacgttttctttgagaccgccaaaacgatggtgcacccctgaattggtcaccactttcaggccgggcttattccccagtttttgccatcccaaatggtcaatgtccgattcagtaattgtcaacactttcccagtgcctttattcttgaattgcacattctggcgtgataatttaagaaagccttcattctgagagggaaaattgaaatttattttgaagggaaaagggacttacgaatcctcccatctcttcctgaaaaatattggagaactccaaagaatcgcttcccatttaaaatccttttgactttgcttatctaaataaaaggtcgcaatttttagttatgaaaaatctcgaaatattaacataattaatgaggaaaaatgccaaaatagtgacaaaaggtccggaatggaaaataggctttataaagtctcataggagtgtaaaaattagggcggggaattatatggaaatccatattttttttcctggactgtgggggcctgaaatgcacgaaaaacatgtttttagcttggtttgaagcttctaggatggagttccatatcaatattttccatatttcgcgatttatgtccatatttgtccatattatggcatttttatccatacatattttatgtccatattttggcatttttccaaaaaacctctattagaacggcccccagtagctaaattggcctttttgagcccaaaaaccggaaaattttccaaaaaatcattttttcgccaaattttctcgggaatattgaataaatttaaattttcataaaaattaataagtttatgtcaaaaataagcaaaaaagataaaatttcacttttctggttgatttttcgctaaaaatgagtaaattttagttttatcatgtttttttcttctaaaatgatttttaataccatatttagccatttttgaagggctatattaacaaatttaaagaaattttgggaaattataccctcaatttaaaaaatttatgtccatatttttgccattttatgtccatatttcgcgatttttggtcgatattttatggccatattttgcgatttatatccatataattccccgcc

SEQ ID NO: 7903 - DNA, 2451 bp, Heterodera glycines
gctttcgtaaatcagaaccattacacaattaaaactgtacaaaaatgttaaggcaacgtcaaactcataaattcgaacaaatgcgtaaataccgataatttgtttgccgagaaaaggaaccccggcaccggcggtttgaaatgttatgacgagatcaagcaccaatcttatgactgctcctgtcacggtgataagaaatgccttgctgaagaaaaatgggctcacgacgcctttctttgtccaataataaaggtaattaattaatttattattattaattaatgccaaaagacaccgccacagacaaatttcatataatataggcaatttaatttttaagtagagtgaagcgtgaccgggacctggtaacggacaactgaataccaaggttccggttttgacatggacctggactagtcccggttttcccagccaaaaattaacggtttttcaactcgaaaaggtcccggtctggtcttacccaaattcccggttccgcttaactctattttttttttgtatcgaaaaaccggaaataataaaaaaatagggacgataaactggaataaggataaatatggcaaatgataaaaactctattttattaattaatttgaaaattcaggtcaattcaattcaaatcaaaggaagccgacaacgagtgtttactaacccaaaagattttcgatacaattggactcggattgaggttgattgttatgtgagttaggtttttctaatttcaaaaatttgtttaattgattaattttacagaaggccgatgcgggcaccgtaagcttttggggctacagtaacccggagacaaaggaaatcattcgggtggacgaagtacactgtttgacttatgaaactgctagagtgccaaaacggttcaaaagtttgcaagtcgaagaacagccgccgatgaaaaaactgagtccaagtccattcttggccaataatgcttcatcacttatccatgtgttcgtgccatttgttggccatccatgagagaagggcgaaatcagtgatcagtggatctgtctgctgagtgatggtgatcagttggccaaattccatcaataaatttttatctttttttttactttttaaaggggttcaatattttaattcctcgtatatgtatttttagcgcattatgcaccagcatgggctatattattttttgggtaaaagcacaaaaatatctctccactaaatagacataataattagcaaattttgtcaattaaaaatttaatttttgtgcctgtggtggtgtctttttgtttattttttttttgatttttccaattggaatatttgcatttgtttaataattcaccaatgtatttttattcatttaattaattattattttatttcttaataaaatccgtgtcaaagtcttttgaatacagaaaaatttaatgaagaatttaacccatgaaaaatggcgttatggaaaaattaacaaaaattgcttaaaaaaataatgtaaaatagagtataaatttgagaagtaatctaagactatttcaatataaaccctaaaacacatagaatttattttacttattagtcaaattttgcaacaagccttataaatttaaatttagtttattaacattaaaaaatgaaaacttgttcactttaaatatataaattttttagaattaatgcaaaaaatatttaacatgagatttaaagacaaaccaccccaaaaatgcaatttaaataaaacattctctaaagatataaaagtcatatgcatttataaaatatataaagcaataaaactttttttatttggcttaatttcaactattttaaagcatttaagtcatgcttattttaatttatttttataatattagagtgcctacggtatgtatgactggggcaccataatttttaattaaagtcatgtaaaattcattcacatataaaaatgtaatttaaaattataaataaattcacatattgatcagtaacaaattaatttaataaatcatacaaatatgcgtagaattatcaagacgaatacaggctaatgagattaaatgagcaaaaaaagctaaaagataaattaaattaatcttacttattttttcaaaatttatttattattcgattgtgttttcattttttattttgccatattattcgattttatgaatttattatcctatttcaaatattttattaataatttattgttttacattatataaaaaatatttttaaactatttaatatttttattttttcctcacgaataatttcccatgtcgtcgataaaaattctattaacagttaaatttaaataatttattgatgacaactaaaacaaataacttttatataaacaatattaaaaattataaatttattaataaacatgcggctattataacgaaaatattaagaatatttgtaagtttgcaaaat

SEQ ID NO: 7904 - DNA, 5086 bp, Heterodera glycines
  unsure (1)..(5086): unsure at all n locations
ttttttctttaaaaatttcaataaataatcagaattatttttttaatttaataaatttatnaattacaaataaattttttgcttttaggcattaagtgnaatgcaataataagaaaactttatttgaatatatatttgcatttaaaaatccaaagaaaaaattataaattaaataattagtagaaaattataaaatatattgagtatatttagtaatttaataattttgattcttgattattgtaaaaaataatatatattctgtatcaaaatgaaatggtgtccttataataaccaaatataaaaataaagaaatttttatttttagtgaaatatggtatttatttttgtttaaagattgcaacaagagatttactttctaaaatatatgatttttttctaaatttttttttaaatttttatgcttattttgtgcatcatcaatttaaaaattgcgattagtaattgtgcttattaattgtttcttttattttttttttaaataattgtaaattagttttaattttatattaatttaaaaattggaattttttaattgtccaatataaaaatcataaattagttctaatcaatgttcacttccccattattttttgaaatttaattaaatataaatatatttgacatttcgattaaaataatggtttcggaatgtgactttatataaaaaaagtaatggattataaagtctttttcgcatgaaaacaaaggttttttctctcataataggcttttgaatgtctatttttatagatttactaactttatgataataaattcatcggaattgaatgtattacgatttaataatatattgtataccaaaaatttaatgcaattccgtttgtttatataatgaattaatattttttacttattgtaacaattaaatttgttttaattgaaataaatatttattaataagttttctgtgtttattttatgctaatcagtctatcattttattatatatttctaatctcttttcatgtcatattctctgtgaattacggctgattctggctgttgtttctatattataatgcattttttatctctctaatgataataaatattaacgaataaatctcacaataaaacgattactgttttttgttttttattaatttaaaagtttgtatcttacaaaattatctttttatgtttgtttttttgaaattaaaaatgttttactattgtataaatatctttataaattttttagaattaatttaaatatattttaattttccatttattaggtatttaattatttatttcattatttctttgaatttattttcttttaattttaataaaagcaaaatttaataataaaatattattcagaccattattatttaaaattttttaaatttaaatctcttgtttcgttatctaccatgatctcctatttgacgaacgactatctatatttgcattatttgtatttgtaagaattttttatgaatttatttttccctcttacaaattaattttcttttttttcaattctgtttctttaagttttgatttgactattaattttttaaacatgctggttctcattttacattttaatcagtttggatggcttaaaaattaaatttattagctaaaaaatgatcaaataaaaccccaagggaagtaagttttatattattttcaccttttaaaagaaacaatgtaatcaaatttatatgaaaagaaaagaatatttttaatttataaaaacaaaaataatatatgtatgtaaaaattattgcatatcaaactctagggtgggggacatttagtctggccggtatagtctgagccaagtttaaagcatcataaccttttctcagctggccaaattttataaattgagcatatttcgagagctctatgctaaattctgacgaataatcatttgttgtaattaatatttattaaaaattgcttgggaaatgatagaaatatgacttgcattcaattttattttagaaaaatatgttaatttaattattatttatttgattcaaataaaaatgaataaattttaattaaatttttgtcttcgtttatatgcaaagtagaaatgaataaatattgtatatttggtaaatgttgtaataaaaatagtataatgtcaaaagaaggcagactaatggattttttctaacttataaaagtataatatttaaaaaaaatggattttgttaaaattttaaaaaatattaaaattaaagaaaaataagtgttgatttaacatttaacaattaatattaatttatataaataaaaaatggagacaaaatggaatggaaatgaataaaaaaataataattttaggaattttattaccaatggggtcgtaaaatattgtgctatttaaaacatgaaaataataaaaattataacaattttattgaatgatataccataaaatcctgctgggccgtttcgtaaaactgccaagcttacagatttttcgagaaaaatcgtcataacttttcttaaccttacaaaataagtttttctcttaaaatctgtaaatttggcagtttttatgaaacgatctagcaacccataaatattaatttggttgaaaatgagccaatatacgaagccaatgtgatcataatatattcataatttagcttctaatttttttttgtttaaataatttttaatgaatactttttttttaaaattatattattcaatacaaaatttttctcaataggtatcaaaatttgagcaatattctatagagcgaagcgaatttagtttgtgcatttttctatcggcttctccatttattcatctatttcttttttaattttaattaaaatacaaaataatactaaagaatgcaaaaagaattatattaaaacaaatattaataaaggattaaaaatattcgaatggcaaaactcattagaaataaaatataaatcaatgatgacaactggtgaaaagagaagacaaatatttgtcatatctttaaaaatgttgaataaaactaatttatatttaaatatattttcaaagttaattttttttttgaaattctttatagcttcttacaaataatcaaattatatattttcaaataatatatagacttattactttataagtttccaaaatgttatacaaataatatttagcaaagttttttaattaaattcacttgcaaattaaacaagaagagaatttaattttcgatttttggaactattttttataaaaaaatcagctgccataatttgtatttaatctggattcgaaattaactgaggatattcaaagacaaaaaaaaattaaaagaaacaaaaataagatgcatttgtaaacccattccatcatacctatttaataaattttttaataaaataaaaacttattatttttagtttttatgaaaaaaatatacttatatgcaaatttgacgaaaagtagccaaaatattagagatcggtattttgaaaaaagcctggacctggacctggattccatgttggacctggatttcctggacaaaaatccaggaaaatccaggtctaggaaaaatccaggctcctcgagacctggatccaggcctggacctggattttttgaaatttttttaaaaagcaaacaaatgcctgaaaaaatcaattatttgctagaagcatctaaaaatatctaaataataataataatgtgtttttaaatttatttaatctgtttttgaaaacttgaaaaaacatcggtcacttgaaaaaataaattctaaaatttcgtccaggaaaatccaggtttttcctgttttgcctggagttttattccgtattattcatcggttgggtcccctttttggaagaaaaattctttttatatttatgcttgtttagtatgatagttaattttttatcttaaaaattttctttgcaaaaaatgaagggttttttctaaatataattatgtgatagtacaaattttaattattataataaatctatacattgaacttatttattttttaatttacattttttttatatttatagaaatgattattttttcaatgtttttgaaaaataaattatgccaaattttaattggtaaaatatacaaatccatgtgtttggcattagttttgtaattttgttaagaaataaatttattcttttttttctattcatttgaagtttcatgttccgtgggttgaatgattttatttggttgataagctgttttttaacaacttactatattttataattaaagttattaaatgattggacacattaacaaataattattttgaaatgatttcttaattaattatataatttgaaataaactgtcacctgaaaagcttttttactcattttaattttaaaaatttgcttattttccatattttgtagataatacattcctgaaatcaaaaaaacttcaagtttcggaatttataaatacaaaaaaaaagaaatatttaataaacttttcctggaagctgaaattttctagaaaaaattttaacaatattttttggttttttatttagtaatatatttttccagatttaaaattaattatttttatggcataattcttgcgaatttgacccatctacgatctgaattgttggcaatggatttgtacaatatcaataaatattagatattcaaatgtatttatttaaaatttttattcaatattttaattgtagacttattatttttctgatttacaagttcaattattcttttgataaaatttttttagaaaattaattgatttgttattccttaaaataattaattaaaataaaaattaaaaagcaaagcacatgattgatatttattaaaataaacgacatattcggacattaattttatatatttttttaataattatgacaattgctcaaaagagaattactcaattaatatgttttcaataagcaaaaatagaaagagataattaaatgaaaataataccaaaagaaaaaattaaaattaaattaatttttaatttttataaaaaataagtataagttaaaaatataatttttattattagcaaatct

SEQ ID NO: 7905 - DNA, 1933 bp, Heterodera glycines
cgtaaaagggggcggggaattgcggggggggggggcgtgagagagggagaagggcaggcaaaacagaaagtggagggaaacggacgggcaaatgagaaaaatagttagctggagagagaaacgagggggtggaaaagagtgtgtgctgttttgaggggaaaagaaaaaaaagagtactttaagctgcagcactttttccttcgccaccaaatttatccgccgatgctgtgtgccacacaacaaaaacagtaaacaaacacaatttagccatcaaagtacgggcaaacagcagcacagcaccaatagatttatatagggttcctccccgagtctcggggagcaaaatgtcggggaacggggaggaaattccccgaaagaatttgtcggggatggctggagaaatttaaaaaatgtcggggagcaacaccttcgtcggggagaaaattttcataaaaagtctaaaaaaacacaaaaagaaaaagtccagaacaaaaaagtcttaaaaactcatttaaagattcttccatcttatttcaagtgcaatttacgactttcgtaattccccgaaacatgtcggggaggaaccctagatttatacatagattgtgatggacacattattgaaatgaattcaaataaaaacggcaaaacatttccggggtagaaaattacaattgggtcggcacttccgtgttttgttactccccccccctcgaaaaattttaaaaattcatattttggggttttcaaagtagctgatcatgaagtgtcttaaaacttttcgggggggggggggatggtagcaaaacacggaagtacataccattgagttttgagtaaactcaacctccaaataaatagagaatgcagagaaaaacacatatctttttttctctaatttttctctccttttggcgtacaatctattttcattattgggaaaaacaacattcacttctctctaagaagcttttcttttttctagctcatcaaattgtttagcatttgctaagtaaaagcttttcctcatcaggagctttcaaatgatatcaagattgtccaatttggttggcaaaacccttcaaaaataatttctgaaaattttaaattttttgtacaaaaataaaaatacgtattcttgttgcacaacggactcgaacctccgtcccttgtccctttactatcttacaaaaaccacttcgccacacatttaaatcttttttggtacaggagctcattttccggacgctgtgtaaaatagcggaggtccaagtccgttcaacaacattaatatttttattcattttatgtccaaaaaataataaaaaatggctatcattaaaagatatttaattattttttgggccaaaaatgcacacctatacctaattctaaaacttataaatagaatccgataaaggtgcccaaaatatggatcatggcaaaattttaagaaaattggccaatacgaaaaaaaatttttcaagggcaaaaaattttttgtgtttgtatttgttcttttggctttctgtttttatttttatttagttacgaggacttgaacacgggaccctctttttgttgaccacaccgatgaaaaatccacttatttacactgggagcccaaaattgattgtatgtgggcccccgaaaatgggtggtccataaaatatgcaatggaaacgaatatttcagaaattctgcgcgtcctatgttgttgtttttaaaattcaaatctaggccccaaaataaaagtacaaaaagcagtcttttggccagaaagtgtcaaagaccaattggggagaaaccaaacacaaattttacattcacaaattcaaatattgggcgctacttgcaaagagcactatttttgaaaattttttcaactttttttttggtcaaaaattttttttttgtttaaaaaagtccctga

SEQ ID NO: 7906 - DNA, 2344 bp, Heterodera glycines
taacattctttttttcattaaaacaaattaaatttacttttttgtgctttgtttgtttccgccccaattttgtatcctttttattatttctctaaattggactaactttggaatttgtgaggaatttcgatggcatttttttgcctcaataatattaaattaatgcaaaacccagccacaaattttgaaaatttttcgaatttgaaaaattaacaattctcctcaaactttcgaaatttattcaaactattttttaatacgaaaataatttaatcatttttccaataataaaatcattttgcccttcttttcctcatttcaaattcaaatgccttcgttttgccgccttcttgcttcaataataaatgttgcaaagaatgtcatccatttatttatttattgttttttccttttgtcgagaatgcttttcatatttttatgattaaacctttcattttaaaaaatttaaattgcaaagttttgcaccagagaaatagaacttgttggactagaatgtatgaattttaaataagaaataattaattggtaattttaattacttaaataataaattggtttgacatttttgatttgataaattttttggcgctacttgcaaagagccctcttttgaaaattttttcaacttttttttggtcaaaatttttttttgtttaaaaagtcctgaaaccaaatacccgggggttttaaaggtcgctgattacgaatatgacaattatttgggcctattaagcaaatttggcgctagttataaagtgatagattttgtattttatcaaaaaccataggggggacccttttgttttgtaaattttttttttggataaaaatcgtgaatatacattttattcaccataattgtgctgttaatacttaatatccatcattatgtgtaaaaaaacaaaaaaaaattttgaccaaaaaaaaggtgaaaaaattttcaaaatagtgctctttgcaagtagcgccatattgcatacataaattcaattagaatatggaataaaaatttatgtcattaaaatacaaaaaaacgcattagtcaaattcaataaaggttgagtcattgtggccctaaaaaggacaccgtttgggatggtttttctttcgtctattgtccctcgtccatctccgctcattcactgacttcgctgtgctgcgactttttgggcagaagaaccgggttgatgttcggcaacacaccgccctccgagatggtgacgcccgagagaagctgaaaaatcacagatttcaaaaatagtgaaccgcccaaggcttctattacacagtttatgtgtccaatggcttttttttagaaatcaatcaattaaattaataatcattttttttgtaccaaatcctatatttttgtggtaaatatcggtttaaagtcacaagagcaattttgattttgggacctcaaaccataaggcccaaaaaaacaggatcgataattgtattgaattcataaaatggcattggactcgtaaagtgtgcaatagaaccagcgcccaattcgtcttggccatctcaacgcgggccaactcgcaaggtgcggcggactaattgaggtgtgaaacatgcgtcgagattagggatggaatcggaatttcgaggcccagaaatgtcggaatccttgccatccctggtcgagatggacatgttcaattaatcacaacgaaacaagcccgatccaaaaaacaaaaatcggctgctgtccgaccttgttcaactcctcgtcgttgcgcacagccaactgcaaatggcgtgggttgatccgcgtctttctgttgtcccgcgatgcgttgccggccaactcgagcacttccgccgtcagatactccaacaccgctgccagatagacaggcgcgccgacacccacgcgctccgcgtagtgacctgtgattttgaaaaatgcaaattcgaacccaattaaaaactgatcacgaatcagggcatccatttcgataaattccgaagcccggacccgatttcgaacaaatagtcgaaaattcaaatatccaaaaaatgcacctttgcgcagcaaccggtggagacgtccgacggggaattgaagtccagcccgggatgagcgcgatttgttctttccgtcctccgtcttcgcttttccgccctttcctcgtccggacatttttgttggttggagagcaaaaagcgaaacagcaaagaactttgagaatggagaaagtaagggaatgggtaaatcggagtgattaaaaggattttttctttctttttttgtatgggcgtggcttcccaacgcgccaaatgccaatttgaataaacacattcggttttggca

SEQ ID NO: 7907 - DNA, 1164 bp, Heterodera glycines
atgtgccttgtcgattggaaatgtattaatctgtgactgagccttttatgagctgtgttaactttctataaattagggtcatttacgtatttaattttttgcgatcttttggtgattttctatgagttttttagtcgattttttggagttttgctgtgggcatatcaaatcaaatcggagtttgaaattgtaatttctttaaaattttttgacgaatattaatgtttaaattaataaaattaaatgcttcagaattgatcaatgatcatttctgcatgttgatcaaatgatcagtctttttgaagtttttttttgaatgctcattttcaagattctgaaaaaagcaaattttcaaattttttcacatgagagccaattttcaagtatgtacgtacttgccattcaagtacaaattccatcactgaattataggccaaatatcagtttgaaatcgaatttattaatgaaagaatgtgtatatatgtacataaatttatctatttataatccaatgtttctcaattagtgaaaaacgcagaatttccggtgcggaaaaaccatttcattttttctataaaaggcgctgaatgacgccgaaatgtccattctcccagcagcagtattcttattttccaagcaccaccatcacatcacacacagccgcagcatcgttctgcttcatcattcattcattcatcggttatcgtccgtcacgcgacgcatcatgaggaagttcgcctacttcaaactgtgccaggccgtgctcacttccgtttttctgtggcaaattctctcaacccaccaattctgtggcgaatttgacgagcctacggtgtgctttttcggcattttttgatttctcaacccatctaattaaaatttcccatttttcccaggccttcttcaattccgctgtctcctcctcctctgctggcggccattgcgaccatcagttcacgctcatcggaatggactccaccactggcgaatacggtgccgtgccggacaagcagaagtggcacatgcaactgatggcgagcagcggcggcggacaaggccaaccaattgatgaacaacaacagcaacagaagaatcagatggaggaattttcgtcaaaattgccgactgttggacgtcactgcattccgattgcggtcaatgatc

SEQ ID NO: 7908 - DNA, 765 bp, Heterodera glycines
  unsure (1)..(765): unsure at all n locations
cttttagaacgaggaagtacaaaatgaacgttatgttctcacagggcccctcagaannanaggnaatggaangaacttaaaaattaatgatttttgangtaaagaanggangaaaggaaatggaggggaagtgaanngttgtgagttatgttaataatagagatgagtggatttttaagaaattaaatanttaatagaaagaatagttgatggatgggttaataaaaggaaaataatgagaaaattgaaaaaataaaacaaagaagcaaggatttaaagtagaaaacagctattaaatgtgggattgattatgcccatgaaaaaaatactgtattactgatttctattggagagagtacggtaattaattatagaatcttaccgaaaaaccgaaattttaatttaatttcttacataaatttttcgcttctttttttctttttgtgtttaatgaaaatatttaggcataaagcttgaactgcgagagggaaatgtaaacagaaaatagcgacgggaaaagagaaagagagagaattacagcaaatattattggggtggtggttggatagtgaggcaaaaatttacaaagtatttgatggaggaggganaaattgtttttntaaagatgaaaaagaatngataaatgaaagagtaagtatttggtaaataaaataattaatgntatttaaaaattgattgattaattaatttaagtagaataaaaannaaatttgttggagtttggttttttnattgagattattt

SEQ ID NO: 7909 - DNA, 6350 bp, Heterodera glycines
atacagtaatcctttgaaaatcccaaattcttacaattatacaaacatttaaactcttaccgtaatccattaaaaacatttaaaaaaatctggataaactatgccagcaaagtcagcccttgccaaaagccattaaatacgtaaaattaccgtaatccccgtaatcctaatcgaataccaatatgattaaatgaatcaattaaaacctaccgtaatggctaaaaaacataaaaattcaaaaattcccccttctccttgtagaaattccgcccatggtcaaccaggccaagcaggtggcgatgagcccgcgtgaccagggcaacagcgtgcgctggcgcgacgccaacgaccgcctgctggactcggtgcgctcggtgggcgacgcgatcaccggcatgccgtccgcgcgcggcacacctcagccgccgccggcgcagacgcgttaccaaccaactgtaacgcccgtgccggtggagcagtacaaccacgcggcgtccgcgtatcggccgccaccgtcgcaacaggcggcgtcgccgttcgactccagctacaatgtgcaacagcagcgccaacggtcgccccagttgccgcccagcacccactcggcgagtttctcatcccatggagaggggatcgattagaatacaatcgctagcattgggttacggtagtaatatagtgtagcattagagagttcgactttctggacggtagtgatgctcgtggacacctatatgcactcggtatcgggtagataaatttgtgttcttcgactctcatcagtggattaattctctaatgagagtgctacagtaacgaggagttgtggaatacggtagtaccgtagcataacgaaatggttacggtaccgaccccctttttttgtccgcgggtggtaatcaacaatttgttgatcaacctcatttttttgattaatttgtgatctcgactctcatcattggattaattctctgatgagagtgctacagtaacgaggggttatggattacggtattacgtagcataaagaaatagttacggtagcgacccccttttttgcaccactaattttggatcattaattatcaaaaattcaggtaatggagcagccgatgcgcgccccgggcgagccgctggtgcacaatcggctgattgtgcgcgaggaaatgccggccccgcgccgtccgacgccgcccgtcgaaatttcgcccgccccgcgaccgccgccgccgcccgagctggacgaggaggaggagacgcgcgccttctgggagcgctaccagttgcccaacgcccaataccagcccatcctgagcgcggcacacaacctccaccaggtgggcgggcggggcactaattgtgagacgcgcgggatggggcggaattcggcactcgagcatagtgccactggatgtcgatcggatggcatcccataattgccatgtgccacccatcccatgtcgggaatggtcgcattcgagaatagccatgtgccactcccaatgtttggaaatgcgacactcgagaattgccacataatctctgggatggcatattgtcactcgaggattgccaaaccattttgaccgggtgcttgatctcattcgaaagtcttgtttggtgcctgttagggtggggccgccgtcattcgagagttcggcactctataaaagccatctgccgcccggtctcgagaatggcactcgataattgtcatataatctgggaatgacacaaaattgtcattcaagaatttccaaataatttttttggctaaagtagctataccaatcgattcgtctcgagaagataagcacgaaaaaataggtctcacgcggaaataggtttaactcgatttttgaaccggtttaaaacccgaaaattgagaaaattaatgccatcattggccacaggaattgcgccagtggagctccaacgagaatgacattgtggcagctgccaaacgcatggccattctgatggcacgactgtcccagctggtccggggcgagggcggcaacaaaaaggatctgatcgactgtgccaaggtgggatcagacaagtggacaaaaacttttaaatttggaggacaaatggtcgacaaaaatgccgcgacaaatggacaaaataaatataaaactgtccttttttgtaggggtgggggggggggtgggggaatttcgtaattttttaagggttcgggttttaggactctgatttctgaaaaaaggactcggattttcaatttcagatttagaaaattttgatcgaaattggcaaaaaattgcctattttggacaaaggactaatctttttatggacaaatggtcgacaaatatgtataaatgtgcgacttttcacaggcaattgccgactccagtgaggaggtgacccggttggcggtccaattggcgcgcctgtgcacggacatcaaaatgaggatggtcagcgaattaataaatataaattattagggcttccttttttaggcaaatgcctaaaatttttgtgcacttaatacgcacagataagcacgaaaaacgcgttttccgcttggtttggggtgtctacgatgacttttataatgcatatttttgcctatttaggcgtttttgaagtgcctaattttaggattttcgaaaaaatccttaacaaaaatgcaataaaaacgaaaaacacacccctaagaattgaaaagttaaaaaaaaattaatccaaaaatttaatatatattttttcttaataaatatttttgatttaaatagttctttatttggaaaaaactttaaactatttaacaatttcatttacaactatttcgcaattttttgtccctaaaaaaggaagccctattaatcacgaatatgacacgtcattgatatctacggcttatttttactttaatttatgcgattcaaaaaaatacatttgtacgtgtcatttttaaacatgagttaaagaacaagtcggcagaataaacaatacaacgaccactaataaaattatcgtttatagcccaatttcttctttagaaattttcctcgggttttggggaagaagtgcgcggttccatcttaataataaaagaatattacatgaaagatgtgactgtaaactagcaaaagcgaactgaccatctgtgcaagagggtaaatggcggacaattgactgcacgaaaaggatcgtttacgagtggcgcgcttcatttcgccatctttgcgggaaggcgtcggctgctttcctccgattggattcagtgcgcgaggagcagtacgaccacacgaatttgtggttacgaatacattgcgtcgagaagcggacgaagtcgcgggacgattcggcgttgacggtttcaaaggagtcgaaaactgctgtaattagaggttcaaaaacaatcaatggatgtatggtaacgaagaaccttctgagccttttgcacttctcggtcttggtgataactttgcatcacagattcggcgtatttgtcagctcgcaatccctcgacaataatgtcgtttaattggaaatttttgacgtagtcgttgcataactcacaaagctcgttcagcaatttcgggactttttgttccacgatttttctttgctaaaagtttcatttgctcaaaattatgaatccgattaacaaaagggacatactctcccattagcagaggaaaaacaatttttggttgttttcaaaccgccgaactccatctccgtttcttttatccctatttccccattctacacaaaaaggaccttcagttttgtgttcagactcccagccctgttcttgtagaaagacgcacgacacacacgccgttcggtgtccaatttctgcttccaactggccatccattcgttcagtttgtcaaatacgggcttcgctcgctcgtacatttgctgacggattcgaacttcctcctccaaatttagcagttccttctcgctcagattttctgaaagattacatataagattaatcacgcaaataagcgttttgaaatttacaaggatttcaatgacttttactttgacaattgtcacttactcaaatttggctttgctggaaactccgtagaaggttggaaacattttgcggataactcgtctaatttaacgagcagctcgtcatagcggaagacgacctgttcagcccacaagtcgtgatggtctttcagctaaatttgtaggggcataagcaaacagagatcgttaagcccttcgttcgatcgcccttctttgaactcactctttcattgaatttttccatcttcttcagaaagtcagacgataacacggtggattggttgtacaagtcaacacgcaaaaaatggaggtcgtcttcattgaaactattgatggacgggcgaatggtctcaaagattctgaaacgaaatttgaaattaataaaatatgccaagcaccgtttgctctccgcttggagctgaagtgccttctcgagccgtttgtttacaaaagtctgcagcgcgtccacctcgcctttgagtttgtccaactcatcttcggacataatctgtaacaaatcattttagtgttgtctccccaatcgctctctcactctgtcgtgcactccttcgatttgtcgcgccgttgttcccaccctatcgcacaatgctttgtattttcccgtcagcctcgcttggctccccacaatttcctcccttttcgcttccaatcggtttttttccgaatcaaggactttcagcttaaaaaaatcagtgaaaatgttagaaaaaatttgaggtaccaatgcgatcgatttgggcgggagaagcgactcgtcgaaggaaggcaaccccaaaaaatccctcagaatggtcactgcttttcggcggatttccaagtcagaaacaatatcacggaccatctaaaattgcgaatataggtaggtaaacaaggtcaatgaagctaaaataaatattttaatagctccatatagtcgttaaaatagggagtgggaaaaccagactgaaacaacagttatggatttgggatttaatgtcttgaaaccaagtgtggaatggatttgggtttgacctagaaaagatcttaattatatttacttactttctcttctgattttctgatgtcctgtaggagattggtcataaattcgcaggcttgttccacgcggcattcccgggttggcaagtccatgtgaacagtgtcccagagttggttcagatacccaaactcatccctaacactgatgattacattctcaatggatttgtcaagactgcttttgaaatgtgggaaaagctattataaagatgtaatttttagaatagcaaactttttttgcgtgttggaagaatttgattcgcttggactaagaaatatcgttgactgcgaattaatacttttgttttttgtaggtgacatatgagatggatttatttaatattttgacaatgcttaaattagaattaattacaaaataataaaaaatgaatgagagcaaaatgtggtcgaacatcagaatctgcattgaattaaagccggatggatttttcaaaatttaaaatagtgctagttaaaaattttaaattgttgaatctgtggcgttacttttgtttgagttaaacattcattttttgttttaagaaaagttataaaatatatggacaccgaacacgcagaagttgattttgaagatgaaggcgattacgagcaattaaatgccaatcagaatagaaaacagaaaaaggccggaggatggcaatctatgggtaaaatttcacttttgcctattttggcattggccaatgaccccgcaaattttaaggtctcgaccattccgtcttcaagggcatccttcgcaagggttatcgacagccaacgcccattcagcgcaaagccatccctttgatgtgcgacgggcgtgacctcgtggcgatgtcgcgcaccggctcaggcaaaacggctgcgtttgttgtgccattgctgcaacgactgaaacaacgcgatgcacgcggcattcgtgcgcttctcttttcgcccacgcgcgaattggctctgcaaacattcaaaattgtcaaggaggtgaaaattcaatttaaaagggatctcgcttttctttgtttagccctctattatcgctaattaaccatatgtgattttatattgcagctcggccgtttcactggtctttactgtgcctgtcttatcggtggcgacagtatggacgaacagttcaatgcccttcaccaacacccggacatgtgagcaccacaattaattaaattacatacaaaatttagaaataacataattttaaacttttgttagtctcatcgccacgcccggccgtctgctccatttgg

SEQ ID NO: 7910 - DNA, 1122 bp, Heterodera glycines
  unsure (1)..(1122): unsure at all n locations
ccaattcattatcatataatatataaagccaaggagcatttcatatttttgttttgaatactcactgatttgcatttgctgaccatttctcataaatgcaattagcattttatcgtctccctaattaaaatgattagacaaaattaattaccctgattgattatctaaccgatggatttgcagcagggatgggccaaattgaaaaataaaaagcgaaatgcgaaaagcgaaatttgcgaaactgaaaaatgcgaaatgaaaaaaaagcgaaatgcgaaaagccaaaatatgcgaaaatgcgaaaagcgaaatgcgaaaagcgaaattttttctacaaatttttaatagttaaaatcataaagcaaaaatcattttttaaaattttattccaaatttaaaaatcaataaaacgctttattgaggcgcgctttttccaaaaaaactttttgggaagagggggcaggcggcgccgggaaaatttttgaaaatttgattaaaatttgttgacagattttcaccaaaaaatcatcaaattttgtgatttttgtatcatttttctaatgagaaataagagttttggcgcgccgctgagaacagtttttcagcaaattaccaaaattttgatcatttataaacagtttttcactgaaaattagccaatttataggtaaaattttgaaaaattttatgggaatttaatccaattcttaggggtgtaaaagtcgcatttcgcgccaaaaagcgaaatgcgaaaagcgaaatgcgaaacgccaaaaaatgcgaataatgcgaaaggcgaaatgcgaaaagcgaaacctcggcccatccctgatttgcagttgtaatgtgaattaaaaaatgattcataataataataaaagaaattatggaaaaagaataaaacattatttttcttaaataaaattaaagcccattaattattttttcaatttatttacgtagaagtgaatttaaaaatgtttttaataaatatgaacaacggagatggaaatcatacagccttatnaacgtagcaaaatttgtttgcttaatataaattatatatntttanaaattggaaatgatcatcagtaggattacccaatctatntttactttata

SEQ ID NO: 7911 - DNA, 3996 bp, Heterodera glycines
gcaaaatttagtttagcttaatataatttatatatttttaaaatccggaattgaatcatcagtaggattacccaaatctattttttactttataaattttcttcatataatttagtatatattattattattaaattatgatgcaattatttaaatcgacgatcgatcatcagtagaattatccaagtcaattttttactttataaattttcttcatataatttgtatatattattattattaaattatgatgcaattatttaaattgatgattgatcatcagtggaattatcccaatctattttttacttaaataatttattattatttaattaaaaaatgatgcaattatttaaaatgattaatgctcaccggaagagttttcccaatctattttacttaaataaatataccaaacgaaattgaaagtcttcgggaagaatttgagcaaaaatggaaaaaatgtgtgaaaatatgaaagaaaatgtaacggaaaaatgccaaatttggcactttcttttcgtcaccaatttcataaaaattctctttctaattgatttgcttttcatttcataactttgattttaaatgccgcttaaaaaatgtcagacacagtgtgacaaaacttgaatttactttttttttccaatcgaagcctattgaattgaataatgagctagttaatacaccgtctgaatgggaaccggccactttggcgcaggccattttggcgcaagactctatatcattttgatttcacagcaaaattaaataatcttggtatgattttaagtcgcttgatagtgcctattaacctgcaaagtttcaaaaaatttagctgagacacaaaaaagttatggccaaaaaacctcaaaaaattgcattttcctggccattttggcgcagcgcgccatatcttttttaaaacctaatataattttttgaaattttgcaggctaataaagaacatttagacctattgattaatatcaacattattttatttggtcgaattaaaaaaaagttatgaatctttaaacttgtctgcgccaaaatgaccccgacccatctgaattctctaccttctaaggagaaatgcacaaaaaattgattgcgcgggttttttttgtatcttcttacttatacgggggatttttacgggacaaatttggtatcattcggaagctcttcgtgagctatgtctaaaaaacagaggatgaaattaatctgacgtcaataaaccggtttttaaaccgattaaaacctatgaaaaaaccagcgcatactcgactacggcagccagtagttgaggcgagactacgggctccggaagaagtccgcgcgtgattgttgaatttgttttgtatttaattatcccgtactgcagcgtcttttttcagttgtctattgtcaaaatgacacctgatcaacttttaatatagctagatcgatttgtctcgtcgagagctgtcgaatgatacgaattttgttcaaaaaattttattttcacttgttttcgtttaatttagggtcagttttcgtgggtttaatcggtttaaaccaggtttgttgacgtcggatcgacttcatcctctgatttttagacttagctcatcgaatgataccaaatttgtcaggtttcgatcgttttgaaatcccccggataagtcaggagtgccgttttttattgaaaattggaaaattcaacgatgaatggaactcttgggagtgagagctcaaccactaggccaccaaacagtttggaggtagggagggaattatggaaacatttatttgattagaatgcatatggaatttccagatttgttctgtccctggagaaaattttatgccaaaaactcaaaatttttacgattttaaattgcatttcgtaaaattttttacgaaattcaatttcgttttcctattttcctttaataaaatggaaaacaaaaaaacattttaatttttatatgttttcgtttcaacaataataattttttatttatttttatattttttgatccccaccgccggtttctcccggtccggcttctcaggtaccccaaagtcgtggtcccggttttggcaaaaactctcggtcccgtgcaactctcgtttaaatgacccgcctactttaattgcaaactaaaaatggaaaccgggttttcttcccatttgaataaagaaataaatgaaagtgaaaataaggaccgaaaatttatatacaaaaaaacgaaataaaaagataggaaatgaaaaacgaaggactcgaacattgaggaaaatgaaaaaatttatgaaaatggcgccgaattaaaagtgacaaatttgtggaaatattcatctctcagatcgtcttttgcttcttcattttttgcgttttcaattgctttttccaattttgccctttctttcttggcattttcttttgcattttcgtgcatttttcatttcttcgtcaaaatgttttcggagtttgttgacatattctgttgatcgagaaacattttttgaaattgttttttaatataatacaaatccgtctcatttttcacctcaattttgcaagaattaattttcttaaattcaccacctcttttccaaaaacttttcgaaaaattattcagctttctgatgaaaccaattaaatttaaaaaatgttgtatgcttttaaagattggcttcagcactgcaattattccgaaacatccgaactttttggttaataaaaattaaaatattattaaattacacaccttgaacatcaagacggaataaatattcatataaatgtccaaatttttgtgattttttggcattctttccttacttcttaaaatctctccacaatttgatcacattgccaattatccctcataaactaatcaatgccaaggtgtgcctcgaattttcgcgctgaatattctgtaatttgaacttgctgattgcttttcgaaatgcaattggcaattatccttcccctaattaaaatagattagacaaattgattaccgtgattaaattgactcaccaatggaattccatttgatcaaatataatgaataataataataaatggaattatagaaaaggaataaaagattatgcttttcttagataatgttaaatgagcaaatgaaattaagcgcaataattatcgtttcaattttatttaaacaaaagtaaataaaaaatctttttttataagaaattaactaaatacaccccttaatatttggaaaatttaaaatattttttttcttgataaaggctatgatatgattgggtagttttttgtttgaccgtgcagaaatttgtttttgtttttttttgattaaaatccaatcaaatataatttctatgaggtaaatatccgaaaagtcaatgaatttcgtggagacgaaggaattttcatgaaaatggcgatgaaatgaaagtgccaaatttgtcatcatattctttttctagaatttttttttcttcattattttccgaatttccaattgctttttccaattttgccttttcgtccttggaatttcgtttcgtattttcatacattttgttcattttttgctcaaattcttgccgaatgttttcttcaaattcgtttgatggcacattttttggtccgttttttgtgccgttaattttttccataaaattttgtttaaatttgctaaaccaattttcctcctctttaatttcataattaaaatcaacctcatttaccaaaaccaatttattgcaaatgatattgctctgccaaaaacatttcgaaatatcattcagtgttttgacgacggaaattaacttcatatgatcattgaagtgataatgcaaaaatattgggttaatcgctggaaatttattggccaattcagtgcttttacctaaaatgaacattatatatagttaagaatagagtagagcgggaccgggaattttgggctaaagcgggaccgggaccttttcgggctgaaaacccgggaa

SEQ ID NO: 7912 - DNA, 4640 bp, Heterodera glycines
cacaatgatgcccaaagtgccctccgagccgagcaccatttggttgaggtcggggccggccgacagacggggaacctttaggaaaacccaactactatttagtagttaattagcgaaaatggattttgattaatcaatgaaaaggaatttatcaaagtagaacaattgaaaaactgatcaatgaatgaaaaaggattggattcatggtcagcttatctattattgaccaattaataaagggggataaaatttttgcggagataacataaaaattgacaggtaaattttgtggatctttagtttgaatttttaaatctgagggcttgcgctctccgccagggaaaatgttggcattttaatgagtggcaaaaaggattagacaaaattgcataaaatttactcctccttctctcccgctcgaatgtccttccttacctggcccattctctgaaaggtgcccttcggtgtgcacagcgtcacttggagaagaagatccttacaaaccggggaaaaattaatgagaggggaggggcggctcaagagtcttgaatttagccaagaaagggaagaagatcgccttgtggcttttcatcaattacagactttaaacaaagaaattgagtgatcaaatttgagatcggtaaaaaataagagaaacaaaacaatgcgccaaagtgttgctcacctcaatgttcccgtatttgttctttttcatgccagaagcacgtgtctgcaaagcaaatccattgttttgacccaacatttatccctccccggcccaccgatatccatccgcccaatgtgctgaactccatcgagtctggctcatgtccgcaggtgaagccactctcatttagctaaaattgagaaataaaatccctaaatttcttcgagactctctgtgttgcaaagccgagaaaggatttattggagtcgcaaattctcttcggaagtttcaatcaaaaaatgctctcttaccttcttctcaagcgtttgtcccaaaattcccttcaaaatattgcaattttaaaattatatttgtttattttttaattattgttaattaccgcttcggaagtgcacgtgttattgtccgtatcgattgaaatgattcgatctgtggtggagaaaataacagcttgtaaatttctaacagaaaactgtgaagcgtacttgaagaaaaaggacaaatcaaactttccttttttcgaaggaccttttcctcaaattgtttccgactgtaaagcattattccaaggatattctgggattttttaaatcccttcatacaacagtcgaaacaataatccttcaagggtttccagacagaagcagtaaatagtagtgccgttgacaatttaataaacaaaaaataataataaactgacccatcagtgccatgtcaacggagcagaaacatcttgcgccattttggggacaattgagggcattggacacggaagtgccaccaccgattggaatcaatgccacattgtgcgagtcggcagcacggacaatctgatgagggaggggcgggggattcaactttcaaatggacggaagcgagtgactttatcgggattaaaccaaacatgatggccaatccgctttttttccagaattacattatatattttgcaacatgatcgagattggcaatggttcaaaactctgattattattttcgaaactgatggtttaactaatccggaccaaactattgatgtcttttggcgatcaggttgccagataatgccggggagggaataattggaggaattgttctgggtaaattccaaatcaacacaatggcagtccaataggcagtcttaatgctttcctaatactctctcaccagctcaacgtccgcttcgctccttggccacaccaccaggtccacaattcgtccgacgttgcccatccgcaatgcctgcacttcggccagcgtttggccgtgcgagcggaccaagcggcgcatgccaacgctggagaaagggatgtgacgggagcgaagcgcctgcagaaacgatgacgggcacggcacaacgggcggtgggatgcgcaacgattgggatggcacggagagagtacggtgggccatgtcgatgccgaggttctgctcaatccaaggccggagcgagggcaggcatttcccgtccagatcagcatatctgtgtaacccaaagggggggggggctgtgaccaaaattagagcaaagtgtgggaccgttgaagactatgacaaattttgcaaaacaaaatcatcagtcccacatttttttgaaatttcgggattttgaaggataaatgtgacgagatccaatcccgtgaaaattgaattctaatttcctcatccatgaaaaactatacatatgtttaaattgggcatcattaaaacccacgctcactcgtcactatgcatcataatttggccgctggcagacagcgcaaagaatgaatggttgtagccccatccgttccatttcaactgggaatccctgaaaaaagttaaaattcagaaatgaggtccttgacttcaaggacgcccttaaacacaccgagtcaatttttggcactcagttcaaaattgcatgtgtggccaagcggtttttgtaagatagtcaattgacaaagggcataagttcgagtctgttgcgcaacatgaatattttatttgtttcttcggaaaattaaaaatttcaaaaattattttcgatttatcaaatcattaaatttttgcaccatttagtttttgcaatgtggcatttcttgttcattgatgagtttgggtttaatttgttgactcggtgtgtaaaagaaaacagctaattaattaatcaattaattaattgatttgaattaaaatgaggccaagcacaaaaatccgtcgaatatacctaaacacattttccggtacgttcaattcttcctctcccaccgctgctccattttctgttgttacattttgcattttgtccgttcgttaaaataaggaaatttcgcacaaatttatcgttaattgtaaacaaatagtacaaaatatataaataataaataaaatggagacggatcaatcaatgtgcgtgtcctctcctctcgtgcgatttccattttaccttatcaatcatcccatagataagaataatgggtgggggggggggagcagggaagttgtgagaccaaaatgaatgtgcgagaaagtgagaaaagcccaaaaggtgagaatgcgcgaattccaaaaaatttaaaaaaaattttaaaattaaaataggtacacacacacaccatttcaaaaaaagacatgtgccaataaatagagagcacgggtgtgcgaaatttcgtgtcgtccccttttttcgtcactttttgagtttcgttttcgagttttaaaattttgaaccaccgatgcctatcggaatcgttcgacacttttactttaagaaagttttatgtttttaattgtggattaaattatattaaggactctccatcattttttgtcacatatttttgcggaccattatcaaatccccgaagaccactttcttgagtctcaactggagagggcagggtcggtagttcagctggtagaacactggtccggaaagccagagacgccggttcaaagccggcccgccccatagtttttcactcaaaagcttccccgctcgttcatatgtttcaatcacattcctaaaatgtttttttttataaaaatatatattagggaacatacccaaacgtcctctacagtatatcccattgtttgctcgcaacttttaatttttccaatttattttgtgtcctatcataattctgttccgctgttaatccattcgcttgaatcataaaacccttataacattttttacatccatgaaaagcgcatccctataaattagtaattaattcattaattttgttttatttcccacctgaaattcaatgatctttttttggactccaattatgtaatcaatttttaattttttgtcaccaaaatgcgatatttccccccatttcctgcatgtctcgctttcacgccgtcccgatgcataatccattcaaaatattttatcgctatattactctgactgtcctttgtctcaaatccactctcaggaataatcggcaatgtttcactattttttaaaaatttggcacgaaaaatgctgaaatttatttatttagttatttttattttggtccctacttcatgcatgaagatgcaattgttgtggataatctcataacatcgatcccatttggtgtctctttatcttttgttatatcaataaaaatctttctcaattttatacgcgctttcattaaaatgtccgtgtcatttgaacaatattcatccaatttttcctctaaaatcaattttgtcacaattaaaatatttttatcttacctaaaataaatccattattgtaatttgcatagtaccattttttgaatttttcatactcttcttcatttaattcatccggaaaataatcctcaaagggtgggagggtagccaagattttgcctaacaatggatatttttattttttttatacctatttttaccgtaattttcttctttgttaaattgatggggaaaatataattttgattcacagtctaaaccaaat

SEQ ID NO: 7913 - DNA, 2909 bp, Heterodera glycines
cggcaaaatatttttaatcgtaaccaaaaaaatgtagcctttaagatcggaatcttctttcatccctgctagtaaatactttatagaaattattaaaatttatcaaataatactctttatattggggcaaccatttcaagataaaataacacttataacaagcgaaagcccaaaatttataccacataaatttaaaagatggaataatttaataattgatcacatttatgccctattaaaggcccaaaaaggcactttcattttcggcataagttggccccttttcgcttcttcatttgatcattcttttgaagcattgtcatcagttcttttttgcttggattgttttgcaatttgtttttgtttcaatttctttttatcttgcatcaaaaatttaaatgcgctttcggtcattagcgttccgtcgatgctagcaaattggcttcgtccgccaaagaacaattccatcggctcttcaatttgcggaggattgccgaacaaatctcgcacatattttgcccctaataaaaagaagcttaagcttaaatttttttgttgcattggtccaacaaattctttttttaatgttaatcagggcccgagggccctcataaagcgccggggcgctttcaacacgagttattcaaaaaacggactgaaaacgcctattttagatcgtcatgactcatttgttagaaagttcccccgtcggataaagcccattaagaaaagaaagagaccatagtaatatcatttatttttcttttcaaaatttttaattctaattgcagataaacgacagacgaccacactgacgagtcaaagtgtcaggggtggagcgcgaccgcgattcgcggcaattttttgcgcgatccgcgaccgcggaaattgaatccgcgatgcgcgatccgcgaccgcgggatttttcagtccgcgctccatcctgacaagtatctccgtctcattacaatattatttcctgctcctacagtattcctaccggcttttctttgtattatttcgattttgacccatttgcccgtgtcatccataaactcggcaattttgtcaaattccctggtctcttctgggcatttctctttcacatcaaattgtcctcccatttcgaggtgttcggcgttgactggcaattgaaaattcatccaactgtatattatttctgtcggatacagaatttctgtgccatttgttcttaaaaatcgcttcttcccgccaaaggacaaattcatcggctcttcaatttgaagcggatttccgagcaaatcacgcaaataaataaccactgaaataataattaaactctttagcataactttcacttttcaatttttaaataaaccgcgtaaaaaagcttttagaacggctaagttttgtaaatttctgcgatggtgtctcaaattttcgaattttaaaggtgccggttcgttactcaaaaaccgtcaaaattggcaaaatttagtacagaagcccaaatgtacgtttgtttttgtttccttcttccgctcgagaaagagattcaaaatgccgagattaacccttaggttttaatgggtcgagactcggcctctcccaattaatgctcctcttaccggcttttccttgctctatttcgattttaatccattttcccgtgtcatccatgaattcgacaattttgtcaaattcattggtcgcttcaggacacttctctttgacatcaaattttcctcccgctctaagctgttcggaatggacaggcaatcggagattagtccatttgttaattggcatctttggatattgtgtcggcgtctgattgtctgtgaattcattcattgataatggttcgattaacggcataattattaaataattacgataataattaccaattttaaatttaattattatttttttattatacaaaaaaacaaacaaattcgttcttggatgaccaattcatttagctgcttggcaatggcatcgctttgtgaaatgctcggcctgcgtgttcttcggcttttcgctacatttacattattttgtttgtgtgaatgatcattcgtttgggtactgcttgcaaaaatgagaatgtcacttctatgccttcggtgctttggtggtgacggctgattattggtgccagaaatgtcgccgtccatcggtgccataaattggcgcggcacagtgggcggcgatgcatgccgatttgtatccgatgattgtgccaaaaaaggaaagtacgcatcagcaaaaaggggaatggcactgctgccccttcgatgctttgactgtcttttggatgacgactgtccttccttcggcagattgatcagtggtggctgatcattgggccgatcctccgacgtggccagatcgatcaatggtgtttgatcattttgccgatcctccgacgccgcggcacaaaggcgacccctcgggggcgaaacgtcgaaaatgggcccacggcggtctttccgtggggaggccgacattctgttgaatgatgcacagaaaaacaaggcgtaaaataggaaaaagagaagcaaatccataggaatacaatcaacaaaataataattatttaataataataataaggaaatataaatggcgaaaaaaacgctgaagaaatttaatttgtttgccaacgcaaatataattttatgatctttgcataaattgaataaattctgcttgcgttgccaatgccaatatttgttgaagtctactttttaaaaaatcaatgtattttatgaaaaaaataacaattacaggcgaaaaatgttatttaatttttttgttattttgtttaaaagaaattacgaaaagcaaaaagtaaggacaaaataaaaataatccaacattaaagtaattaaaaaaattaatgaaatagaaatttgacattt

SEQ ID NO: 7914 - DNA, 3319 bp, Heterodera glycines
  unsure (1)..(3319): unsure at all n locations
tttggttgtgccgttttcggttggatttgttgtgaccctatgcgtttgtggcagcggtggaagtttgtggcggttggcagtagcggaaaattttgcggaagaaagtcaaaaaaggaaattcccgctcaaacacttgtcgatattctttgctaaaatcaaattgattatttagaaatgaaaaatggctttaattgttcaaattagaataataggaagaggaatatttgaaattttaattcataattcggggaatattggcgaaagttatgtccgttaattgccgagcaaatttgcggattaattgccgtcacctgcaaacgtaaagcaccggtgcctgggctccctgggccacgtacagcaaataagcgaccgaatgggaatagtaaagcgcgtcaatcatttcgaagtgcaaaaatggcaaaatcagacggagcaaattgttggtgagccaaccgaacacttcgaggagcataatggcactgacggaacggacaatgcggcgcgatgagtcattctgctggactgaaatggaacttattagaagtgaaattaaaaattcataagtgccagttttgcagcgaaaggaaagccaaaggaacacataacacgcggcggttgcaacatttattgccaagttttggagcacgacgacggaattttgactcggataaatgtcagtcgtcccacaaatgacgagcctacacaaaatgaaaatggatttaatagaaattgaaatatgtattgcttaaaattgataaagcgactaattgcaaatacttctcggggatggccatcgaataattgtacgaaatgagcgccttataaaatgtgtaagtgtaacacgcgagggcgaccagcacaacaacgatgcgcttcttcccaaaataatttgaatagctaaaataattagtgccaaattaaaattaaatttaaaatttaaattttggaatttttacaaaaaggggaaaaacaatccgacgagacggtccaaagcgatggcgaagcaaatggtccattgcgcggtggcgccaatgtacggcccaatttggagcgggaaacagttggccagacgaatttgaatttggcccgtaaggacgacagtcgcactgatcaaagcggcgggaagctgaagcgacaagttgaagaagttcagtgcgatcagaaagttgcaattgcctctcaaaatcctaaagataaattttagtaatttttactttttcaaattaaaaaaattcaaaaatgccattcgacaaatgaaaatccaatgggagaagactcactttgatttgaaagtcaaataaattggcgtagtgctcaaaaagaaggccatcaccaaaatggggatctttaggccaaacaaaaaacaaagcggaacaaaatttgaactgatcacatagccgagctgtgtaattaaggactaattgcaattttaaaatggattactgttaccgtagtattcgtaggatccattgttgtgttggtactgttgttcattttttaaagaaaatcttttcagctttcggcttttgtttggtttaattttcgaatgtcaagaataataatttattattttattttttacaaattatgaacaaattgacaattttgcttctgtcttaggttttcccatggctttgcgtgactatgccaatcatgggaactaattaatgcattaagaaaataactaatagaaaatgctttcactgctttgaagtcgattaatatttatatgaccatattcaggcatttgttcaatgctgctcttaattgtggtttaatttgtcaaaatgaaagaaatttaaattataatttcctttttcttgcagtttcacttaagtgtgtaatttgattttttgtcttaaattccaaagtgataattaaattttcaattttctgcttgtcgaatatttagtaattattggctaatgttcacaaatggcgattaacttttaatgcgaaattgccagctgaaatgttcacttctaagaccataattaaattctgttgcgcaatgaaaaattggattttttaagagtaccaattaaagataaaacaattttaatctttgaattgttatataacacatgtaatgtttaccatcatttgtagaagcaaaaatgaaatatggacaaatgcactttctcgaaattttggcggttttcagttggtgggcattaataatgtcattttaattaatttgtatgtttgtaaaccaaacatttttaaggcaaaaaagtaataatttttgtacataattattcagcgttttttttaataaattttgctattcttaaaaaaaatcaaattaacaccaaaacaaaagttgaaaatgaaaatcacagaaattgttgttaatgatgaaattactttctctgtgacaaatttagcaacgttttaaaaagtgttaagttatgaatggaaaattatatgtacttttataaaggagcagaaaattaataatttatttcccatgaacattttttctttttgttttttgctcggtgttttatcggtccgattaattaaccgtaaacgattttaaaaaaagggaaatttaactttcacttggcaatattttgcaaaatttagttgtcaaaagtttaaaataaaaaaaagaattttgaaaggaatgaaaggatttttttccattggcacggcattcgctgggtcagccgattagcacgtcgttgggccggggacagtccgggccgcatctgaacgcgcactcggccaaatccatgcggcagttcgccctgcaatgtctgaacttcgtgccgtcccccgcggcgccgccctccgccgggcgaagcgtttggcacgaataattgcagaggacgtaagcattgaagcacacatcgcaacagctgaacaaagaaagtcaaacggagacggaaaacaaacgcggcatataaaagggaaatatcggtaattagataacacaaatcaattaggaaaatgccgaaaagaaatgcgaaaaggcaatgaatcggaaaacaaaacttactcctcacttttggagacggaaaggaaaaagacgaacagaaaagaaaggagaagcatagggaagaaggaaggcgtaatgaggagggaaaaaatgattaattaaatgaaaattaattgaaaagcaaaaccattaaataggcaaaatatttttatggaatttaaaaaatgggaccaaatgaaagtgaaaaatgttaaatatttataaagaaatattataatgtgagtattaaaatcatcatataattattattccttttatntggcggagtcatcacgagaaaaatgacaaaatgtgaaagaaatcgcataaattatt

SEQ ID NO: 7915 - DNA, 2889 bp, Heterodera glycines
  unsure (1)..(2889): unsure at all n locations
ctgaaattcgtccggaattgtcattggggccacccaactctaccaacaataaacggtcgtcccgataatgaacaaataaacttaaatccacgttcaaacgattggccgggccctccggggattggggggtatctgaaaatatcaaaattaaaaaatccatgaagataaatccttcattaaagtttattttctctacaattccacaaaaaatttatttttaaaaaattttattaaataaatttctgtgaacatacctatgtaaggcattttgacaatttaaatacaatatttatagtaaacaaggacggaaaaaaaattccaaaaaaaaaactttttgtttttacctattttcatttagccacaacctttaaaaattgggttaagccccccaaccctcggggagagaataatcagggatcgggggggggggggaaatttcataaaaaatatgacaaaaaaagattaaaaacaaaaaaatttgatgggttctccttattagattgaaaaaataataattagaaaccccatatttttcgcgccttttttttaaaattttttccacaccctgaagttcaagctcagtgaccaggcgaaagaaagtgccgttgattgtgtccaacaaattcaactccaacgccgggcgcactgttcgatggtaatatttgaatttgcgtgccaattcgctgcgctcttccgctctgagtctgggcaaaaatttaaatttaaaaatacattctgaattaattgtgattaattaggcaattaattactaattagacccacccaagggccaccggataaggcacaacaatgacgacgccccaagcgatggtggcggcaacaaaaaaggcgcgcgcgaatcgcctcagggcattgttgcaacgcggacagcatgcggcggcgcgcgacgagtgattagtgcgcggcatggacaaatgatggacgcgtctctcatctcaaacacgacgcgctcgtgcgcgacacatttgtacagtgtttatcgattggggaagcgttttacgatgatgataaatgtaatctttttaaattaattaattctaaaattttgattgaaaagcccattagtcaattcgatagccaatgaataaattaatttacttaattaaatgaattaatgaaaagaattaattacagaatttttataattgagcacacggaaaatcatttatattagaagaaaaaaaggtacttatgggttttgccacccccccccccctccccctttcgaaaaaatttccaaattttttttcttgaattaaagtcattttaggggttttcacggtcggagaatccgattcttacatcgatttcgacccaattagaaccatgaacgcgaattcgaacaaaaagtcgaaacttcaaatttttttctatttttttttggttcaaaaccggcttaaatgtaaggaaacaactaaaaaacattttttaaatttatcactttttcaaataaaatgtcacgtaactcacgtaaaacacgttatggctaaaaataaacgtcagaatcgtgatcagtatcaaaaattagccaagaaaaaattattagaaaaaaattttcagggggggggggtgacaaaacctagtagtattattaaataatatttaaaaatatatatatctaagaaatttgcgttaattaagaggagttttccaaatattgaacatttatagaataaaatacccaattaaaatctaaaaatatccaaaaatggtagccaatttaaattattttgaaaaagaatgagtaaatttataaatagtgatttaaataaataaattctaatccaattttaaagaaatgaacaaaacgcagtaaataaatacatattaaatggaaacaaattaattaatacaaaaaagtaatcgcactttattaaacggcgacactttttttctgaaaaaattgttcattaaactaaatgtaaatggaaatggggaacaaacaatttgaaggtcgtttttgtcggaagaaattaaagaataaaaaacataacgaattttatttatttatttattttttgctattaatttaaataattaatatttctaaagaaaaatcaaatttattaaaatgaaaaaataaataatttaaaaaatactcgtatttttattatacaaataagtaaagaacaaaatttaatttgaattaaagctttaataaaaacatgaattcaaaaaattgttttttcaattttaattaaaatgtaataattaatttaaatatttattgtttttattttataaaaaataaagaacaaaattgaatttcaattaaagctttaaacaataaaaaaacacatttaataaattacattttggcgaagttggaggaaagaaaggacgtcgggcggacgggcggtaaaacaacaaaaaaagtggagtggatttttttttgaaggtcaatgcttttcggatggataagtaaattcgagaattgtgtcgtcaccaaaaaagaaaagatttcggcaatttgctgccccccggggcgacgttggcccaattagtggggcggttaagtgattcattcattcattcattcactcactcactcatttccatcaattcatttggcccacaaattccatttgcactcaattagtgaagaaaaaacattttgtaacattgtcgctgttaatgttaaaattttggatcaaatttggtcatttagtaatggagggttaacgattttctaacnantttttaaattntctaactnacatnncttnaaatcnnnaaaatttannnaaaaaaatattcatannnncttnnaaaaattttttcaaataaggttctttttcaaantnancttttttcattggaaacttaggaaggatagaatagcccctgcccaaaaaaaaaagaattctt

SEQ ID NO: 7916 - DNA, 1623 bp, Heterodera glycines
aacaggtgatcaagaaatgattgaatagagaatattttccatataaaagaccctcaaatttgtctgtaatcagtttcaaatcgtattttaattccaaaaatcaacaaattcacctcccatttttacaaaatgtcccccctccgtttcttcgtcgccctttttctgatcactttggcaattttggccgggacccacggcactgttgagaactcagtggatggtgggccaaacatggcatcgccgattatccgtgaacgccgtaagttttattttattttattttaattgttgaattgaattaaaggaaggttgcaagttgacataattcatgaacctccggaaacagaaaaagtgagaccaaatgtgacgagggtcataattaagatcgtgatcgatgaacttaactatcccgaaagcatttattgagataggcaatgaggttgagtaacaagaactgaccactaaactcttgatcgagaccgagactatcgatcatcccaaattgtccaaaaaataaagatgtttttcatttttaaaataaaatataaaatttcggagcatttaaagaagtttaaaaagcgaagcttacttatataaaccagttccaagtcaaaaattcatttgtttgctccctttttagtcaaacatataaatttatgagatgccaatcacataaattttaaaagtgcagctgaactgagcaaaaaagtaaacattgcaaatggaaattgttacaaaaaaagactttaaaaatgattaaagaatttttctatttaaataactattttgaattcaaaatgaaataaattattttgaattaaaattgtaaactttatatgtatgccgttgggttagagttaaatctgtccaaaactgacttcaaccaagttaggcttttcgaaaaatttcagctcaaatttttacgaatttctataaatattaaaaaataataataatttttttgtccctaaaacggtacatggcattcattgactgtgaattgcgcggaaaacgaagagaaattttttcaataaaattcttttaaaaaaactcgggttttaaatttttgtggcattccgtcaggttagcttggcatgtgcttctgctgaagcttttgacctatacactaattgctgcttcttcttctcctgtcactgattgataaatgcactcaatcttgtgtaaatataaaattgtgccgcttttccgcgatgacaaattgaatttaaaaatttaatgcccgcgggggggggcaaagatgtgccatctcgaaagtacaaagtaaagggcgcataaaggatttaaaagaggcataaaaaatacgggatttaagtcataaaaatcactcaaaaagacaaattttaaattgttgacagtgctgaaaggcatccagcaaaatttttttttgaaaaattaaaaaatttaggtttattccgggagcctcagctgcattcgagtgccgaatgtttgtgccgagtcggtgatgacgcgaaaagtgccaaacaaaagggccaacaaatgttgggaagggacggtcaaagcggtgacaattctaagaatggaaatgaaatgtattacttacaattacgattttaggaatgacataggaaaatcatgaatgta

SEQ ID NO: 7917 - DNA, 1392 bp, Heterodera glycines
tattccggcataaaaattgtgcaaaattagaatttccttagtagttcatatatttaaagtcatctttttgcgtcgagttttgaaaagttagaatttttcactaaatttctaagaaactcaaaagatagacagcaaatttatccgaaatttacgaaataaaaagcaacaaaaaaaaaatgtcaataaatgcggaaaaagaaaagaatgagagatagaaaacccgagagagatagtacagcgaatgacagcgccatatgaaaaatggagaaaatgccgtacgaagttggcacgagcaaaagcagatcattgacagcgccatggtttttaaaaatttgtcatgagagtacagagaatgacaaatcatatgaaaaatggaaatgccgtacgaagttggcacgatcaaaacggatgattgacagcgccatgggttttaaaaatttgtcatgaaagtctggcagcaagaaataagcaaaaagccatgaaaatgaacaaaatgggtgaagtgaaaatatgagtgtaatatgcaaagacaaaaaatgcaatgatcagcagaggaaacggaatgggatcaccgctgcgctttcggcgcctatgactaactttcttagcgtcggcactaagtttcttagcagcgccaccatttgccccagtcgaattcctttcactagcaaaatgttcaaattccaatttgtttagcacaaattcgaacaaatcactgggctttagcaattctttgtccatcagttcgtttactgtcgaatttttcaaaatttccggaaattccatttgaaatttttttgcaaattggctaaattcattcagttggttgttgcattcaagttcattctcgtcctccttttgcttcatcacttccaaaatgtgttgcccatttttcatcgctttttcaacaattgtgccaatgtcatttttggcataaaatgattttatggcattttgcacatcacttttttctttgcaaatttctgtcacaatttgtttcaactcattaatctcgggcagttccttgttgttgttgttgttgtaaatttcgatgcttaattggccaatatttgtgcacactttcgacagaatccaactgctaaaatttcatatatttttaaatgcgaaatatttaaataaaaaattattaaaaaaagtaaaaatgtttagcaaatatttttaaaaaaatcataaaatacttcaaattttcctttattccgccggatttcgtcagttctaaaaattaaaaatgcttgaaatttttttttcataaatttacctttgaattcctttaaaagcttttcatatattcttttccactaaattttcgtgtttttgtttcggcactttggcatcagcaaaacaattgttgaaaattaatggggcaataaa

SEQ ID NO: 7918 - DNA, 3889 bp, Heterodera glycines
atttgaaaggggtgtgtccaactgtgccaatagactgactttctaacgcaaaaaaacgagaaatttcacgtctaggggctttcaagtccggtacctaagcagcccaataaaatacacaccattctttgtagaatggcggtaaatttggtaacccaagaataaaaattcgcatttgtaagtaaaatttaagctggaaatttttatgtgtttaaatatgtaaggtaaaaacggtggggggggggggggaagtgccgcggaaagcaattaagaaatgatctgataaaaaatggggaaaatacgcgaagtaataaataattttgcaacatgagatcactatcagtttacccttttgacaaattaattcgagaattttaagaattactgaaatggaaacaatcactaattggataaagaaataccgtatatgctctaattatagcccatgggggattatttttcaacctcctcagaaaaggggggataattagtgactgggggattatgatagagggattatttttcaaaacacctcgtagactgggggataattggagactgcgggattaatagagactgggctataattagagcatatacggtaaataccaaataaaaatgatgtctaaaaatgaatgggattgactgacacctgcagattgtgagatcaaacaattagaggtggcagtttgtggcaaaattcaaaatgatatttatgttcaaccgtacactggtaagaatgggggtctgagtaaacatttgtgaaggaaattggtgggaaaggaaaattttttagaaaaaaaaattatgtattttttatttaattatttgcttatttgttttacctagggttcgagccccgcccccgtccccggggacgggacaggttttttggcctcaccccgcccccgtgactcagatccccgcatccccagcccccgcgggggcgcggggtgaaaatacaacccctaagaatggcatattctgggacaaaaggcaaaaaatttgtacaattttgaatttttttttaccattttgacaaatttttatggaataaagtaagttttgcttttgtttttaatatatttgtggagtagtggttagtgcttccattctaacagtattctttgttatgagtttgatgctggttgacgttttctatttaatttactttttttatgattaatagacaaaaacacctataaaattgaccattcttggcataatttgttaaaaaattgaactcaaatttaaaaaaaaattccgaaggcaccgccggatgaaaatttcgttgaaattaaaaagtccaattttccttgagtaaatcatgaaaatttaaatattttaaaatatttttacaaggtgctaggtcgatccacaaaaaaactcagtgtgggcgttccacaaaaaactcagtgtgggcgttccacaaaaaactcagtgatcgataaaattaaataaataaatttaattattcaattcacaaaacacggtgccgtccggttaatactaatgtacggcgggacgcaagtcattttcaaattttttaaatttttcaatttttgacatcacttctcgccaattttctccatttgtagtagacatagcctgacgccattgataccattttgtagagctcatcgagatgtacaaaaaagccgctggtaccggcaagcttagcttgggttggccatcgacagggtcgggggcgaggctgagggtcctccggcagatgtgcccgacccatgacgggctccaagtgaatggattaagaaccggacccggcctgggagatagcccttaaaaaactgaacaaaaaattgttcttaaccgggccggtccaggttccggatcaggcacttttggtgcccgaaagtggtgcgataggcttccggaaaatgaccaatcaatcactgagattttttgtggatcgcccacactgagattttttgtggatcgcccacactgagtttttttgtggatcgactcagcacgcaataagaaattggcaaaatgggacggtccccggatttcggtgttcactctctctgggtgggcccactaaaagaattgttcaaattttggtcccccatctgcgttttgtgcaaaatttgaagtttgctaggaatttgcacgaagggggctcacaaagtgaggacggtgaagcccattttggtgccggagaagccgcgattggtacaaaaaaaaaaagcagcggaaagggaagaaatgaagcgccggacaaaaatgcccggggaaaatccaacggttaaattccctgaccaattcggaaaaagggaaagcacaattatggtgaataaaagtttatttacgattttttatcaaaaaagtaaaattcaaaatccaaaatctaaaaaagtatctttttaaattttttttcactttttttcaatcattaaataacgtgaaatgcgtgcgtaccatatgttaaaaaacaaattctgaatcaaaaaaaaattagacaaaaaaaaattgtaaaaaaatttcaaaatgtaccttcttttaagtagagcggaaagtactcaaagatgtgtgttgccgaggtgaataaattggaattgaattgaaaaacggacaaaaggaattgcaaattgtccaaagattgatttaccgtaacgaacaataaaaaaaacactatctacaaaaggggccgctgatgagtaacacaatatactcacctgagagcataaaaacacgtgttaattaacctcggttcacttgtcaaaaggcgtctctccgaacccctgtggcgcgtgtcgcacaaacgaatttcgctgccggctgacccgtgccatgactgacacgttcgttgcactcaagcccatgcgcgagccgttcagccaggaacatgcccagtcgccgctcggtgttgccgccgtccagtcgctcaagcgtgtttttgtgccgcaacggcaccgacccattgccgatggccaattcagtacttccgtcatcattctctatagaccacgaatcgaccaactgaagttcaagctgttcagcagcagcatccatcgacgactgtggaaatgagcgatttgcttaatcaattttttttctaacatttcacattttttattgcaaattcattgtttatcatttttattaataaaaataaattaatatttaaagacggcccccggatttcggcgttcgctctgtatggatgggcccacgaaaagaattgctcaacttttggtccatccccatcccttcttcattttgtgtccccactattttttgcagcgttcgtggacccaaattaatcaatttaataattgattttgcgctgcaaatttcacagttttcatttgccctgctggctgtgtggcatatttaaatgttatttttttaaaaattaaattttcgcttttcctttcctctatcacttttcccttccctctcccctctcttttctctccccaatatttcttttccttgccttggtactagataaaccatcgggacggatcccgagtcaacatcccgaccgaatcccgatcccaatcaatcccgaagaatttttttcgggatcccgcgggatttgcaaaaactcaaaatttttttacgttttgacccatgaaatttttttagaatttttaagggattttttaaagaaaagtagcaatgaaaatattttaatttaaaatttaagatcttaattaaaaaatggagattttccgaaatattatcgtaacttcaatcccgcgggatcccgcgggattggtaaatggtcgggagggatcccgatcccgatcaatcccgatgaatttaaaaaatcgctcgggacggatcccgatgttgcgatccagaatttaatcccgcggattccgaagaaatcccgcgggaccccggtctcgtccggtctcta

SEQ ID NO: 7919 - DNA, 3793 bp, Heterodera glycines
ttttgttggatatttttgaaattttgaggtgtgtacgcaaaaccgaaaagtacccaatggaaattagcgattgcttaaccaatttaattttttcattttgacatttgccaaatcaattattttttacattgataaatcattgcgcttcggaaagataattagagcctgaatccctttttttaattttaaaataattgtttataattgaggcaatcctgcagaattttggtcactaatccaatttctaatgatgggcttaaaattagtattcagtggttgaggagctgatcactagggcgaggatttctatttacaaaaaaaaataacaaaatatttaagaaaaaagacaaaatatggttaataaaatattgatcacaaaaaaaagaaatatcttcggctaaaaatcataattttcgtgcatttcgaatcgaatcaaagctgcagaaaaaataataaaaactcacgccctactgatcacaaattgcacaaacaaaatgaaaatgtttttaaaaagaaaaattattcaataatttataatttttggactcaattaaattctgattggactctcataaagtgcattagaactaagtcatgaatgaactcaatcaaattggcatatttggaggcaaaaattaaaaaatcgccaatttattctgtattaccatatgaacaattaaaagcaattgcgttagtaaaaaaaaagcattcattttaacatttcattttgtttttaacatttcataaatgtctcgaattattcattttttccatttgacattttgctaaaatttaacatttcccgaaaattgcgaattattcatttttctgtcttcgccattccaaaattttttgtttgtctcattgttctgtttgtgcgtttgtcatgactaatattctcttcgcccacttttacacatattgcaattcattcattcacaatatttttcttttgtttaaaaatattaattattttttttttatatttttaataattttttaaatttaattttcctttttcccgtctcatttttttaccatacatgtagaatttttgcctactgcacttttttccgtgaatccaatggcatttttatcagtttaattagagtttatgagtccaaccaagtttaaagaagttgaaatttacaaaatctcagcgtttagcaattgacaaaaaaagatataataattaatgaattgttgatttttccaccttttaaatatttgcattcacttgttttctcgttacaaatttattgtttaaaaaattatgggttcttagttgattggactcatataaactcttaataatttttttcttaaatcttagaattttttattagcctattaaatttaacaaattttgttttatttctaaaaaaaaatatgaccaaaaaggatcaggaaatacagagttttttgaaggagccctcctcaaacggccgccgtaatcgagagaatgtgcactcgttttggcgcaaaagcaaatgtttgaatttgaggctttgcgaaaaacatatttttacatgctaataatgattaattattatttcggatttaattataaataaatgtgagcatgaaaatttattttctttttctttttttaaaattttatgttttgaattttgttgttttctcccaaatgaatttatttttacgtttcttcacttggcaaagattttctgtatttcctctaattacggtcccaaagggcggctattttttaatgcccactcggaaatttaagaaggaggtggggaggaacggcattttgtgaatgaaataaaggattttgtacaaaacaaaataaccacacgtgttcaaaataaattgacaaatatttttaatttaaattaaaaaatcccacattttggtcctacccaaaacaccgggtcaggcggggtcactgtggcagggcattttggcgccgtcaaatttaaaatgttataaattttttcatatatttcaatcgatgagtgtctatgtgttctctattaacctacaaaatttcataaaattattttaggctgaagaaaagatatggcggcgttcggcgccaaaatggccagaaaagttcaatttgttgaggtttttggccgaacttttttgtctctgttaaattttttaaaattttgcaggttaatagggagtcaagtgctttaaagcatatcaagcttctttaatttgggagacaaatagaaaggttatagcgtttgcgcaaaaaagggctggcgcgaaaagttggcggttccccaaaacgtcaccacccaaaatgccaccagatcagcagggcttggatttatatgtgtccactatttttggcatataataatgtaagagattatcagagaaattgtgaatatgaaaagtgcaatttattttgtttcaaaaaaatgctctctcaactccccaaatggctatatatataattagaaatcattaatcagtaaaatgccaatgaatttataaaagccgttaaattcctttttaatttttcccctatctactcccctatcttgtgatgtacagtatgcttttctcactaatctcacaaaaatttaatgcattatttatattattttattgcctttttaatttgttatttttcatgtcccaattaaaatgcaatgcgtatgtaaatggcaataaattaaattataatttatttagaattaatttttaaaaatggaaaatgtccttgacgttgttggcgaagaaattttggagcgcattcaaaacaatgagtttgaaagagatgtaccgtgaattgcaaaaaatgataatttgaaatttaatattttattccttcattaggttgaggggttcatcccggtgtcgggtgagacaccgtccccatcattcgcactgctccgagaccattggcttcaggcaataaaaattgataaaattataaaataaataattattttgctaatattatagagagatggtctttttgaagacccggagtttccagtggagacaattccaatgtacttcactgaagggccagtgccgatccgttggctgaggcctggcgaaattgctgatcacccgcagttcatcaaccagggcccaattgctggggatgttcggcaaggaagcattgggaattgttgggcgctggctgcggcgtcggtgttggcgcagtatgggcccctgttttacagggtggtgccgcctgaccagggattcggccaaaattacgccggtaaatttataaaatcaatatatatttaaattaaatattctacaaacaattcttttttaatgacatataatttggtagggatcaactgcgtcttgggtcaacttcatctgacaatgagccaattttgtctcggccaactccgtcttcgtatataatgggtcaactccgtctctgacaaaaattcaaaattaaatttatttgttttttttattataaaacgccattttttggcaatattattttaaaattaagtgataattttatacaactaccataaaaatgttcaattttccattggaatactgtagtttttgggactaataaattaaaagacgactaaattttgccattttggtagtcgaaaaacgaatttgattttgatttatttttgcaaataaaatggaatttataaaaaatattcaaaaactttatttgaatttttatctgatacggagttgacccattgagttggtagccgtagttggccagcatcatatggagttgacccgtttcgtttataattagagaccgatgaatttgtaggcaagacgaatgagtcaatcagtcccaattagt

SEQ ID NO: 7920 - DNA, 2650 bp, Heterodera glycines
  unsure (1)..(2650): unsure at all n locations
tatgtgagtannggaattaaatgcatttnntagatgtgatntggagttcctaagatgacttttcaaatgctgcttttgccatttntaaatgcctatntaaagacaccactaaaattgaaaaattttcaaaaattattcactaaaatctttgatcaaatcttctaattttcaaaattttaatcattaagaaaaatattaaaatcttattattaattttataatacattttgttaaaaaaattagtccgttatttcaagttttgccaatttttgggattttcgcgtctaaaaatccattcataataaaataaaattcatagaactcgcacactttgtccattcaaaaatatgagaaagacgagcatttgtccgtgccaacattgaaaatgctttttatgggagtgcacattttaattccgttcatttttgtgccaactttaaaacatttgccaatcggaaaatataatgccaaacaaattgaaagaattgggaaaataatggcacaaaaaattgaaaatttaatggcaaaagacaatttggacgaagcacaacacaaatttgagtggataaagcgaaacgaaaaaatgcgagaaaagaaagaagcattgtcaaaagcatgtaaacaaatggattgattaattattaattagttgattaattactaattaataatggtaattaaagcgaacatttaattaataacaaattaagcaaaagaaaaagcggttgaaattgaggaagaaattagacaaatgctaagcattgaaatgttaatggaagaacacaaaagaaatgcattaataaacagagaaaaggtcaaagaaatgaaagcgatgctaacaattttatcgggtatttttatttttattattattagataatttttaaataataatttcaatgttaattttaagattacggaagtgacattaaaattttgaattttctattaaccaacaatgaaattggcactgaacaaattgccaaagaaagcaaaaagctgagcctatttctgcaagcaaatgcttatttagaacaatgggcaaaaagtaaaaaatgaaaaaaaataattaaaaaatggaaatgaaatgtttttcagataaacaaatttacaacaaggaaatgggatttttggacacgaaaatgctcaaaataatgctaacgaaagtgtttctgctttacccaactgcttcttcgcttcctttcataattcacaaattctgaccttcacaacatggtaagcaaaaaatttagttccatatttaattaaaatttaattaaattgtttttcaaactttttggagtcgaaaaaattccattccaaattccttaaaataggccaagtttcaggcattggccaatgcctgttcagttggaaatggtaaatgccaatcagaaaagcagtggtgccattttgatttggtcgccagggagagaatggacgaaaaagcaaactttggcacagaacggattgagaaaagtgttgaagagagtgctgacaatgccaataatagggccaatgttcccagaagagaatttgggccaagaaattaatttgctaaatgcgcaagtcatccgctggaaaatgcaagaaggtttttaaagcaaaaataatttaaatgtatttttctgggttatttaattttccgttttttactaattgcagcgataattcacctttggcacgggaatgatttgtcggcattaaatgaattgaacaaaccaacagaattcattgagacggtgtcttatacatttgtggcattgttttaaatataattttgcatttagtactccgattttattgcaattaaatgcgtcggctccgaattttttattggaaaattctgtgattttgttggcaaacgaattgggcacaaatttttaaattattctgaagcatttttggaggattcggtcgaacttttgcatttatatcccaaaattttgaaccttcagcctcaaattaaacaacaaaatattcaacagagcccaaaaaggttggaatcatttaattaatgtataacttttaatttaaaaaattttaaattttcaattaattaaagccaattttaaagtaatggccaatttgaaatgctgtggattgtcggaattcattttaaagctaatttaaaatacaaaaagatgaaagaaattaaggaaaaattgggggaaaatttgaaaacaaactttgatgttgaaactgtcaatgactttcaacaattcgcctttttcaatgtcaaattgcactcaacaattctcgagagaaatgaactcaaaaaactattgaattaatttccattttcgttctctatgtttagaaaatgtatgaataaacggcccttctaaactcagatttatttttattattacaaatttaaaaaaagtaaatctttgcaaaatattcaatttcatacccatttatttcctctgtnttttcttggggttttcaataaaccacttatttaaattttaataattttgaattgtctctttggtacttgtacagtttagactctgagatagagaagaagaagcttccccgagaggaagattaatggatcaattgaggcaacaattgatcctatatgatcgagcaatgtggggagctggagagggcagggtcggtagttcagctggtaaacactggt

SEQ ID NO: 7921 - DNA, 1208 bp, Heterodera glycines
gaacacgtttttattactaaaaatataaaaacatttctatggggtgtaaactgtacaagtaccgtctctttttatggacagtttttctcgtgtggaatgccctttagcttctgctcattgtcgttgaccctctcattcgtcctcttggcattgagaattttctgcgcaacgtacagcgataggggtggtaaatgatggcggtgatgaacggatttacgatcagaaattgaaaaaaataattgcaaattattttaaaatactaatttaaattaaatatctatccgatgcgttttcttgccggattcaatttgagcaggcaaaggaatgcccaggcgaagttgtaaatccattgcaaccattggcacttttcgacacagaaatgatcaatgtccaccaaatacatccaataaagcatcaaaagtcggaagggcagcagcgaaagagcggtccaaacagtggtggtgaaaatgaacaccagcgaacggagctgaaaatcggagagaaacaaaaaacaaagcattggcaaaatggcattgaaatttgaaatacggaaattaaatggatttaaaaaataaaaacaaatcttataaaaaccttgctatgtaaagagtcattaaactgttaattaaagaattttaattttcgtttggcacactttgttcgaaaatgccggtgcctgttggcacaattcaccaccaccagctgcagcagctatagagttgttgaagtttttgcgcattttgttcaggaattggcgttttgtccgcatcaatcggagcaaatagcagctgaccaccgcagacgaaaaaattggacaaatgcaaaacaaagtgatgaaaatggtgtaaaagtattccatgccgggagcgaattcgaaattcacctaaaatgattagacaaatttggaaattatatcatttcatgcttttccagcaccgtcatttcacatttgttcgggtcgcgaatgcgaagaatgccgaaaagccaaaaatacgttggcacactgaagggacacccggcaattaaagaaaaataaccaatatatgaaaaacactaatgagataaaaagggctgccaaatgttcttaattctgcttgatttgtgcttacgtgaagggtccaattttaggaaatttcaaagtgtttgcttatttctaatattatttcatcaaaaaaaaaaataaccacggggccccaattccacataat

SEQ ID NO: 7922 - DNA, 2032 bp, Heterodera glycines
  unsure (1)..(2032): unsure at all n locations
aggattaaatgtaattaaagaattgataacggaacaacctttctttttcgttttgactgcccatgtattttaagttaaacttttgatcaatttccgctttaatttcaaaattatagacgccttccgcagctctacaaaaatgaggaaattttctctccccaatgaaactgtccaaatcactgcacacattcgaagtgcccttcgcactgatttgatcacgcgataataaatgggaaagtaaaaaaaagcagtttgtctccgttcagcaacaccagcgacaagggcggacaccgcgatgcccagacatctcaaaagatagacgcaaatgcacggcacaacgccaagaaagggacgccgactttcgaaagactcaaaaatttggcaaaacactaaattaaataagcaacttttattattcaaaaaaaaattgaagtccctaaacataaaaacacacctacaaccaaatcgccaaaggtcatgctggcaatgtaaatgtgaattgtgtcgcaattatacacaaaaagtcggcgagcgcaaatgatcaccaaaatgttggcgacaatcgaaatcagtgacaggccaattaacgagttgtcaaactaacaattagggaaaaataatccattaatttttcaaaaccccaccatatttgaaattttttcaaagttttactaaccaaattttgtgatgaatcttcgagccaacgagaagcatgacaatttgaggttgcattgcaatcttcgccatggctatcattatgaacactcattagtcattaattacagaaaaatggaattttttttctatttagaagagaaatgtttcattttatgtcttcaaataaaataaaattggtactggaaatagctgattcttttcacatatgtgaatttttacggcccttcaaaaatgtaggcattttacttattactcagtcatggaacaaaaattaattaaaattcgctggtataaaaaggaggattaattttggaaaacttttgcatttacacaaaatatggagtttattatcaaagaaaaataattcattatttaccattaatataacaaattaataagagaaattaatgcaattattattattttaatcattgtattattcnattattcagttgtcaattaacgcttttgagaatgttgcgaaatggtggcttttccctgcaaaaattgccaatgccataaaaaacttaagaccattttgagcttatcattgaaaattcgttccattgtattaatttatttattatacacattcgtatcgacaagaacaattacacgcgcattttgggcccataattttgtgtgtgactcggaccggctcaaatccgttgccgcaaacactgatgccgcaatggcacacgcaggggggacagctccgatctgagggggggattatgatggataaaatgaattagtttaattttaattaattattacatgatgaaggagaggatgatgaagctgccaatcccgttgtggcgatgccattgacacggaattggcaaatttccattttccacacaaaatcgaccggtgtgccgctttgattgtattggtgccaacaatgaatgcccctttaacaaaagtatattgttaattaaattaattttttttgcctgtaaatgaagtcgtctgttacgattgtgtgttcaaatggcatcagtgccaaatttagtcgttccgtggcacagctcaactgatcaacaattacctgcggcgactcacaacaaattgggtccaatctgaacagaaagttatttaacattgtggaatggttatatttttttcttttatgttttaatttttatttaaaatttgtctgccattcttcagtattttaaggatgagattgacaaatggtatgccagggttttaggcttacagaatggcatttgttctgttgtccatcacataggcattgaaaccgcccagccattgctggtcgctgcacccctccgcccatccgttgcattacggcgtcgtctccaatgccgaacatttcaccttaattccg

SEQ ID NO: 7923 - DNA, 1026 bp, Heterodera glycines
ccccccctcttccccgccgttttaccctcatttggggacccctgggattacgacaattagggggcccaacttttcaaagcaaaacgcatttgggctttcccaaaagtccagtccctaaaagtcaaatccgtcgctccatgcgagggtttttatgtaaattatttgacatttgggtgtattgtttctttttcttccatttctctcttctttgttttccccatttcctacttttaaatttgtttttcccgaggaaacaatcggttggcactcaatggcaaatgatcccaaaacgattccttttcgttgatgggcggaattcacacggcgaatggaagagatacggtagccgtgattgcacactgtaaaataaaaaataataaaaatgaattcaatttaaatccaataaacaacttaatgaaaaatctgaggatacgccaattaacaacacaaaaattatggaacagcaggaaagaaaatggtgaaagttgctcaaaataaaataattaaacggcataattatgcttaagtgaaaagtcaaagataattaattaagggatgaaagagtaattaaaacaaaattgggtagagattaaatttacattttggattatttggagccagttttaacaattatgatttgtcggcgtaaggtcagcggggaatcatcccaaaagaaatgaatgtgtgaagaagcgaagtgatcaatcgacgggattatcatcaaatgcacaatgaaaacaggattcagcttaaaaataaaaaataataattacaaataaagaaaaaaataatttaaataaaaatgatttattaattaatgcaatttaaaacgaaaatgatatgaatagagaatagaacaaaaagggttttttccgttgttttttggagatcaaagaaatttgattttaatttttttcgacgcaactgatagccctatttttgtacaaaaataaatataaaaattaggacgtaaaaacaaaaactataggaaaaaatcgaattttcaagagaaaaaattttactcaa

SEQ ID NO: 7924 - DNA, 2844 bp, Heterodera glycines
tgttgggacgaactcaaagaagccaagagcaagactgaatttaatgttggcctaatggacgtgtgggatttcggggcattggcacttttccacaaaattggcaccaaaaatgttgtgcttacacacaatttcccgatcatgtcacacatgtacaaatacatggaagaagcaggatggcaaactgagaatagcgaattatttaactaccaaaaacaaatattgggcaagggagtgccaggtgaaaaaattaattattacttattttaaaataaacataccgtatttcctgaaataaagcccccaagggctttatttttcaaccttcaaaagagggcttttttctggggtggggcactattcggggagggaggggactgtattatcggaaatacggtaagtaaattataaattaattaatgaaatataattaaaaattataaataaacaaataaaactattttacattttactaataaactatatttttacagaactgttctcagcagtcattaacgacaaaaatgttggaaaagctggtgcatacaaggaaaagcataacgaaagttcggatattttctcaaaagtttatgaaattgctgtaagtttattttaatcaaaattaatataatttatttttctttttaaggatcaaaaattcaaggaccttttcacggacaatgcatttcctactctggaacaattgttcagagatgcaaaagctttgttcgtcaacacaaggcctttattggattatgacattggcagtttgccaaaacgcgtcaaattcattggtggcattgatctgatgcagcccgatcacaaggatgtaatactatacagtagtaaaacagtatacacagattaagaaaatcccatatgaaacatttgaaaaatttaaatccgagtctattccttatttctcttaaattaaaagcaaataatttttaagaaattgaaaacagtatcataataaaaatgatttgaaatttcgaaaattttcagcaaatcacgcgatgccgaaaactcagaaaaacgatattataattgtaatatttaaataatttccctaaaaattaaggctttaccgcaagtttttgggcaacaaaaaccggtgatcgtgttcagcatgagttctttactagaaccatccaaaatgccattggacaaatttgaggcggttattcaaggacttggaatgtgtaaagaaaaggaagtgatttggaaatatgcgaaacaggaggataatggtcggaagtcattcttgcaaatgcatgctcctaatgtgcatcttgtggagcattacgatcaagccacagttattggtctgtaaattttatgtccatcaaaaaaatgccatggcatggttaggctaatctaggctaatccaccacggccggcgcaaaattcaaaaatttggaatttaaatttaccatttttattggcaaatttaatgaaaaatttcaaaaaattttccgatgggcttgggtcaaccgattctttacgttttttcaatttttagcccccccccccccgtaaaatacagtatggctggcctctgtctacggtatcatattgtaaaagtgtgccaccattttcaggcaatgaaaagacggaattggtgatcagcgaatgcgatattcgtatcgtaatggatgcgttaagcagtggaaaagcattgctttgtctgccgatgtttgccgaacagttttatgtgtcggaaaagctgcgacgcatgggcgctgcggttgtgcttgatccgcgcagtgacagtttcaccccggaggggattttcaaaagtatcggcgaagcattgacaaagcggtaatgtgcgcgcaaaatccttataatgatactttataggagagttgctcgagttttcggctctaaagtcgaggaatttctcggctttttagggtcgagagtcgcgactctcggggtcaatgactctcgggctcaatcccaagtcttggaaaattacgactcctcactctcgagcagtcctaataatttgttgtattagattaattataatttaattattttaaaacattttttagtcatgtcgtttcatttccttcaaacgagtccctgaagcaaacaattttgaatgcattcaaagaacttggtttgttcaaaaattaatcatttttttcataaaaataggggaaaaaatcatttatctgtttcaaattttctatcccattcagcacgcagtccaaatagatgagatttaggggaagataaaaaaacaggcattttagtacgagtagggcctatatacgaattttagggatgactcaaatatatctgtgatgctttgtgccctgacacagaacaatacgttgagaagttccagatgccatatatatacgaattgcacgtgctaggtacttttgcattctggaagcgtgcacaagcgcggcaaccaataatttttcaggccaactttccaccacgtaaaggttggccatctgaaagcccacacggtcggtcaacgcctcaattttgcgcttcaattcgccagtcaacagaggggaatatctgtcgaaaaggggcgctatgaattcagggcaaacgatcatcatcacccgaacacaactcaatttagagaaaaaaaacccaaaaaattttccgcgattttttctttttggaattctatgatatattatcatgattttcgaggaaacaccgtatttcacgaaagagaagaacaaacgtttacttctaccgcaaaaacactccaaagaacaaagctgggaaattataccaatagtttatataacacgtaacaaaagggtcaaaaaaacgaaagaactcccgcgagctctgaactccaaattttta

SEQ ID NO: 7925 - DNA, 1010 bp, Heterodera glycines
ggggaaattttaaaatttactagtatttagtacgttaaaatgagaggagcatttttctctgcgctctctatttattgggttcctctcgttttttggggggattttgtatacccataattgaatctgaattttttgaaaaaaaaataaataaaactttcttttatgtatgtaaaacacaagcaaataaaataagttttatattgtttatcatattaatatacagacattatcttaaacaaatatctctgaataaaaagcaaaattaatggaggtatgtatatatacaaataaatcatatttttgtgctgcaatctcaacaaagataatgatactaacaatggcattagcaaggggcaaaaatgaaggttgactttttagactaaaatctgtgccaacaattttaagtcttcttggcgtcgtcgcctcacaatggcaccgatttttgcattaatttcctcagcaggaaccataaaactctctttgtaagatcagtggagcgatgcctttttggcatcggcacaatttaattgtgccgtattggtgccgaagtttggtgattgagtggaggcaaacaccttgaaaatgtgcgaaaatttttattgaaaaataaaggtttatttaaaaatcccgtaaaagccttttggaaattgaaaattagttaaaatttgcaaataggagtggtgtctaaaatatcagtagctcattcccccgcggaaaattttaaaaaagacagtaatttcctaaatttttacaataaagtttttttctagttaaaaaacaaatttctatgaaaaatcttctcaaaatatttattaaaatgtagaattgggggggggggggggaaatttggaatgaaaaattacaaaaaaaaagttgttcgtaatttgcagaaattttccacattaaacttcccattgctccctcttttacagcccccttccagacggaaaatgttagttcacaaaaaatcaacaattaatgttgtaagctttttttatttgttagtttga

SEQ ID NO: 7926 - DNA, 1942 bp, Heterodera glycines
ccctttctttttttcaaagataatttgtatcagacagccgaatttgcctaaaataaatttcagtttttcttgggagcctaaaattaccaaaaaaaaaacaaaaagtttttcataaattgtgatgggagcagcaaaccactgaaaattttgaaaaagggaaatgagataaaagaagtggtgggaggggagaagggacatcggaggctttaatttatgcacgaaaccatcgatcgcttttacaaaataacattttgacatcctattccaatttttgggacaggaaatttggacgcgatttattgaatcgcgtgcagaaaccaaaatagaatcacattcatacatatttttccattattctcaaaaaaatgaaaaaaaaattttcatttgatagacaaagtggcatactttttaaccacatactttttaaccattttaaaaaccgatttacctaacctgatgctctaaaaaattcgaaacaattcgacaacgtatattactatatttttggtaacattcgaacgcaacaaagtctgacttgagacttttgaattggaaacagaaaaaatcccaaattgctctatcgccgaaatgcaaccaaattattttaccaaataaattaaaatgacctagtaagtatgtatctatgactttacgaaatacatatacggtaccatattacattattatttgagtcctataacaatacagtacaccaaaaaagccccttaaatttccattattttttagatagatttggccccgttgatggccaattttgatgatgttttggcactgtgcagtcaccataaggtggtgccaattgttcgcgcaaatgcgatgggtgcaagcagcaaatttggctcacagcaacagcgcggtttctaccacacactgttgcgcgaaatggccaacaaatatggcaaatcggcaacacaggtggcaacaggcactcactgattgccaattaagaaacaattaaaattttcttttagtataaatattttcataaaatgctatgaaataatgggtgaattttttgagtatcaattttcataaatttgaaattgaccggaaaatgctgtatggcaaatgagcaaaaaaaaggtcaaaaccaggaaagtgtgccgactccctcaaaaaatttcggcaatcggaaattgtgacgactgaaaaaatttcggccggaattccgagtcccaaaatgtcgtaaatcagcattccggcaaatctcgagttattttctggcaacagggcctagtctaattaatcatttcgtcagcaggtgttatgccgatggttgcaccaacatggcatggcggtagtgtgcagttgtggcccaacaactcaaattggccaacaaacgaacattttcgattttggcataagcaacgaagacatgcgacgcttgaatagcttgtacaacagaaatgtcattgcgcggccatatcagtaaattaaattcaaaaataattacttaatttcattttaaatcacaaattaatggaagaattattggtaaaatttttcgatttaaaatttcattaatttgcatccaatagcaaccgatcttttttgtggcctttaatgaatgaataatgctttaagaattttgagtgtattataagtcaacaatgaacacaatgcttaagcccatttatttatgagtattttacaaaaaaaaaaatttaaatatgtcaaaagaagccgaaaacaaattttgtattatttcatgggcattgaggtaataaataattagttaattaatatatgaatctgaaaaaatattgttaaacattttttaaataatatatttttagtaaaattttacaaaaccatttaccatatttcctaaaatagagcccccgggggctttatttttcaagccccctcaaaaggggggctttatttcaggagggggggggggttctaatttagagggggg

SEQ ID NO: 7927 - DNA, 3935 bp, Heterodera glycines
  unsure (1)..(3935): unsure at all n locations
ttttggcatttatttatttaatctcgacagatcactgtgtctgctgctcggcttatggcccaatcgccagtgatccatcggatgttcagcacggaaatgcgcgagcagcagcagcagtcgctcactttggacgaattgggcgtcgacatggagcagttcaaggaatttttggaggccatcccgacaatcagtgttcagactcccacttttcccaaccgtaaaagcaaattattattattattattaatttaataataataataatttagtaatttagacagtttttataaaactctctattagaatggcgattttctcttaaagtggctggctcatttgagaatttgatatttcaagtgaccgatgttttttcaggttttcaaataatagcaaaaacttatattttgtaaattagacatttttaggtgttcctatgcaattaattgatttgttcaaacctttgtttgctttttaaaacaagttccaaaaaatccaggcccaggggagcctgggttttttctggacctggatttttgtccagaaaatccaaggtccaggcttttttcaaaatgccaatctctaatgttttaattctgtttttgttaaggaattttaagctaaaaaaattttcttttttctaatgtcgaaaaaatgactggaaatttcatgagccaagaaataaattcataaaatcgtaagcagaaacaaccatttttattttaaaattctttttttgcaatttctcagctaacaatgtgttggcgctgctcaaattggcccacttcttcgaggtgcactggctgaagaggcgctgtgagacgcatttgatcaattgcgtggaaattccgctgatcgaccgattccttctgatcgaacaattcggacttggccaattgaaagtgaatttatttttcaattaaattcattatttttctcttatttagaattactttttgcgtttgaatgcttacaaattgcgcgcttttttcaagtccaatcgtgctcaattgtcctccaatgtcttcgcgagcaaagaattgttaggcgaatttgtcttcaaattggccgaataatattttgaaattgatcctctgaaaagaccgaatttggtcagcctttttttcattcattgtttctttttatattccttcaattaaaaatgtcatttaaaaaagtgccggaagtattggcacgggttaaagtgaaaaataacggtaccactctatgactattgttgtaaattatatggattaacatattttttctgcgcatatactatgaagaaaggggctcaaaatagcatttcttaaaaaaattgcatttttaaattttaaatccatttttttgttggtttattgttaagaccgacttttgaggcatatgcctttttttctgcgcactagtttcgacatattaagcataaataacacattttccacttggtttgaggcttctacgttgacttttattatgccgttttttgcctttttcggggttttcatgccttaaatgccttttttggtattttgccgttttggtgcttttttttggcgttttccgaaaaaaatccatcaaaaattttcgggattttcatgcctttttttcaattttttggtgcctattatagtgcctttttcgcgatttttggtgcctttttagtcggtctttatttattgtattttttaagtttatttaagcaaataatgaatatataaaccttttttggaatttttgagggtttaaaacatattttgacagtttttagtccatattttggtccatatttttctatttagcttttaaatccatatttcgggcttttttagtccatattttatgtccatatatgacgttttttagtccatattatttacaactctatctataacagagtgtatgccatgactttatttaattattacagttgggcttttggcaaggcaaaaatttgaaaaaaatattgttgggtccggactatgcaccagttggtcaaataatgtgcacagttcggagttcggacccgtgccggtcgattcgtaaatccgccactacaagaaaatattattttcatttattgaaaaaaattgttaaattataaattatcatatttgtaaaatttttatctggtttaaaaaccgaccggtttaactaaattttacaaaaaaaaatgccaaaattttttggggcactgtattaagtaagttaaaataccaatgaaatgtgaatatttactcaacatttcggatgatttgatgatagaacagagttcccaagtgtccttttttaaagattatcctttattttaggcttccccaaactttttaaatttttttgtgcttaattatttatttcgctgataaaaatgctacaaaaaacccccaatttcaaaaaaattttcccggcggcgcctttcggcaccgccttccccccctatctccaaaagtttttttaagaaaagcgcgcctcaaaaaagcgttttttaaaaacaaaaaaaggagtctcctggctaaaaatcgcaaaatttgtcattttttagacaaaatctgttaccaaatcgcatttaaatattacaaaaatttcccggcggcgcctatcggcaccgccggcctaatatactatttttttttggaaaaagcgcgccgcaaaaaaacatttttgattttttaaattttgaataaaatcttccaaaatgatgattttttgtcggcaaaatgctgattttgaaaattttcagttgacaggccatgtttttacgctaataaaatgttgttttaaatcgattttcatgtattttattgcgtttctttctggctaatattagttttagaaaaaatctttttttagggtccaaatcttagtttaagtatcgtttgtcctttttttgaaaaaaaaactcggaaaaataattttaattttatattagaatgatcaatggactttcaataaagcacaaaacacagcgatttattcagcacatgcgacagccataaaaaaataatgtttttatggaaatgttttctcaggaatttcctctatttttcttttcaatgcttttgatttgcagctttgatgcaatttcgaacatccaatttggcatcatcatggccatctcagtctgaacattttaataaattgctgaacgtaaatcatcagccgatttgtgtgctctgctgatgcttttcaacaccaccacaaagtgaaaaatatgcaaataattttttacaaattaagcaaaaattttctaaaatttttcaaattggttaaattcaactagctaaatttgtatgaaaagcatttagaaaaacgtaattcgtagttttgaataaaaaaattgaatttttccattttttgaattatttttggcataaattttcaaatttaataagttaaatttctattaatatttcgagaaaatatccattttttggccttacaaattagagatcaaattgcaaaatatatatttagaaatacgtcctagaagcttcaaaaccaagttaaaaattatgtttgattccctaaaaataaccgacaaaataaaattgcctgaatttgatgggcaaagcatccggtagtttcgtcggcatgtcctactgtacgaagtgccgaattgacaaacttttcgggtgtcggactaaaaaagcccggtttttctaagtgtgtgacttcctgtgacattttagtgagaacaatgcccggaagaatctgaaaatatatgtttttctattattaatttaaaggctttttaataaattttgtttaattattaagaacactttanaattcaatttttcaaaataatttataaacaattattaatttattattaattntatacaaattcgattttatttattataaattgaacatttttcaatttttaattattttcttataaaaaatggtataaacgttaaaatctttacactctgaat

SEQ ID NO: 7928 - DNA, 2916 bp, Heterodera glycines
gaaaaattttgtaattttaatacgatttgttaacagatttgtccacaaaaatgggccaaattttgcgattttgagcaaattttaagaaaaataaaagggatttttagggtcccggcgggtgccgattagtggcccccccgggggggggaaaaaaaatagattttaaccatatttttagcagattttcattgaaaaaattcttaattttgtgaattttcggaagaaaattcgttagtttctggtttttatgaaaatttaacaaaatttgggagagattttcgttttgatgctcttttaaaaacccaaataattaaatgattgtcaaacattatgccaatttatcaaaataatcataaaatttaacagattctgacgattttccccaaaagcctccaaatttctcaaaaaaccacaaaaagcctcaaagcctcattttgaaaatttagcctcattgacctaacaaaaaaccacaaaatgaggctaaagcctcagatctgggagccctgcctaaaaatgaattatttgaaaaaattttggtccttagaggtcaaataatgaactatgcacaaataatgcaaatgggaatacatccaagaagctccaaaacaagctaaaaattatccgcttcaaatacaccaagtacaattggatgctctaagaaaaaacgacacaataaaattgcctgaatttgatgggcaaagcatccggtagtttcgtcggcatgtcctactgtacgaagtgccgaattgacaaacttttcgggtgtcggactaaaaaagcccggtttttctaagtgtgtgacttcctgtgacattttagtgagaacaatgcccggaagaatctgaaaatatatgtttttctattattaatttaaaggctttttaataaattttgtttaattattaagaacactttaaaattcaattgttcaaaataatttataaacaattattaatttattattaattttatacaaattcgattttatttattataaattgaacatttttcaatttttaatttattttcttataaaaaatggtataaacgttaaatctttacactctgaatgataatgccagtatcagcataatctttgcgcaagattgacgagaaccaagtgagatatttctgaatttatttaaaaaaaattatttaaaaatatattttaaattattttcgtactttaactgaagaatacagagctgtatgaaaaagtgggaaaacagcagccaccgaagcaatattgacaataatgcctttattgcgttcagtcatttgttttaaaacaaaagcggtaagaatggtgtgtggcattgtgttcaaaagctaaatttaaatttgtccgtttttaatttgtcaatgtttttttttgtagttgttggatgatatggcatttgatattttgtttgatataggtattcaaaaaaattattttatctttatatataatttttttaaagtaaataaaaataaatttttcgtataaacaaaaattaaggaaatttatgaattaattgaaaaaaaacatttaaatttaccaaatctttcgcaatacttcgatgtccaccggggagctcgtgaaaacgcattaatggcggaaaacttccgacattattaactaaacatatcaacaataacaataaatttttgctgtgctttttttaaaaattcccaaaaattttcctccaaatgatttcgatcgtaaggagccaagaaattttttttttattaatttttgttttttttgagagaattgtaaaaaaaaaatttggcggcatcacaattggggagacaaaaagcatggtattattttcatttttcacatttgaggcaccttttctgaaaaagtaaaattctccgattttggtctattcatcaaaaaaatccggatttctgctaaaaaattcccgagatccgaccccatatcgaacattatttttttctaattcaattatatttttcaattacccagcatgccaatgtccatttttgaaagctcggggaaaagccatttttcatagtcctcaatgtttgcgttggtcaaatcgaatgaaatccatttgacttcgggctgcaaaaattgttttggctgaatttcttctttcactgcttttaatttgtcagcggagcgcgaaattagcattaagttaaatcctctgaatttaaatgaaattaataaattgttttctaaaatttaataatatctaattttttatatttaagtcaattattcgatattggggtattaggattaatatatggtcaaatttcaattacatttatttctatttcttttttacttgtaaaaaccaagaaatttgaccaactaataattttaattcagcagatgtcgcataaattaaattgtaaaaaaacaataaaatattatcaaacgaaaaaaatttataggaaaatgtaaaaattaaataacattttagaattcgtcattttgaaaaaaaaatctggtcctgatttcatgaactcattttctggacaaacccaggaaaaattctaaagtttacccagaaatccaggtttttttttgcctaagctggacctggagcaggattttttcatattttgcctgcacccgtatttctggaaaaagccatgaaaattcaaattgccgaagaatggcctggatccatgtccaggtcgaactctaattattatattcaaaaattgtacttgttggccaactgttttgcatattctttgccaattccatcgctggcgccggtgaccacggcccatttggcaccgaccaaacggcgcaaatcttttggacgtgcaataaaataggggtaaacacaacgccaaattgcgcgaagaaatttgaatagcaaacaaagaagaaaaagcaacccaaaaagaggtagaattgcgtaaattacctcccatttagctaaaata

SEQ ID NO: 7929 - DNA, 1721 bp, Heterodera glycines
aagcggaccaaaaagaaaagcattggggcgccgacgacgccaattcggctgcaaatttggccaaaggagcaggacaaattgcgcactccggtggggaacagttcgctgccggccaatttgtccgagttgaacaaaatgccacaaaagccaaccgcagcgaccaaagagccgttggacaaaaaggtaaagttggcatcgaaacctaaaggaatgtgccgaagaaccaaagccatgggcaattttgaaacacctgtcaaacgcagcgtaacaaagagaccaagcgcagcgaggacgagcacttcggagagcaaatgggacaatttacggcccaaccatttgaatttgaggtcggcaaaggcaatggccaagttcatcgtgtatttgaacatgcccatccaaatcatattcaggaaaatgttgcccgacatcttctcgatgttgtagacaagggcataagtgatcagagtgaccacgaaaagactgaatgacactgacaaagtgtacatggtgaatttggtgttgtagaagaggtgcagctaaagggacaaagtgccaatgacggaaaagtggccatttggggatggaaattgaaaaatgttattgtcttttagtatgatttgtcggataactcacataattgtacttctttttagtgacggaaagttccaacatttgttgtagctccttttcaagcagtgcgtccaacgccttttcgtcatacggacgccctgaaaatttaaaaattgaaatttgtataaacaaataattttcttgccgtcgaatttatgcattcgaatgatggcctctttcgcctctttcattttacgtgcactgatcaaaaaacggggcgattcgctgaggaaaagaatgagacccatgcaaggcaatgcgaagagtgccaacacgcgttgaaggtgttgccaattggggatgaagctggccaaaatgccgaagagaatgtaattgggcgcctgtggggaaaacaaacggtaaaaaaagtgaaatcgaaatggcacatttggtgggggtggggggaaagacaacattttgtcgaaaagaaaagacaaatgcaaaacgtacccaagtgatcaaattcatgaggcagaaccgatgcttttttgggtacaattcggaggtgaaaacgatcaaagtgacggcaatgcccgcgttgaaaaaacagacgacgaaacggagcacagtgaaaatgaccagcgaagcggaaaaggacgtggccaacatggcgaacacccaaaggaccaacgcgctgagcatggtcagacgacggccgtacaaatcgctgagccaaccgaagacgaaagagccggggataatgccgaccaactgcagggactgactcaacttcaattctgtccttttgctgaagaaaacggagggtgaaaaaagaataatttcaatcacaaatgccaaaagagagaaagaaaaagtgtcaaatttaacaaaaattaaacaataaatttagcactttgcttaatgcacaaataaatcacacaaaaaaggcattcagaaaacaacatattttgtatttcatcaatgattcgaatgataaaacttaaaatatttttgtaaattatcaattagttaaaaatatattttgttaaatgaaaatttacataagtgattaagtggagtcgacctaattaaattgggttaaatgggttaattaatagcgaatgccaatgcaaataaatgccctaccaaaa

SEQ ID NO: 7930 - DNA, 4448 bp, Heterodera glycines
  unsure (1)..(4448): unsure at all n locations
tttttgcgtcagcgatggttcattaaggaaaagtccaaagtgccgcacttttccaccgttggctccgcgccggcaaaagtcatgaacaaaaggtcgccgacctgcgggaacaaaattctaagcaatcattggcaaattggaggaattggcttttgctggccgacctcaacaaaaaggagcaattgagagagagtgcagacgatgagcatgtaccagcccatgcggaagcagtcgtccagcttcaggtcgtcttccttccgctcgtcctcctccgtcctttccgcgtcgttcactaagtccgcttttgctgtcccatccctttgggactgtccgtgaatgccttccccggcaatgccatccgacagaagcggctttgtttccgtcgcctcttttggcctctcgtcgccgctaattttgtcggccaaattattactcattcgaaccaagggaaaaatatatcagaaaattatttatttactgaaaaagagaaataaaaatgaattgaaaataaaataaaaagtgaaggtgagtaaaaacttattatttggcctaatttcgcgtttggaatttatttaattggttaatgtacattttacatatatatttctttatacatatgtatggaaaaaaagaaaattataaaaataataaattataaaaaaatcaattttttgttaatttttgttatgtaataatactatttatattttttggtgagagaaaatgccaagactgcgtgaaacacaacctagcacagtggtttaagttgagtttagtagtattcgagatcagaaattttttaaatttaaggaaaatgggagtgtcaacaaacatgaagtatttgaatttaaaatttattttttattattaaataattgcaaataaaataaaaatttatgcatcaaaggggttaaaacaataacaaattttaaaaagcaaaggccacaactgatcggcattcattcttttaggactcgcactgtgaggcttttaggctttgaaattggaacaaaagcctctaaacctcatttattttcattcaaaatttttcatttttgcctgacaatgagcggtcttaaggccctcaacctcttttggatttgtaaaatatttaacatttttgaggcccctctctttaccatttttatattgcggcaaaaaatgatcgaaagaatgaatccgttagcgcaaatcatagtcaactaagattttaacataatttggtcatttttattttttacattaggataattttttaaatgaagcttttgatagccaaaagaaattagggcataaatttcttaggattttgggggcaaccaaaaaatgtttttctccttttttataactttggcacactttggcccttatcgttcattagtaaaatgccaaaaaatgaatttaacggataaaaagggccgacaatatcgattattcgtattctttcccttttcaagcaatgaaaggaacgaaaatgggggaaaaagcgggggggggggggggacaaataaaataaacgcacacattgcaataaatggggacagaaagcgcagcggagcattcattctttggttggcatgtgatgaaagtgataattgataaggggacaaaagacgtaacaaattaaacaatcgtcgcaaaaattcaatttaatcgtacaaaatttttaaatttaattcaaaactaattcattaattaatggaagaaagaaaatgacgtaatattataaaaaaggaaagcggagaacggagaattacgctttatttgtgtttctttttgcttttcctcccaaatttctccgttttatttgccaaccaaagaacacacaaaagcacaaaggccaaaaagaagtgggcacagaataaataaatgtgccatctgctgcttagggaaagtgttgggatgcaaaggcattcttcggacggatgactcatcgcttttcctttcgcttttgctgtgccaatggccattcattctgtctctccctttatccctctctctgtcccttcctccgctttatcctccctttatccctccctgtgtctctttatccgtttttgtcctcccttttcgtctgttctcgaagggatggattttattattaatattaatcttttcccgccaacaattgttcgttcgttctttcgcttcacgtggggggacaccgattaattctgtgaccagcgcccaatgcgtcgctaatcgtaagccgtgacattcatcgctcatcgattcactcacttttgcctcgtgctttttatttgcacaataaaattacttccgaagttcagccgatgacgcggcacagccacgggttcattaattaattgattcattcactaattaattaactgattcgtcatcattagttaaagtgcaggcattaatgttagtcaaaaggtggaactaattgatcagcagaaggagagaaaaaaaaattgtaaaccaaaaaatgataaattaattgtaagtaattttatagcgaatgcgaatttgatcaattattaagaaaatagaataaataacttttaatacagcacattcacaaatatttatcattaataaaaaagagagactaaaagaatcaattggaaaatattcacattcaattttaaaaaatatttagtgcgtatttttatttattctttttttattgaaaaatttgaaaacaatagcaaaaatcacttgcaatatttttctttatttcttaaaaaaataaaaaagtttgtacaaatatattcattttaaatttattataaaaacaattaaaataataaatatattgcccgcttttgataaattcgctccttggaattggacgattcaattcattcattcagtggtgatggtgatgatggctaattaacttttattaagggattcacaaattgtttataccccgaattggtcagctgctcgtaaagttgcagcgcattaattacgaggaaaccgaggaaaatggcgccgagttggatctgatcagagggaaagtgccattcagttggttgcaaattgcaactgattaaccaaatgcgagtgttctttggccctttcatgcgcgagcacttccaaaaaagtcacataaataaaagtgccaccagccaaagactcgagaatgattatgatggcttcctttttgatctcgtccatgttcagagtcttaatttcaatgcttaattcatgaatatttaatcagttcaattaaactcaccgtaatgaagtcgccaaatatcgcccccaggggagtcattagagcgtaggcgctgatcaaacagcacaccaaactgttgctgcgcgacttactcaattgaaggccgacactgaatgcttcgatggccttgtggatgatcagcgaaaagaacaaagtcgtaattccggtgggagtttcctaaaaacagtcaatgacccgaaaaccatccgaacccacctgaaaacccatggccaacccctcgagcacggagtggaacgaaatggcaaaagcaaaggtgaacgacttcaacaagtccacctggagcacaaaagtggggattaatgctctccccagttgctgatcaccaaccttttccgacttttccgaactgttcagatatttgttgatcactgtcctgaaagcaggggatcaccccaaatatagccaattgtcacgcactcgtgggtgagcatgtccaagcaggaagggcatggcttcagcgagttgttcaccgattcgttggcggagtttgcgccgatggcacagtccggcttagagcaggcggaaagggcggcggaacggagctgctcaacattggccaaattggcaccaaatttggccaaggcttgcttctgtttgcgttgctcactgaacgggtggaaatatgcatttttctgaccaaataataaaacctggaggcgaacaccttcaaaatgagttcttccaacaaataaacgaggaaaaagccgcagcaaatgaaaaattggggcagagggaattcaatttcccattgggacttatcacggaaatgttcgtagtgttcactaaatttgcaaacatttgccatttcaaccaaatgccaatgccaaaatgactttatatgcgggaaaatgtcaaggaagcaagtgcccatgaacactccgcccgcgaagcacgaaagaagcgtcagagtccatgcggtgcttttccgccgatggctttccacggtcgatgactcatccgattgccttccgacgccggcggccaatttgagacgaagctaaacatttagcaaagacaaaagcaaaaaacaacgaaatgttaattgattgagcttttataatgaaggaagggcttgagtggtactgtactgagaaagatacggtacattaaaacaatgccaaagataaagcctaccaaagtagccttaaactgcctattagcataatcatcgctatcattttttcttattttttgttcactgatnttttctggaaaa

SEQ ID NO: 7931 - DNA, 2636 bp, Heterodera glycines
  unsure (1)..(2636): unsure at all n locations
aaaaggatatgtggagagaagagtataaggaaaaaatatggaatcgaaattgaattggctaaagtgaagaagaatccaggattgcggtacatcagcaaattgatgcttaatagtttatgggtaagaaaattgaaaataaattacgataggtaattttcactttcagggaaagttttcgatgagaaattgtttgaacaagaatgcggtgatagatagggcgtcggagttttataaaatagcgtgtgaccataaaattgagatgtgtgatattgttgaatattcggatgacgcgattagattgatatacagggacaaggaggactttgtgttggaacacaagtcgagcaacataatcatcagtttatggtgagttcaaaaaattataaatttgtatataacataatttttaggacgacgagtatggcgaggttaaaattattggaattcatgagagaagcggagagccatggcggggaaattttgtatacggacacggacagcatttttgttttgcacgatagggaagtggagccgatcacgacggggaaatttttgggacagatgagcgaggagtacggtggctatgagattgaagaatattgttgcggaggagcgaagcagtacgcgttgaagatgaaaaacaagcagacgggggagactgaatacgttatgaaaattcgggggattacattcgacgtggacaacaggaaaacattgcactacgatacattcagggagatggttttgaattatgggaaaggggaggtagacccggcattcttcgtctacaaaaatgattttgggtacgttttaaaaattatttgcttcattaataaaccaatatttaggccaacgcgggattcaaaagtggtgacgagggagaagcacaaaatgtacaagccggtctgccagaaggggataatcgatgaagaacttaatgtgatgccatttggattttgttaatttgtattttattgtttttttttgttaaataaagttgaataaaaaaattaaagtgatattatgactagcgggggtggaacggtctaaagtgaaggcccactcctgttagccgttatattttttataaaaaatctaaaagttcaaggggaaaatagcacctatgaccattattctggtacatagttacacacggtagttgagggaattgtagtttgacccgatgtctagagtagaggtgctgttcgacagtaaccccgaggaaacctcggtaggcaaaaagtcgattagaaccgttaaatgcgatgtcatccggtgagataaactgattgtgcctaaggtgtctcgttattagggcgtgtcttctcaaaaatttcaaattttctttcttccgcagtcgtagaatttcagaaagttcatgtggttcgcattcgttaaaatcgcatagaatttcaacgagagaattcattttgagcacgagtaggcattttcatattcgttgcaattccttatataccattacctcaccactgtatgatgaatttttgccttttttctttatttttaaaattctgagaactgaaatacagatgacgaccactaccaaatctaaaattgacaaaaaatatacccaaatatttgaactcgaaactttaattttctcaaattctttaaacatgacaaaattaaagaattcgctatttgtctcggacacatacttgggaagtatctcatttgagtgaaatcgatctttgtatattttcttttctttaattagataaatttgcccctcaattattaggaaatcggtgtatgacgatggcatcgatccgatcggtttagtaaaaatttcggtttcattatgctctagccataaattctcgattgatctaatgtcaatctcgtctattcgatcgtctctgattacgaaaagtcgaccatcaatatgatcaaatcttaggtccccaccgggaaaattcttaacaaccttttcttgacaacctcttgttatcgaagtttcatttgtgttttcgttttgaaaaattaaataactatgatcgttgtaataaaagcatgctcggggctttaattgtctgaaatcctgataaagtttgatattaatagttccgctctttcctattgaatttatattttggattgatacactccaccctgaaatcggattcctatttatcatacatagtctcgagcgatcgaacccgaacagtctttcattgaccgaactctttgtcatagtgagatatttatcgtcaaaaaattgtgtatcagaaagaatctgaaccctttctccactgagttgaccgactatcgttaggagaacaattaaattaaacattactgacaaaattcttaactaataaatcggcctttgggcgaaccttatatagacggtcaatgacctcacaataagggattccgaagcatcgctgtgtcaagaaataaatgcaaaattgcccacacgcatctgagaattgatgttggacaatgcgatcattaaagagaattcgtttgaataggttaaggtatgaacttnaatcttcgttgggataatcgcccaatgaaatcaaatattncattacggacgacgaatttacaaaacaagcgacccagtggtcacctatcgtgctccgcacgggtcggtattcgcccacaaa

SEQ ID NO: 7932 - DNA, 2605 bp, Heterodera glycines
tgtctcgttattagggcgtgtcttctcaaaaatttcaaattttctttcttccgctgtcgtagaatttctgataattcgtgaggttcgcattcattaaaatcgcataaaatttcaacgagagaattcattttgagcagcagtaagcattttcatattcggtgcaaatccttatataccgttacctcaccgccgtatgatgaatttttgccttttctctttatttttaaaattctgagaattgaaatacagatgacgaccactaccacatctaaaattgacaaaaaatacacccaaatattttaacttgaaactctaattttctcaaattctttgaatacgacaaaattaaaaaattcactatctgtgtctgacacatatttgggaagtatctcgtttgagtcaaatcggtctttgtatattttcttttccttaattagataaatttgcccctcatttattaggaaatcggtgtatgccgatggcattgatccgatcggtttactaataatttctgtttcattgtgttttgtccataaattctctattgtactaatgtcaatctcggctatttgatcgtctttgattacgaaaagtcgaccatcaatatgatcaaatctaagatccccaccgggaaaattcctgacaaccatttcttgactccctcttgttatcgaagtttcatttgtcttttcgttttggaaaattaaataactatgatcgttgtaataaaagcacgcttggggctttaattgtcgaaaatcctggtaaagcttaacattagtagatccgctcttttctattgaattaatttcttggattgataggctccaccctgaaatcagattcctatttatcgtacataatctcgagcgatcgaacccgaactgtctttcattgaccgaactctttgtcatagtgagatacttgtcgtcaaaaagttgtgtatcagaaagaatagtaactctttctgcaatcacttgactggctattgttaggagaacaattaaattaaacattacttacaaattgcttaactaataaatcggccctcgggcgaaccttatatagaccgtcaatgacctcacaataagggattccggagcatcgttgtgtcaagaaataaatgcaaaattgaccacatgcatctgagaattgatgttggacaatgcgatcgttaaagaggattcggtcaaataagttaaggtatgaacttaaatcttcattgggataatcgcccaatgaatcaaaatattcaatttctgtcggcgaatttacaaaacaggcgacccagtgttcacctatcgtgcccgcacggtcggtattcgccacaaaacagtacggaaaatgtctgtccttcaatttaggcatcttgtcggaagcaaaaacaccgataaaatattttcgggttgtcggatgtttggatagaaatatttcaatctcataagaattcatcatatgcttccgtcgctactgagcacacgattagcattaatagataaaatcgaatcaaattcccccagaacgatcatctcataaccgccgtcctttataggctcattaaattgcaccttgatgctggtcgttccgtttcgaatcaattcaaaaccgggggtgtcctctagagtagaggtcatcgggatgacgaagaagcaccaaccgtttacaaatttttgtatattgatcgacattgttctttcaccgtcgtccatcccgagccccgtatacatgtcaacaaatgctcgaatgtatttgtttctatcaaaattaagagaatagggtgacccggggaatatgtttccattcgcttcgacaccgatagagcgtatttttgcatgttcaaaaacgaagggtgactctttaggatttccggtatacgcaccggttgaaacaaacccgacgattaaacgtctcggaacaatgcttgtaaaaacattgtgtgaaagatcagaagtgccacgcgggatgaaaagacttctgatctcaatttttctcataggatatttggccggtgtggtttgtagctgattgcttattacattatttaatgactgggtaacatctactgtttttacataaattctaatatcgtgtatgttaatacgatatgtgtgcgggttcgctatgactgcatttccggaaacatatggcggtgccataattagaaaatcatcggtattacgatgtatgctaaaaatcacgtcagagttattaagcaaaagattgggctgacggccgagatcaaaattaagtttcaccatggtctcacatttggccccatcagcaaaacgtgacgctctgtttttaaagccgctgtttgtataatcattctggtcgacatcatcgatctaatagcaggacgcttcacatagacccttttttgacatcttctgaaaatcccaattcagtcatcatatatgccctaaccgcatagtaaataccggaatcataagattcgacaccggaaattgacacctttaatgttttgacaaagctgtgcccaaaattttgaatgacaccgacgtgttgatcagcttcactgtccttggtaattggaatcccaattgcttttgtcttttctctctattgaagttgacaaatagagaaa

SEQ ID NO: 7933 - DNA, 1043 bp, Heterodera glycines
  unsure (1)..(1043): unsure at all n locations
tatgtgccaaaaaacacctaaaatatgcgctaaaaccccaaaaaaggccaaaatatgtgccaaaagtttaaaaaactgctcaaaaaataaaggaatttctcaaaaagtctcatttttttatcaatttcgctagcacaatgctaatcaaaagtattatatcgttttttggcgtaaattttttctcgctctcaaagatttctcatttttcggaattttttcgctaaaaatcaaattttaccttaaaaatgaaaaaagtcatgaaaagcgccaaaaaatgcaaaaaaaaaaaaatgaaaaaattgaacatctttggggacattttgccatgaatttgattgccaaaaaagggacttttgtaaaaaaaattcaaaatttctcaaaaaatcgccaaaatatgtgccagaaactaccgaaaccccaaaatatgtttttattcgccaaaagcccaaaatatgtttttatatgtgctaaaaactcgctctgattgaaaggaaaacaggtaaaaatgctatttttgagcttttcatgcgatagcatatgcgcaaaaaaaatatgtaaaaacatataaatccgttccttgattataaggaagcattaggtattattattttatttaagcaataaattatctagcgtagatttatgaaaataacacacaataacacattttgttgacaaggcaaacaaaaaaaattgtttttttcgtttaattgtaaaaatgggggggggggggagacggacgacgacgacgacgagtaaatgctaatgaatgaatgaatgagaatgaatgatgggatgggacaactgaaaattggtggtggaagaatgtgctgctgctgctgctgctgctgctactggttgaactgctgctgctgttggtggtggtgatgctctgactgattgatgaatgttgttgataaaagtgcgtcttgcccaatgtgtcacagcgccaattctctcaacactctccgccgccgctaacanttggcggaggatgggcaaaatgaaaatgttaaaattgatctgaaaatgacaacgacgaa

SEQ ID NO: 7934 - DNA, 2230 bp, Heterodera glycines
caaagaaactgcctgctcccgaaagtgtgccatggcaccgttttccattggcacaagtgtcaaaaaacagctgagggacttgaggaggatgtgctgtgatgcggcaaaaacacattttgccgtaagttgctcacaaagggaggtggccaagtgttcgtgggatttcggaatgagattttttgggtagatagagcacacctgggttcttaagaaaaatgttttcaatttctgccaattggacccctgtgccgagataaaaaatgccaaactttttaatgatgaaataaaagaaatacttatttggtctcggcacagtgtccagtggtgtagcggtagtgcactcgtcagcatcctttaacccagggttcggatcccctacatgtaaattatttttttaatttttgtctattatgccaagtctattatcaaaataatttttgtaaaaaaaactttatttttaatttttttgaaattatttagtgcagcaaatactcaataaaaatattagacaaaaatttattttttaattcgacaggttttttattacatctttatgtttaatgcaatttttaatgggataaaattaaaacaaatatcttaattaaattaaaatctccaacagaccattaattcataattttaaattttggtgtttttcataatctccatctttgtttccatcttctttgcccaatttgcgaaggatggaaagggctaaaaatttgaattattatttcttaaaatttgataatttaaaggattagcaaaatcattctttaccaattttcattgggtctgtttcaggggtggttgtcggcgctggcgctgttggcaacggtgtcggcgctggcgttgttggcgacggtgtcggcgctgtcgctgttggcgacggtgtcggcgctggcgctgttggcgacggtgtcggcgctgctggcgacggtgtcggcgctgtcgctgttggcgacggtgtcggcgctggcgctgttggcgacggtgtcggcgctggcgctgttggcgacggtgtcggcgctggcgctgttggcgacggtgtcggcgctggcgctgttggcgacggtgtcggcgctgctggcgacggtgtcggcgctgtcgctgttggcgacggtgtcggcgctgtctgcggacggacatgtgtcggcgctggcgctgttggcaataatgtcgacgctgtcggcggccggacagggggcggaaaaaaatctgttaatcttaatccaatttggaattaattagtgcttcagtttgtgtaaagaaatgctattatgttaaaaaattctcggtttttttttagatccggatcgtttcggcgcccatgtttcggcgccagtccaagtttttttggactataacttttcatgggtagaactctctcgaatgacagttttgttggatttgattgacaattaaaaagtaaggccaaaaaagattgggcgctggcgccgaaacgaccatttcccgttttttttgttcccacttttttcaaaatttttttatttaagttaaaatctgttacaagattcttatttttagattagagctgcacgggaccgggaattttgaaaaaaccgggaccgggatttcaatttttccaaaaaccgggaccgggacctgaaaaaaccgggattttccgccccggtcccggtcccgtgcagctctattttaaatgcttttacttccgctctttcctcggccgatggtaactctgaaaaaaataacaaaatattttttaaaacttataattaatcttgaatatcttaattttaaaaaaaaatttttaaagacttacttcgttgataagtgccgtggcccattgaaatgaagccaaaaagtacgaccataagcagcataattattaattaataagcaattgaaagataaatgaactaaaaaaccattttgaaccaattaaaaagcgattaatttttttttgtaccatgctaacaaataagcaactcattagtaatatttgagagcgagaagtttccaaaatttgaggtcgagaaaaactcgtcattttctagagcagagctcgagagtctcgcatctcactagaacaaatcacggtttcttgctgcacaaatttgtttaatgatcattgcctacatttacttgcttttcagggccagggctaatttggaaaattcaaaaaataaatggaaaaataggccgtgaaaagatgtattaatctcatcattcatcagtgtccgctttt

SEQ ID NO: 7935 - DNA, 1887 bp, Heterodera glycines
tctaagtattttctactaatacgcttggtaaatttcaaaaaatttggctaagtttcaaaaaagttatggccaaaaatgtcttaaaacctggttcatcgtgtgcttttggccataactttgttcaaacttaacaattaaaaattttaaattttcaggctaatagctatcgaattatatcaataattgaaattttagttgcagttcggccaactaataataataagtgttcaataccgaaaattttccgaaattcgagaacgagaaattgaccacgaattcgtggccactaaaaacaaaatattcgtcacttccacgagcagcagagttcgagagtctcgaattttactagaactaatcacagtttcttgggcctctatattttttgtgatggttattgcctaaagtttcttggttttcatggccaggaggggcttaggggcacatttttttagtaaaatgcccaaaaatgactttttaatgatgaaataaaagaaatacttatttggtctcggcgcagtgtccagtggtgtagcggtagtgcactcgtcagcatcctttaacccagggttcggatcacctacatgtaaattatttttttaatttttgtctattatgccaagtctattatcaaaatattttttgtaaaaaaaactttatttttaatttttttgaaattatttagtgcagcaaatactcaataaaaatattagacaaaaatttattttttaattcgacaggttttttattacatctttatgtttaatgcaatttttaatgggataaaattaaaataaagattttgataaagaaataaaatttgctaattgaagtgctcataaaaagcaaaaataaaaattacaaaatggatttagccataggggattcgaacttgtgacccaaaaaaattctgactaacacattacctctacaccgaacaacacattgaagatatgtaaataattaattattttctttagttataaaaaattaaaaactttggcacgtcataactcggcactcgtgctcatttggcagaaaataaaaccatttttcttaagaacccatgggtgctctatccatccaaccaagtttcatttggaaatcccacggacacttggccacctccctttgtcagcatttttaaattaaattaatttttaaattcatattaggcttttctttaaaatatgtatgtatttcttttcttttcatttttttgtggcatttctgctgatgaacaaaaaaaaacaatgatgatgccccaaagcgccgttctaatttctgtgctctcttacaaattagctcttttttttctctgttcctttgtaagttttcgcagcattttgtcccaatgtctgccttttctctgttttctttgtcacatatacatatattttgctttctttttgtccctcttaaaagtgctacacattcactttctctctctctctctcttctctcattctctctgttcttctctgtctgtcttcccaatgttatttcttttctgttccgtttctatgcctcttttccctgcactattttcttttttttcatttctctctcatccacagcttttcttatgcttttacaatccctccgtccgtccggcctttttcgctgtttttggcgttattagtgcagcagagagagtagggcgattttccccacaattcccttaagcaatgcgtttatcaaaaaagcactttaaagcctttacaacacataaggcgatgaaaaatcccacgccatttcgtaaatgcttcttgttctctcccaaaaaattattgggacaaaatttatttttattgtatgcgaaatgtccgattttaagttagtaggcgagatgacgagcagttggcgaaatgtccttacgcgattaaagca

SEQ ID NO: 7936 - DNA, 4147 bp, Heterodera glycines
atgcccaggaggaacgtggagaaactgcgagactttctttttttgttggggcatgtgccattggtgacttggtcaaaacgtctttagggcctaaagggatggtaatcacaaatttacataatttatcaaattaatgttttcaaaacaggacaaaattctcgtcagcggtaggggcgaacaccaaaatgttcaagtgacaaacgatggtgcgacaattctgaaatcgatcggtgttgataaccctgcagcaaaagttcttgtcggttcgttgctaaaaatggccaaagaattaatgagaataaacgaaagcttaatttgtaaaaattactcattcggcataattatttattgccagaattaggtaatggttacttttcaatttttcagatatttctctgacccaggacaaggaagtgggcgatgggacaacgtcggtgactgtctttgcggccgaattgctcagagaggcggaagttatgattggacagcgaattcatccgcaagttattgtttccggctatcgaaaggctgttcgagttgcgaaggacgcacttgaaaatgctgcccaagcatcagggtaattagattgaattaacaattggaaagcaatttgaaaataatacatatcctacagagagcatttgcgcgaagatttgctgaaaattgcgaagacttcactgggttccaagattctttcccagcattccaaccattttgccaaattggcggtcgatgccgtcctccgactcggccccaacggcgctttggactccatccaagtgattaaaaaactgggtggatcgatggaagattcgtaccttgacgagggatttttgctggagaagaaggccggcatgtaccaaccacagcgaattgaagacgccaaaattcttattgcaaattctccgatggaccaggacaaagtggcaaatttacacagcattttacttttattttgtgtttagataaaagttttcggaagcagaattcgagtggattcagtggcaaaaattgccgaattggaacaagcggaaaaagacaaaatgaagcagaaagtggagaatatttgcaatcacggcatcaatgtgttcatcaatcgtcagctcatttacaattaccccgaacaattgttcgctgatcggaaagtgatggccatcgaacacgccgactttgagggcatcgaacgattggcacttgtattaggcatgtcccatataacttccatttgaacgggcctgtttcataactcaactttttctaaggtggcgaaattgcttcaacatttgacagtccatcggaggtgaaattgggtagctgcaaactcattgaagaagtcaccgttggcgaagacactttgctccgcttttccggtgtcccgcttggtaatgatggaccattatttgctttttcgtctattcctttccgtcaaggcaatgcgtgttccgttgtgcttcgtgggtccacccagcaaatcattgatgaagcagaacgttcgttgcacgacgcgctttgtgtgctgagtacgcatgtgaaagaccaacgcgtggtgcccggggcgggcgcatcggaaatgctcatggcaatggcagtgatgggcgaaagtcaaaaggtcgttctgaccaaacagaggctggcaatgaaacaatggaaattaggtggccgggaaggagtccatcgcaatggaagcattcgcacgggcactcgccaaattgcccacaatcatttgcgacaacgccggactggacagtgccgaaatcatttcgcatgtgcgagccgaacacagcaaagggaatcgccaatttggcattggtaagaaaaaagacccaaacttagaagttattacgtggattagatgttgaaaatggtcgtatggcggatgtttacgagttgggcgtgttggagtcgtacaacgttaaattgggcgtgctttgcagtggcgccgaagcggccgagcaggtccctccggcattgaattattgtcaatagacttttctttgaagcttctccgtgtcgattgcatcatcaaatgcgcgccgcgccctcgcacgaaggaccgtcgtccgtgctgagaaaacgcagctagcgaatgcgaattattgaagacgcgcacaggaaaaggaatacttcattgcttgctttaccgtactttgttattgttttttgacatgttaaaaccttaaaaaccgagccatcactgcgtaattaaatctcgtcgatttttctttcataaatcgaatgctttttccttaaaagttttgtttaatcgaaacattgaaagtgtttattaaatattttccatttgaatttcaactttaaagtgtcatccacctttttcagcttgtccttttgtaattagcctgttcgtaaatccgttctcaatgttcgttcccccccccaattcgaatgcttttgctccttttcagggcctctcttttgtcgcgggtgctttacgtcacttcgatcttcttcgtctttttgtacctcctggtgcctgcactgtttttcttcttccccacttttatgcagcacattttcttccttcattttggtcatttccattcccattgtgcccttttttgtctttttatgattccttttttagtttgctttccattcgtcgattaccacaatttggctcaccacggcgtccgttcccgggggcgtaacttttatttgcgtgagcgcgaccttaaaacggcaaagagtacagaaaatgttgcgaaagatgagccgaccatcggagtatggcacattttacccgcttctctctccgctgagaaggaacgatcgatggatgacgcggagatggagcaatcgctgaatgaagggcccaacgcattgttcatttacctgcacggaaattccttcgatcggaccacgagccaccggtgcgaattgtacaacattttgtccgccatggatttccacgtgcttgccgtggactatcgcggtgagtgggaaagaaacaaaagtaaagtgccattgcggtaagggaaaatggcatttgttaggttatggtgactcgacagggcatccgaatgaggacggcgtgaatgccgatgcgcatgccatttatgactacgccagactaaaagcgccgtcgaaggacatttatgtgtggggccattccatggttagccatgtcaaacaaaccgctttcttttttactaatttacactccattttcaagggtacgggcgtcgccacgcgactcgttgccgaactgagcgacgccggcagagcgccgaaagcgttggtactcgagtcgccgtttaacaatgtttggtttctgctcaatgcatttaaaagagcaatgataaattctcagctgcgcgacgtggtcagaaatcacccgttcagtttgcccttccgctttttgccttggttcaacacgaccattgtccacccgctgattcagtcgggactgagaatgaattcggacgagcgaatccaacggtaagatcgagggagtgtgggttaaatttaaaaaaaatgatttcaaattttttcaaaatatcatcccccttaaaagttttttttaaattttctcccaaactgaccttccatgcggtcttttccagggttgcttgtcctattctcgttttgcatgcggaggatgaccatatcattcccgtcaatttgggcaaaaaattggtcaagtcggcgagggaggcacaccgcgaagtgacctacttggaatttgagagcattttggagtacaaacacaaatacatccatcgtgcgcccgagttgcccgatgtgatcaggtgaaagcatttgaacacttcgcaatgggaaagagaaatgaatggcattttattttgcagagagttcttagagaggggacaccttcagaaacggagcaaaaaccgaattgagcagggaaacgaaggagtgaaggtggaattgtgagaagaggacaacaattggaatcaatggaagaatgaatgcttttaccatataataccaataattaggccagcttattaactcgatttcaattgttaaagtgcaattaacacaactctgtttgatcccttaattgtgaatgactttgaaattgaaagaaagtttgaacaaaaaataaggaagaaattgaagttgaacggatttcgttgccttttataaatgcggatgatttcattgt

SEQ ID NO: 7937 - DNA, 403 bp, Heterodera glycines
tctgttgtaattcattttgtcgctttatttacctccttataaaggcgtcaatcacttccctttcaatggagtcgcttttcggctgtcactttcttatgatgatgacatttctgcgtaatgttttgactgaacagcctgtgattgatcatcttttgcgtgctgttaacgccactcatttgcggttgtttcccccctccctcccccctccactcaatcctccaaattgcattttttgcttcttcccttcccttggtggaatataattaccgaagaagtgaatccgacgagcatcgcggcatcatcatcactatcagtcggcagtggacaatttcggggggggggggttgttttggggggaaaatgacccactataatttgctatactctcgatatatgccataaa

SEQ ID NO: 7938 - DNA, 2464 bp, Heterodera glycines
tttttttgcgtgttgcgccgacgaaaaggaggcaacgaacaacagcgacggaggcgcaaaaggagaggaggaaaagcaacaaacattcagcgagtgcgagcagtacacggcacattgcgaaaatccgccgtatcaacgcccttatcacccattcaacaataatggcctctctgagtgcggccctacagtcccaacacggcacaacgggcgctcatcggcactttcacactgaaccattcgtcggatcgaccattgtcagttgccaaaaaagcaaaagggcattggcattccttacgtttcagcgtcttcagcttagccaatcggccgcttccgccggcgttgtgccttcgccggcgccgcttttcacccctttggcaccgtccgcccattcggtcggtccgtcgccctcccaccaccacaatttggggctcaaccattttctgctttcgtccgccccttctacctcttcgtctctgttaaatgccttcggtcggtcctccctccggcagccgttccattcgccgtctccccattggctgactttggaagggatggccccgctaacgacggctcaattccctccggcagaaagtacacccaaatttcaaggattttatgagcaatgtttcccttttttagcatatgccgacccgtcacagcatcaagccaaagaattagctgaccaacagcttcagcaatgctcacaatcggtcggctcggatgccagcaccttctcattctcatgctccggcagtggggacagtgacgggcggagctgttcctccggctcattctcaggcactcatcagcaaaatgtccatcaacgcacatccaccgagcaaaatgccaacaatgtgcagctttcaaaagtcctacccgtcacgcaaaatgcacaacaaacggagccaaacggacaacagagacccaaaaagtcattagtccgtgacgaagcttattgggagagacgccggaaaaacaatgacgcggccaaacggagcagagactcgcgccggaaaaaggtcgctttgcttttccttttttggcttttccttttttggcgtttctttttccattttcacctttccccgtccattcacaggaggacgaagtggctgttcgtgctgtggtccttgagcaagagaatttgcaactacgttttgaagttgagcgacttcggacggaaattgaacgccatcgaatcgtagcatttggcgacgcattgatcgctgttgccaacgcagaaaatgccgtggaaatcgctgtgggtaaagtgccaatttcctcggctgcgatggcccaactgacgacagccgccacagcgatgggaatggccaaacaaattgcgaacccttagacgacgaggaagaagctttaatgatttaactccaaattcgatctttttgtcacattcttcctctttttctaaatatgtcctttggtttttaatcggtggcctttgaacgcattaaaaatttaacagatttaatgggcatcgatcgggcgacagaaatgcctttcacgagaatttggggtgggacgggggggaggaaagaatgtgcggcaaaggtatttttgccccttttcccccatccagcggtggatttgatgaaggagtgaaaaaaggctgccaacagttgttcaggcagatgatgaggaacagagaggggccggcggaagacggaggaatgaatgggcgggggggggggggacggcgcccctttcccgtccatcgtttgccctcataaaaagggacgtgaattggccctggaacatttcctctcttcttccttcgtttcattctcagcttaatttgttgttgactcttcagatggcccttttccctctctttttcgccgcttttgtcctttttggcactgtccaaaattgcgtgcacaacggaataacctacagaaatggcgacgaatgggttgagcccggggggggggcggcagcaaaaacccaaataaattgccctcacttttcagctcgaacggagtgcctttataatgcgatgcactgtaaagcaaaaaaaagatttcccgttcatttattaagctgctccgaaatttttcccatttgctcagattaatgcgaatggttcctggcggactgaagtggcggcatgtacaattccggacggacgacgagtggccgtcaattcagccatggaggacggaagcgacgaatggcagtgcaaaatggacgggtcgggaatggtcactctcgtacaggtgggccaacgaatgcgttgcttttccaccagttctgtcgtttagggcgccaatccaaacgcgcgatgcgatggtcgcccagtgggtgggccaatggcaattgaaatggagagggggctaagctcattgtcaccactcaggaagcatttggcaagagaagtcattcgaattggagtgtcggcctggcggctaccaacggtgttggcatgcatcaccgaggacggacagcgcgt

SEQ ID NO: 7939 - DNA, 1294 bp, Heterodera glycines
gagggggtgggcgtagtagtctcaccccacctgagaactgggccggcggaccccctccctggggccgacgacttttctctcttcggcggagggttcgtttttcgtaaccccctcccccagtgggccttttttccctaggagtgcctaaaattgtcaaattttgcaatttctatttttatttcagtgaacggaactcgagttgtgaatggtacagagacgagagagaagaatggccctatttaaaaactgcgaattaagggttcacaatggtctgccaacaattcggcaatgggacggtcattttccacgggacgaaaaacggtgagagagggcggtgggggggggagggaggacaattgaaagaagtctttattaaagttcgtccggcagaccccatttacagccgacttggaggaggtcaacagacttactacggacagagtaatggtgaagtgcgatgcaacgacgaaacgggccttccccggactgtcgggtaattccgccgagttttaaggccgaattcgcatattttttgtcgacagttccttttggacggagaaccatcgcttcaacaaaacatgccgacccaacggagcggtggaagtggtgaactgtgtgagcaaagacggataccaaataccgttgaacagccaagtgatccgtgccggagccaagtacaggtacagaagagacagagggagggcgggggggggggacaaaatgaattcgaggggactttggaaaagtttgtaatttagttgtgaaatgacgcctcagggcatcatccgtttcactgctgggccagcggatgaatgaacaatttgagggcataaaacgagtttaagaacacactaatgtattcatattaagttaacatcgccatttaattttcaatttttgtataaatgcaaattaaaatgattgtttttttggatgttttttcattaccaagtgactaattttgaccaaaaccttctgatggcacaaatctttaactattaaatgtttcactacacggtttgtatgcttctagtgtttatgagggatgagaggttattcttagttttttcgagccataatcatgtgttgagtgaattgacaattgttttgatttatttcattttggcaaaatgttttccttttattttccccttgggccttcaaaatgctaacttaaattgtttgacagaaaatgggcgttggttttctccttgtccaactaatcttgttatcggttctgacactttttttgttgaagaaatatgcccagcttcgcaatcaaagattgatcgtt

SEQ ID NO: 7940 - DNA, 3184 bp, Heterodera glycines
  unsure (1)..(3184): unsure at all n locations
acaattaaataatttaaataaatggaaataaatgccttcgaattgtgggacaacaggtgcaaaattncgggagcaaatactcttgaaggagtcctaaaaaacgaaaaattaaattttgagagaaaaaaggatgagaaagcaattatgccaatgcactggaatatactttttaccagtcagactaataaataagttcatcctgaaaaaaaggaaaggaattctttaaatatatttttcttttaaaattctagaaaaaaaagaaattttcaccggaggtgcttataagtgtcatttcgccattcattgacttgattcgctttattttttcaacaaaattagacccaaaaatcctcaaaatttgtcagttgaaatgggtaagtgttataaaaaccgcgaaatgtccccttccatcatccacccaccatttctttgaaatgggtggtgaactgcttggactggccgaccaaattgcacaaaatgcacatgcaatagggcaacagttcggcggacgaagggacggaatcggactccaaactaacaaaaacaaaacgtaaaatttattttgagtcctccccataattttcatacatttgccgcgtcaaaaaaggcaacaattcgttggtccaatcgccaaaattgacgcgttcataagtgagcatctaaaaggggacaaagtgttcaggtggttgattaaaaaaatttttttaattttttgggttgaaaaaacggagaaagggaagagaaggcctaaatgtaccccttcaaattattcaatttaaaaaaagttgaattcccattctaaaatcacctggatgacacgaagtacgtcgatgagattttgggggcccaaatgttcgtccaatgcggccctcaaacagtggcaaattgccaggcaaatttgggccgaatttgcagcactttttcgcaataaaacattgtagagaactgaaaacggaatagagaaccgaaaaagggtgtggaaaaattctcataaatgaccatggatgtgtaactggcagaaaattttggatttcagaaatgtgaggtccaaaaaaaaaattgggagtccaaaaaattgttaaaaatcggttacatccatgggacagaaacaaacaaaaaaaaaattatgtgcccccacccacaaaaattggaaagaagcagtagaattttggacctcaaaagaggtcgggttgccggatgggtgagcagtgcggcacaccggtggagaaattcggaaagtgtcgaattggacgggtcgagacgagcggttgacgccagggaagcactttcatggaccaatttcttggggaaaaagggttgatatgaaaatggtcatttgaaaaaaattttgtccaaaaaatcttggtttttcgtgtctaatttggatctggattttttttcatattttgacctggatttcctggttcaaaaatccaggaaaacacaggttcatgaaaaacccaggttgttggaaactgaacattgggaaaaatccaggcctggatccaggtcggtccatcagaaatattttgtttaaaaagggacaaaaaatcgagcaaaatccacgttattacacataattgaatttagtaaaatttttgaatgaattctgtgccctcttcagccgggctctgtttgcgatcaaaaatttttgaaaaatttgaaactcaccgacaaaatttggtccggtgcctttgctggataatcagtcgctgagccgccgccgccaccactcgaatcatttaatgaggaggccaaaaagggcagtgcatttttgaggagggcatccaatggcattgccgttattgaactcataattggtgaacaacgaaactactgaaatgggattttttttttgatgatttattggcatttttttttggataacttcggaaaaggaaaccccaaaaataagaaatgcaaaacaaaaaaaaaaatttttttcaatgacatgaaagccggctaagtaaattttggaacttacgccaaacatgagaattcgctttttttctcgtgtttttcgacaaaaatgggaaagcgaaaaaaaaaattttttgggaaaacatttcgaaaattccattcattatttgtaaaaaaaaaagcctcaaaactccgcttcaatgcgccgcgcgtgttagccgctaatcgcaaaagcaaagcatgttaagtgaaaatggtgaccgacgggcgccgaggagggaattgtgcaatcaaaaaagaggcatcaagcaaatgcccttccttccccctaaagcaatttgatcgttttgtttgtcctttcgcttgcataagcatccccccacccctattttgacggggggcatgcctcacttttcctccgtccgtccgtttgttgttggcgatggcccaatgcaaacagacgacaataccaaactaaacaatcagcagcagcagcagcagcacacgaaatttcgtcgtcgcaaattccatcgtcgttggggcgaggccgacatcaaaaataaccatgactcatcagcagatcatttgtccgtcgtcctctgtgtctgtgtagctcataaaaacaccaccacgacaaggaaggagtcttttgtgtacaaggagaaatgttacattatttttttgcggaatgtgatcgatgactatagtctcgccttgaatgtcataaattttatgtttttgtataacagttgcgaaccgcgatcttatctaccatcaatataatcaaccaattgagagttccgtgtcaaacgaaggccagccaacaaaacaacaacaacaatatgtaatagtaactggacattgtgtcaccatatcatattaaaacaaaaaagttataataataatatcgcgcgcatttctcgtatatcgcttgtcgtcgtcgtcagcacttctccacaatgagcgcctccttgatcagcatcagagtgggcacttcctcaccattctcctgacggtactcaacaatggccacctgtccttcgcccttgccctcggccatgttttcgcctgaacaaacgggttttacgaaacgaaaaagtcatactagtgtacaaaaggccaaccgataaagaatgcgagattcttgaaacggtccttggccagcaatgagacaacccaggcctggatcttcttcttgaacgcagcaatgtcgtcagccgacttctgctccttctccattactcaagacctcaggcatcaagct

SEQ ID NO: 7941 - DNA, 2066 bp, Heterodera glycines
gaattccccccccccccccgaaatgaaaatttttaaaagttttccagcaaataatgcaaatttttttcgaattcccccccccaaacgaaaattaaaaagtttaattggcaaatttcgtaacaagtagcactcaaatttccaaaattttttcccggcggcgcctatcggcaccgccggacctacattttccactatttttacaagttttttgccttaaaacggccaaaatttggtcatttttagtgaaaaagtgcagttgttacccagcagtggaaaaaaagttattggttaaatagcaaaaaaaagaaaaaaaaaggtcttcaggtcggatctccccccccgaaaaatgtttctagatacgcccctggtaatgggtgaacatggtattttttcggggtttctcgaaaaaataaacaaaaccaaaaacccctcctggtttatcgaccctcactctaagattttttatcgatcccttttcttccaactaccgcaaattttactttttttaaattgatccaacatgtgtcaatgttaatttttgaacaaacctttttcatgaagtccttgacgtagcctttaaatgttgcctggttctaaacggtaaaaatataactgatgtcacacgcaaaatttaagcaatagtcccatcaaacctcgtaacaattcatctcctgtagtcgatggttgagcacaaagtcaatgccgcgttccaccgcctcttcagtgccctcgtcaatttcctccgctgacggatttgccccgctcatcgtaatttcgccctcctttcgcacgacatggcgacccttgaactcgtagatcaggtcgtcgaccaacttcatcgggaacgagtcagaggcgagctcatcgtctgaaattagggttgtccaataagcaccgttataaaaatctgtcaatgcccattttttaaatcccccttttcaataaaaatttaggtaatgtgaagggaaaaaagtattgttgctgcttttttacacttccaatttgcggccattggaaaagggtttgttataaacagcgtgtcaatttaccacgggatgactcgtttagcaccacaatcgccagccggcaaaagacgccaaactaaaggcccatgcacaatcagtaattcttattagcaaaaatgttagtaaatttcatcaaaatcacctattatttcattttaaatgttgaattttcaaattttcccctacaatttaaggtgaaaaaaatgagaaaaacaccttgcgactttcttcagaccgcgggtctaacatgttgagaagagcagccgttttttgaacggatttgtcaaagaaatcgtaggtggtcaaattccgtgcggtcgcatttaacagagggagatcattgggctgaaatcgggggaaaaaaatattcaaaaaaaaaaaaaaatttatcgagacatccaactgaaaatttgttaaactaataaataaactaaagttaaccatccctctaaaaatcaaacaaagcaattttcaaaaaaaagaagattttttagtaaaaagagaatattttaaattttattaaaattttttgagaagcaatctaaactaaacgaacagatgaattagtaaaataaaaacaattaaagtatcaaataagaaatggttttttaatttaaaaaagacaaatatttcatattgaattattaccgtttttggctgaccgatcaccagccgatggagcaaatcggctgcaatatgagtggtcattagcacatcatcgacgggcgaggcgctggagagaatgttgaaaatgcagaggaaagtttgggaaatattttggggactgtacacctgaaaatcaaaaaaaaaaaaaatttgtaaaaaaatttttcgagtttttacggtgtctcgagacttttcgtccaaatagccaacaaggaccaacgcactgacaacgacggccttaaaaaggaagaaaaaacaattaaataatttaaataaatggaaataaatgccttcgaattgtgggacaacaggtgcaaaattcgggagcaaatactcttgaaggagtcctaaaaaacgaaaaattaaattttgaga

SEQ ID NO: 7942 - DNA, 1080 bp, Heterodera glycines
  unsure (1)..(1080): unsure at all n locations
tgatcatgttgtatcagttgaaaacaatgcaaaanaatggataccctggaaaagaaccgaaacataaattttcaagttataaaaaatggcgagatatttgtgagataggctttgattagccaaattccaagtgaatttgcttgggcaaagagaaagcaacaattaatcaacataaacaatggcccacgagcggacaaacaaatttcattaatcaaacagtccaaagcccatgtcatcgtcggattcctccttctcctcctctttctttgccggggcggcctcctcctttgcatcgggggcaccaccggctgccggagcagcggcggcaacggcggaaacaaatttggacggatcagccaaatactctttgacctaaacagttggaataagcaacagcaattctggttgcatcgctttaaagttgtcgaattaaatatgtgctattgttgacttaaaccgaaaaggcaattcttggggattttcgggatcgaactgattcatgaatactgcattcatttcgaccaaatcccaatacttaatcctaacacaaagttaaagaattagttttgggattctcgattttttttcgaaattaggcttataggttagaaattgggaaatattaaagccagccaaattattgatcagttcaaacccgaaaccccctgggaacatatttcacgatttccaaataaaaaaagaaatgtcgacttttgtggcgaaccagtttttcgttcatctaactaaaataagcacatccatccatttccccaaaccttttcagcctctttgaacgtcacgtccgtttcggcagcaacggccaacaagttcttgaaagcattggcaatcagatgaggcgccgatgccttggtcgggtagccgatgccaagtgaaagtgcggccacattgagcacaccttgttggaaacgtgcaagcagatcagccgtcgtcacatcaagcacatcgggcgagtaaacagccccattgtcaaaaacctaaaagcaatttaatcacaaaattcggtaacgagtctcgaaagatgagttttatgcccatgaaaatcggtcaccgattgattga

SEQ ID NO: 7943 - DNA, 3593 bp, Heterodera glycines
  unsure (1)..(3593): unsure at all n locations
atttttcaattatgattttttgttcaaatttagattaggaaatcggaattgttgtgatagtcataaaaatttattctctggggcttttggggtcctcgatcacgaatccttcattttttatcacaaaaaaatttttgcaaaacaaaagggtccccccttttgaaaaaaatttcaaaactggtcacttttaatatagcgcccactcagtcatttattgaaggaattcttgcaaaaaaaagtaagaaagattttttcgtccagggaagtttcttttttattatatttaaaactaataaagaaaagggaatgtacaaatgggtcaatagaaactgaacgcggagatggacggcgttgaggtcaatggcggagaacgtcccgccctcccatggcggaagaaagaaaactcagtcaattcaccacccgaaacccaaaatgatgaattccaagcttcaaaaaaaacagtaactttgaaaaattgattaaaatacctcagccctagaaatcaaacttcttcacattgtgctctccgctttgatggacggcaagccatgaaaattttccgaatgcgaactataggatgtctctacgttatcttcgtgttgattgctgttagtttgattcagttggtcaaatgatagaggcgatttaagccttttggcacttaatttctcctgaaaacttagaaaattcaacataactctctctctaaaagacatatttctgtccgcaaaataaacagaattaaaaatatgtacacaaagaaagtaatatatataaaaaattgagcctgaaatagtcactgacgaaatcgttcactgacgaaaatattaaccacgaaattgccacgggttggggtcaattccctaccgccgattctctaccggccgattatgaccattcatactttctcacaagccgaagtaaaaaatttttaaaatagggttttgtctattttaccagctttatccagtccacggattcttaaattagatcgagaatttttttcccgaatttacaattgatttcaaatcactttgtagggcttccagggcccgaaaatttggaagtaaggcccggtttaactattcaaatttcacccagcaggtactgtaagaatccgaagtccctgaagctccgagaattttgagccaggtttcgggttcccggaagttacggaattgggtttaaacctatttttgggtctgttcaaaatttgaaaaattcagagatttgacacttctaacttactttaaaacgatcgaattctgataatttggtatcttccgaaagctcttgacgagcttagtctaaaaagcagtgaataaattttcttgtatgttttaatctcaatgtttatcaatattcaatacttttggtatggaaatggcccaaatgccttagtagggaatcggcggtagggaattggctcgatcccaattgccacaaagtgacattatgccattcacagtatatttgtcgtttgtcgtaaatttctatcaagttaaccgaaaatttcataaagtgcaaaaagcatgaaaaatgataaaagtgtctttttatgtgttttttgaggcgtagattctaaatataacatttatttcttcaaattccaatcatgaacacgaattcaatagactttgataactttatcaaaaatcattgataaaaacatagataatgaaaatctgagatcggattcatgatcagcgactaatttatccctaggaacataattttaacatgaaatacaattttttggatgaaaattatgtggtggtctttttgggacatttctcagacgacaaatttgaggggtggtgttgagcgccccccaaatatttggcgtttgtcgtctgaaataaaatcagaataatagaagacaaacgcctaattttagacgacaaacgacaaatttcgggagacatacgacaaacggcaaaatttttaattctgattgatgaaaaacgacaaacggcgtatactaacgacaaatatatcgtttgtcgtttgtctctgtcgttggtaattctgaaaggcnccagccaatatttatctgtcattgttaaaactgtcaaaaaaataaaatcacaaatgaaaaaatgtttcaaaaatgccgtggttctttgtgttgcctttcctctccataccgtaccccccctccccccacagtacgaattgaatggaaatgtttaatcaatcgccaaaatgttcacagtcaatcaaaagcaagaatatttctttctcttcacatgagtcgattatctctgctgagcagtgctctgcgtgatgcgttccacaatttgtaggagtattcgtctctgtacggctcgtaaatgcgccggtatatttcagtacggtcggacggatacctttgaaaaagacaggtaattagcgatatggtagagcagcaaatggttacagttcggtgcaatacgcccgtgaccaataagtgtacggtatggcggcgtaatcactgaaaaaaaattgataaaacaatggagcattatgctaaagcattgattgtggcataagttgaccaaccgacggtcgaatttttccaagaccggaaaagtacggtaggaagtgccgaaatggaaccaatcgtccgcgtaggacacatcgtcctgaaaaggccggtcttagtcacttctctaccagagtaataaaattaaccaagcaatttgttacggtaccaaacgcgactgtcggaaggtgcgccaagaccaagaacgcattttgtaggagagtgccgtattcggagagggggaactgtcgccgacagcaaaggatcggctcaagtcggcctttttagtggcaatggcatttcaacaaattggacataaataggcaaataccaaagtgcgagctcgcaattgcaccgcattttgacgaattatcggctgatcggcgaatgggccgatggcaaacgcactcatcgctacggtatacagtagtaaaaagggaggaacacaaaacaaaaagtacggtgatgggcgaaaacccaaaacataattttaaacatttttattattattatttcgcgttgcttgttctataaatgcgtttctctacagtatgctacagtatgctccgccattgtttttccgccggtcaatcaatgttcgtagtaatgcaaatcgaattccttcgagtaaaacgacggatttgcatagtcgaagctgaatagtgacttgaaatggcagcagcgaaagtgccaaacactcacagatatccccggtgacgagcccaatacgggtaggggtaagtccagaaatggttgttggccatgtaatccctgaaaatggaacgaacagtgaattgaattccgaatgggaaatggcacggcacgctgcactcacactgagggtttgtgcttgccgaacaaatcgaggcggcgcaatgccgagaattggctgtgcacgtcgtgccaaaacacctcgtgctgagttcggaagggactggttcagcagagggacggaaccgaaattcgaacactgaccgaattcggatcggtaaggtaacggtagggccagtaggaatacgggttggaggacgaatacaccgaccttagggggaggggggggggggggggg

SEQ ID NO: 7944 - DNA, 1830 bp, Heterodera glycines
cgttttgggaaggaaacgtcgccccggggggtaacgacgctttccttttgctcttgggacatacgtctcggtatttgccccagtggggcttataacggtcggacattcgcacatggcctgtcatgtcgggcaccgtccgcgtacgggcacagtacccttgcccttcgggaaagccctcaagcgaaagctgaacgagagaacctttggttgggagagagtgcagagaaacagagtcttacgtaagaatttggacgcacttgggacattctgcgacaaatgggaattcactgctggaaagcgaagaatcaaaagggatgaatggcagtgggaaagccaatgggaaaagaaaaatgggcaaatggaaaagccaatcaaagcaactgggaagcgaaggggggagagggaggacaaatgaatgacgaacacccacacactctctccctattacacacgctctcacactcacactcagacactatctctctttcacatacaacacacactctctccaccccctctcacacatctctcgctttctctctctctctctccgtctctttggtctcccacttctccacgctctcatcatcagaagtctcttactctgttaaactccctcgctcccttttctttctctctttcccttcccgtctctcctccaaacggataatcactattaatctttttaagcaaatttaaattttcacatttcaaaattcatctttgtgaagaattccgctgttttccttcttcggttcttcctttctcttttccggatttagccgttttgtccgtttcagtctttcgctgtgattaaaatcgcttccgtaccattccctcggggtaattgaacggatgagccaacgcatgggaccgataatggtaaggacgggcgaagctgttggttcgatggtcaaagtatggccgataattgggaggattgtcgtagtcgaacataaaatggcatcggttaatttgacattgtattggctaattgcccaattaattcattaaatgccaactgaccatttgccttggtaagggtatgcccaaaagctgttcgggtagtgccaatagttcgggttcgccttataatcgctaaattcgaattttggcattttccaattatttctcaaattaccaatgtttgaagcgaatggggaacatgcttcttttgtacaacggcgaaaagtaataataacggtcgtaccaatacgcatttgactgtaaaagaaaggcaattagaaaaggaagacagaaaaacaacggacgcaccaaagtgtacccgcggtaattacggtaggggaaatagccatggtaagtgttgtaagtgtacacgggcatcgacggacggtacggtccaattgcaccctgaaaagcagtcaaaatgccaaacgcaaaaggaaaataaaaaagggacggacgcgcaccgaatagacgcggaaattgggcacggagtaggagcgggtcagctgaagagtcaaatggatggaggagacaagtgatcaaaaacggatcaccactgaccatatttgtgtagccgggcgcgcggtttgtgggcggaagtgacgggtaaggcactccgtcgcgcaccgccacgtcccacagggacccggtccgctgcagtcggttcacttcctcgggcgtctgttccggcacaaccaccataatggtctagaaaaagccaaaatcggatgtatcaaactaacaaatttcaaattagcgatttgagagggattgaatcgatcgaatgccaaagagaatcccccgccctccgatcattcccctcccttccaagccttccgatcattccccgccctttccctccct

SEQ ID NO: 7945 - DNA, 3174 bp, Heterodera glycines
  unsure (1)..(3174): unsure at all n locations
ctcgattagctcctccttttcctctcgcgttttcaccccatagttttcatcgtacacctcnttgctcaaacagctcacggaactccccaatattctgttggatgtgcgcggatgggttaaactcgggcgcctcccaagggagctctgagtgccagacacggtacttgtgtacagcattcacaaagtggtaatcatccgtttcgtgcagatagtgtacgtctggggttgggtctttgccgtgaaccagcctcatgtacccacctcgccaaggtctgaactctttgagcagctccaactctttttgctttcttatggcctgttgctgtcgtttaagctcttccaactgcttttcctccgcttgctttttcttggtctcgttttccgctctcaccgcttccgcctttgccgctctttcctcttctgcgtttgttaccattgccactctctccgcttccgcctttgccgctctttcctcttctgcctttgttaccattgccactctctccgcttccgcttttgccactctctcttcctctgcctttctttcttttgccactctctcatcctctgcctttctttcctttgctactctctcctcctcagcctttttatccttggtctctttatcgcctttcttttcttttgctattctctgctcttccttcttttcccgtgccagtttttcctcccttgccttcttttcacttgcctctttctcttcctttgccttcttttccttggctgctttttctgcagtcttccttctatcttcttctgtcttacgacgcctctcctcttcttctcgccgtctacgttcattttctcgctgctttctctgctcctcttcccttcgctttctctcttcttgtgcccatttttcatgccgcaacgtttcttgttgagccgctgattgcttggtcaaatatgaaagtgggtttaagggcgcttcgcccgtattgtcttcttcctcctcaacaaacgagacgtcaagaatctcgccctcctcctcatcgtcgtcgtcaatgttcccaaaactttcatgcaccggtgcggacctttttcgtgtcaacagccgttccacttcggcaatcatgccatgatgaattcccctctcaagctgctgtggcgagagaaaacttccctttggcacacggaaacggtattttcggccgtcgtgcaggtgaacaatcacatattgtcggtctgatgtacccagctttgcccaacttaagtcaaaaatcgaacccaatagccatgattttcgcccacctgtttgggtaaattatgcctgacaggccaaccatccacccggccccatcgaacaccaacttctttggcaagtgcactttgaatttgtttgttttatttccaacaaagcctggcgtattgctcggcaaaattacaaagaaagagtttgtcatttgatcaacaagtataaattcttcaaaatgagatcgtccttatatcgtggtgtgccatctcggttcactttcccccatctttgatccagcggaaactctttgtcatcgtcgtcgtcgtcgttgccggttcatccttctttaggtgcttcatgatcagatcggtgcaatcaaagttcagctttgcacagtcttggcaaaacgattgggtgaactcaaggcgttgctgctcgccattctgattgatgagtttgaatcggctgttcccctgccggaaattgtcatcacgacactctttgcacatgaacgtgaacactccgtacttaagaaattttcctattttttcaaattaaatattagccaaaacctttgggcgggccaatttccaaaatatggtcgggtactcaaacacattggtcggttgttttttgggcgattcatccactaaaatttggctaatttaaagaaatttgcagaaaaagccaaaccttcagcttccatggcttttactttcttcattgcggaagcaatttcctcatggattttgtccaagcgaggcttgcgtccgctttttgagggccccggttgcaggtcaagcagtgtttgagtgttgttgtctccaattgtgatgacgtcatcatcattttgaggggaaaaattttcccgtttcgactcatccatttctttaaatttaaaattattataaaaaacccaaaaaatgattacttttgttctcaaacaccaattgatcattgatttttctcgggccattacgattaagaaatagtttatgattataattgttaaaagcataaaatgaacctgcgaaaaaacacgtaattattgattgatagtgagaggggtgttagcgcgcagcgacctccagacgggctgtcccttttaatcgataggccacgcccatccacaaacacatagacgagagtgtagtggttagagaaagatacaaaagggcgccaattcaaacacacagtgaaacccaagccaatttattgattttttacagattatggtactccctctgactgctgccctatccaaactgctaaactgtaaacccgaaaatttagcagaatatttgaacaaccccgaggcggtgaacaaagcgaacgcttacctggccggcaaaaaactcaaaacaacctaccagggtcgtgattccaagaccaaagaggtcaagttcggcacattttcggtgaaagccgctgcggaaacctacgcctttgagggatttcttggcaagtttccaaaaattcagtttcggtctaacacacatgcgttcagaggttaaagtccaccagtatttctacataaagcaccggatccgcctactgtacccacagctgaagtgcattgttgagtaccacaacaagggccactgcaaatactatcccttgggtataaaattttgtccggaaaaaaatcaataatcattttcagagttgttggccgttgaggagggcagtgagagtgaacccgtcgaaagacctgccgctgaaaccgactacctggactacttgaactttcgcagtgggtggcaatcaacactctactgatcaatgaagcgtgtgcggcaatcggaaaagttgggcgaattcccggagattgagttcgccgtcacacaatgggcgtcacggtgtactgcccgcggcacctgcaaacgccctcggtttgtgccatgggaccagccccggggcggtgctcgagctgcagaaagcggaactgttgagctggacta

SEQ ID NO: 7946 - DNA, 3883 bp, Heterodera glycines
tttttggggcgattcatccactaaaatttggctaatttaaagaaatttgcataaaaagccaaaccttcagcttccatggcttttgctttcttcattgcggaagcaatttcctcatggattttgtccaagcgaggcttgcgtcccctttttgagggccccggttgcaggtcaagcagtgtttgagtgttgttgttgttgtctccaattgtgatgacgtcatcatcattttgaggggaaaaattttcccgtttcgactcatccatttctttaaatttaaaaaaatttaaaattattataaaaaacccaaaaaatgattacttttgttctcaaacaccaattgatcattgatttttctcggggccattacgattaagaaatagtttatgattataattgttaaaagcataaaatgaacctgcgaaaaaacacgtaattattgattgatagtgagaggggtgttagcgcgcagcgacctccagacgggctgtcccttttaatcgataggtcacgcccatccacaaacacatagacgagagagtagtggttagagaaagatacaaaagggcgccaattcaaatacacagtgaaacccaagccaatttattgattttttacagattatggtactccctctgactgctgccctatccaaactgctaaactgtaaacccgaaaatttagcagaatatttgaacaaccccgaggcggtgaacaaagcgaacgcttacctggccggcaaaaaactcaaaacaacctaccagggtcgtgattccaagaccaaagaggtcaagttcggcacattttcggtgaaagccgctgcggaaacctacgcctttgagggatttcttggcaagtttccaaaaattctgtttcggtctaacacatatgcgttcagaggttaaagtccaccagtatttctacataaagcaccggatccgcctactgtaccctcagctgaagtgcattgttgagtaccacaacaagggccactgcaaatactatcccttgggtatacaattttgtccggaaaaaatcaataatcattttcagagttgttggccgttgaggaaggcggggagagtcaacccgtcgaaagacctgccgctgaaacggactacctggactacttgaactttcgcagtgggtggcaatcaacactctactgatcaatgaagcgtgtgcggcaatcggaaaagttgggcgaattcccggagattgagttcgccgtcaacacaatgggcgtcacggtgtactgcccgcggcacctgcaaacgcctcggtttgtgccatgggaccagcccgggcggtgctcgagctgtagaagcggaactgttgagctggactacatcatccagcccgagggggtgcccatcttttcgaatcggctaaagacagacggcgagaactttgtgccgtttgatgcaattggtaagctgcaggtgtatgtcagagtttgataagtggactttgccgatcgtgcgaaattccgcattagggcccggaacaaggtgttcacgctaccgctgcgacacccggaggtgcacgccgccggcccaagcttggaagacggcgtaaaagaacaaaaggaaatgactcagatggcataaacacttgtccatttttctattgttgatattctgatggactacccaagaataaatgaaagtgaactcgcttttcccatcccttcggggattattgtcagcggtccgtcctcatcgggcaagacccagctggtccttcgcctgttacggcatgccaacgtgatgtttgacccgccgcccaaggcaataggtatgtgcaaagggggtttctgtgcagtgggctgttgctatttagtatgggcatacggtgagtactcgacgcagattcccgatctggagcggcagggagttgtcccccacgcaggtgccccgtctgacgagatgctgaaaaagctgccaaagccttgtctgattgtttacgatgacttgatgggtgacattgaggccaagaagctggccgatctgtacaccaaaaagtcccaccataacaatttttccgtgattttcctcacgcaaaacctgtttgataaatcaatgcgggtgccaaggtccaacgcccagtacatcttcctgatgcgggctcccaacgacatgcttagcattcgtaatttggccagccagatgttccctcgcgagcagggattcctgatggatgcctaccgacaggcatgtgccctaccgtacggctacctgttggtgactctccacgcgaacagagacaacattatacgcctaaggacaaacattttcccagacgacgaggagagaatcatttttgccctcaaaaatggttaagcgggaacagaagatcggtgagcgggttgtgcacaactacgactatttgaagaagttgggaaagacaacgtcggagaagaagcgccgtcatttgttgaacagtgccggttgtgaggaactgttaacgcttgtcgagatttgtctcaacgttttgaacgggagtttctgtctgagcaggaaacaaaagcagagacttgagccatttgccaaagacatcagacagttggcacgtgtgcgaagtgagaggggtgcgcgaaaactagtgcagcagtcaggcggatcactttttgcccctttgttggcccccattctgattgaggctgcccgatacctgctttcgcgcagcaataatggccaataaacttattctgctgccgtacgagcactacaaggggctggttgcagcgagggagaaaagaatgacgacgacgacgacgacattgctgagcggacaaacttggctttgtcaaacgacaagtgaccgctgcagtacagaagcggaagggaaacgtcagcgaacggaacgcaatgtacaaccagcagctgcgccggtacctaaagatgcgcaaggaacataaggagcggccgcccgtccgggtacagctcagcaacgtcgctcaactgctaaataaaacagtggagacgggtgtgcagcaggggtgcgacttgtctcagaaaagacgagagcgagagtttggcgagaggcgagagtccccaaaaagacgagagcgagagtttggcgagaggcgagagtccccaaaaagacgagagcgagagtttggcgagaggcgagagtccccaaaaagacgagagcgagagtttggcgagaggcgagagtccccaaaaacacgagagttggcgagaggcgagaggacgagaggcgagagtttttcaattttttctgtagccttatttttaatttaaaaaacttcaaaatcgtatattaaattaggggtacgggcctgggtatttgggcaaataccgggtcagggtattgccgggtacagaaagccgggtcagagtcctagtttttaaaccgagtccaagtcatgaaaaatccaaacaaaaatctttaaaattttttcatgaaaattaaaaaatattttcatgaaatatatttattttagaaacaaactttattatttttccatttttccaccttttttttgcggtgcgttttttaaaacttcggggacagttggggtcgggcggtgccggtaggcgccgccgaaaaaattttgaaaattgtcttcggatttgttaacagattttattcaaaaaatgaccaaaacttgttttttaaattttttgtttttaagtcgctttttttgtggcgctgtttttccaaaaaaaaatttttttggaacattgggtgcggggtccggcggtaccgaatcggcaccgccgataggcgccgccggaaaaattctaaaattttgagtgtaatatattaacagaacttgtcaaaaaatgatcaaagttttggttaaatttgcagttttaggctgtttaaaaaaagaaaaaataataatttttaaattgaa

SEQ ID NO: 7947 - DNA, 962 bp, Heterodera glycines
ctgagagggggggggggcgtaaggtgccgatacttttgccaattccttacatttgcttttcgttgggcttctgggacttggccatcgctttcatcatcctgtaggcgtacgcctgcacttccttgttcggctcgttcgcgatggtgtacatcagctggtccaccacgtgcggctccggctgcccgttttcgttcatcagattggcgaacgcggcgatgcgcacgtgtggctgttcacgcgtgttcagaaagactggcagcagtacgctctgcacttcccacggctcggtcacttggagacggcgtgtcgcgtgaatggccatcacgcggaccacgcgtggttcgcgcgggtccttgatgatgttctccagctccttcagtgagttgtccatgcccgcgttgccaagtgcgctcagtgcgactattttgtcgtaaatgcatccgctgttttggtacactgccagcattgcctggaattaacaaataattaattaattacccaacaaatttcattgtgcccacctccttgtacttctgctttttgtccattgggcattggcctttcttggagaagccggactgcgcacagttcgccgtttctccggcacattcttccgcattcttttccgtcttatgttggcacacttcgttgaccaatgcgccgaatgtcagccaacacgactgtttggtggtcggctgactttccaccggttcggagctgcacaactgctccatctcctcgagaatgttgtccgacggtgccggcagctgagtgagtgcgagcagtgccttcacagcgtttgcttgggacacttgctgaaacggggggtgcttttcgcttatttttgtcatggccaattgttcaagtacccactttgctcttgatccgttttgccagttccgccacacagtttttggtgccgcactccgccaacccattgacgaacatctgcttgcactgct

SEQ ID NO: 7948 - DNA, 2155 bp, Heterodera glycines
cgaaatctgcttgcactgctccttctgttgtccctctttccctggacattgcctttccacttggttcagttcctgttgtgtgcacatgcgcaacatttcgacaaggcgttgctgttggacaggcgcctgttggtcgatgcccttcagtttgtcctgcacgttctgcaccagtttgatcagtgcctgctgcgcctgctgcacttttggcacttgcgcaaaaggcgaaccctttccatccgtgccaaagtcgtcgtcaccgttcttcacaaaaaccaattaatttattgactttattcggttgccaacggattctgaccctgtaaaagcgtttctcatccacttccttgctgttggagtacatcagcgtctcttccgtgctcgcactcatcgccgggatttgctggtatgtgtgtttggagtccatcgcatgcaatgtggcggcaacgatcgtttgcatggcggcaccgtagtttcccacggcactcttcgagttacggtacaaatattgggagcgcatctcgcagctgtgcagtgtgtactgcttggtgggctcgccttggatttgacagcgaatgaccgtggaacggtccaactaaacgcgaaaagagttgttcagtttgctttttttgttgtaagctcacctcgtgctctttcacttccttcgggtcgcacttggcacatgggttctgttctccgttttgtgcgttgtccgtttccgagtcgctttgctggagattttggccactctgctgttgagcccaataccttaagttcggctttgttccattcactttttcatttgctttttactgttggcattgtgcacattgcgcctgcggtgggtccgtttggaagccgttcgctacgtccgcgatcttctggcacttcttgaagttgatggtctttgtgacgttgaactgctgtccgctccatgctctgttgatggtgtacgtcgtttgacatgcgccttccaatgtgatctgatcggggcattcattgtgttttgttttgcggttgatcagtttcgaacctcctgaatggtgaatgatttgccctgcttcgtctgccacgactctttctccgccgtgttttgctgtcgttcgtcgtttctgctcaatccctgcgcgttgttgcgcttcaggttcagcttaacacaagggaaggcagttcaaagcgaacaaacagagaatgaatgggtcactcacctggattatattcagcaccgacttcttgaaattcttggtccattcggtttcgtcttcttggcactgcacgcgttcgatgactccgtctgcgctggtgaattggcacggtttgtgcagctgcagctttgtctggcttggtatcggcgtctaaagcatttactgacatgccaaccgaccccacacacttggccaatcacctgctcaaacaattccatcggctgcacctcctgcgcttccgacatttgctcattttgctgtcccgcctgacactcttccaattgcaactgtccgtgtcgctcagaagcgaattgaatcttggccaggcattggatgcgcgtcaccgccttttgctgtgggttcgcagcattttcttctgactgtaaccccgaggcgatctgggcattgtagatgaatgtgtactcggtgttcttctgctggaatggctttatcgctgagttcggactgttgcgggtgccaaaattgaggaagccgactcttggcgaagtgttcgggaaggtgcgtcggccggcactcaaacagagaatggcggcgacgagggccaaaagcgcgaatgtgcgcattttcgatgatcaaagatggacgaggtcggaggtgaagtgtgttcggtgacttgaggtgtttctcttttcaatactccacaggaggggatggaattgtttggaagtgatctcttcggctagccgggcactatttatacggtccgattgcccccaaaggcgtcggacagtcgcccccgggaacgaaatgagagataacgaagcacaaaactccaaagggattgacagccgacccccccccccccctccattgactttgtctccaaattgacagttcctccgtttaactgatagaagagtccattcgttgttcattcactgttttgcctccctccctttccccaaagtggcgcctttgtaatttgaaactgc

SEQ ID NO: 7949 - DNA, 1089 bp, Heterodera glycines
taatttgaaacttgcccatccaaaaaggtttttattttggaaagatttaaagatttacaattttttatatttttttacattttaaatattatttttttattgtaaaaaatgaattatttttaattcactttgccaacaaaaaactaccgacctaaattcaaaaatctaatgatggacaaaaatattcttgttgcttttaatcactgctttaccttttgttttttgcttaccgggattttcctttttttattaagtttattccgttacagtgaagataaaactaattaatggacccttttcaccggaacgaggctaaagttgaggtcgccgttgagccaccaacggcgatagaccaacgggtggacgacataatgcaaacgggcagatttggagacggccgattggtgaagatggaagtggactatagcgctcaagtggacagtcagttgatagtggcagacaatttggccaaggtatttgcaatggccaagcaaattcagtgaggaaacaaagttttttcaggaggggaagactgccgaggcaattgagtccttggaaaagctggaaaaggacagtcgcataaattgcgacatgcgttccaaccagcgcctgttgtgccacatggtcaaattggcatttgacgcgaataattggcaattgctctgcgaaactgcgaagacattgtgcaagaagcgtctgctgatcaagtcgagcatcaagaaaatggtcaagagtcacgcaattctttcatctgaaccgcaatgacaccaaattaaggtccaagaatgctgcgaaatggtgccaaaagcgccagacgcgtcgtccaaatcgacgctcatcgacacactccgcgcagtgactgcgggaaaggttatgaaaaagcaaaacaccacggaaggaaataaggcattttattttcagatttacctagaggtcgaaagagcgcggctgaccaaacaagtggccgaaaagttggaagccgagggaaaattggacgaagcgcgcgaaatgatgatggaactgcaagtggagacgtacggcacgatgcaaagaaaaaaaggtgccattgggcaattcaacgaacaatgg

SEQ ID NO: 7950 - DNA, 2702 bp, Heterodera glycines
aagaaagtttggcattgtttaaaaaaggcaccttttagtttttttattattgagagagttacaattagttgtttttaagttgtggtcataataagtcgtgaaaacttccgctggattttcggggtcgctcttattgccggaagttcaaaattttttaaactttacagaattaaacttttgacattaactcgaaaaactcaaaaataacggcttaagattttgtaaataaaataaatgtaaaatcattgtttggttttgctacagattctcaagtgtgtcgtgttttacttgctgctttcggctcatgacaacgaaaaatgggaacttttgcatcgagtgaatgcgatgagagaattggaacaaatacccaaacacaaagtaaagaaatacctaaatatcaagtcacaaaaaggcaacatcatcacgttttaggaactgctggaactgttcatccaccaggaattgatcttttggagcaaaaccattgagtccgaattcgccccaattttattcgctgctcaaccgccggtcgaagtcatttcggattcgtttctcccgtccacccacgttgtttttcgcacatttagcatttattgttagtttttttaggtgtttccgatgaccaaagaggatggtcaaaagcgcagagaacgccttcatgactgtgtgggggaacatgtgagtgattggaaacccaaaaaacggtggcaccgaagcgttgccattaaaaaaagttgtcgagataaaacccgcctgaaaattatctaatagcctataattcttaaattttcgttttaaattttatcggcgacgttttgtcccggcaacatttcgatggcgaatttgcattttattatctttgaggactccccttagcttttgttagaatgtgcgaatggtggccaaatattactcgcggatcactttccaacgaatggccaaacttctcgaattcggaattgaggtatttattttgcattttgtttatcacaaaaattatcattatccaggaaactgagctgttttctttaaatttgttctaaaatgcaaacaaaattttaagaaatcaattagttgtctaattgtaagtacatctagaaatatttaattgacaataataatgctttaaaaccactttaatcatttttttgataacttgaactaaaacatggtcactcagaataacaaattctgaaatgttatccagaaaattcatcttaacttggatttcttggacaaaaagccaggttgccgaaaaatggactggacctggatccaggaaaaatccagcccaagtcgaactctgtttattatatttcagcaaatggaagcctttgtgtgcaaaatgattgtcgacggagtaatccccgaagtgaaaattcaccgcccttcgcaaattatttatttgagcccgaaaaagaacggcgcagaagtgctggacgaagttagaccattttatttactcattttgaaacattttctgtttagtgggtttttaacgttcgcaaattgaccgacacaatgaacaaagtcagtcagctgatcgcaaaggaggaaatggttcacggattgcaaatttctcagcggatttgaccgatgatatcgatacaaagaatcaattgattgttttattattgttttcccaaaaaaataaacgaattttccgtatttcatttttttaaacttttaattttgttagtttaatattgttagttttttttcttcattattttattttttgttcgtttgggtgatgaaaaacgttgacctcaaagattctcccgatgagtccgcggattcgatttcggtaggaaaaagcgggttttacaattagtcttttacgcgtcccatcattgggacgcgtaaaatgtgatgttttaagaaccaaaagcggaaataatcaaaaatgcattcagtccgagctgctgatcaacgtcatccgcacattgaccacgacggtatcaaatgatcagcgccaattggagaagcagcgaattgagcacggctacaaacagtcggaacaggtgggggaaatttggggattgacggacgatgagcaaacggacggaccatcccaatttagaacattgacaaactgctgaaaggtacgtgagggatttcacggttaatcggataaacgaaaaaataaacagaacaccgatcggatgctctccattgtctgaacactttccaatcggtgtccaaggagttgacgagttgtcgagaacaaatccggaacatcaagagttccctgtccctttgcaagtcttttcttcagtgtcgccgcgacgatttgaacaagtcggtcaaattttggctttattttggtgttgttttttcagattttggctcgaaaatgctcaacagaaaaaggtgtgcgacattctacagcaaatgttggcacttttttgtgtgccgtattttttatcgaattgccaatttcagtcagcaaataaaagaaactgagaaaaacatcgatgtccaattggccagcggagaatacaaagaagtgattcgagtgcttaaggatgccggtgggtctttttgtgataacaaagtaaatttaaaacatatttatgggtaattgcgtatatttttcagatgttttgctgaaaggaccatttgagaaaatggatggcatcagtccactgaaatttgtcgtctccgaaaatctgcagaaagtttttggccaaattgtcacc

SEQ ID NO: 7951 - DNA, 952 bp, Heterodera glycines
atgggcgaggactgttggtcggttgtttgtggatctcgcgacttttctacctgattgaatctctttctttcccttcagttctctcagtgcctatttgcaaacttttgttgcggaggccttcctcgagcagatccgtgtcgacctcgaaaaacagacggagtccgttctgaatgggcccgacatttggtcgtccatgtccgatgttccgcccccatgtccagcgcgtattaagctgttgtgtgcgtgtgtttgaactttgtgagcggatcaacggttacatcgtcagcatggagccgtacgcactgcggtaaatttgtggacggagcggcacttttaatggaaattaattattgtaaaggttcgcctctttttggctgctgatccttgagcatttcatcaaaggattttccgataaatattttcaggtgccaactttggggaaaggggaataaatggacaaatatcttacaataataataaaaattcatccaatttttatccgacctctgttctcattgtgacagattgttatgctgcgccaagttcactcggacggaggttggacggactacccaaaactcagtgccgcttgggtcgttgacgaggacatcagccgtctgctgatgagcttgccgagttggtcggccgtcaaaaagtcgcccttttcacccgaccaagcccaaacaccgttcgctgccgacgtcgtcaatttgagcagcattttgggcgagagtgaacaggaaattcgggagaggacacagcgcgagtccgaaattctgatcggaaatttgggcacccaaaagaaaccgaagagcagcgaattgatcacttcaatggagcacatcaaagtgttatttgggatcaaatgagaatgggagcaagcacctcaaccccctcccctgagaaaagttaaaaacaaatctttttactttttttaaaaaattaccggaga

SEQ ID NO: 7952 - DNA, 2554 bp, Heterodera glycines
ctgtgcttcattgctgtttatttcgtcacaggtcaacagaaaataaaatatgccaaattgttcctcaacccttatttctattttagcttaattttaggtgctttgtcttggtggacaccaaatgtcactaaatacgcatggcgagtcgttaaccgggacagtgtcagtcctgaatggttaaagttacacactttttgcgcaattaaccatcattttcaggttctcttcaatcgtcggtgtcattgtgagttttttgttccttgtaaatgcgttaaatttgattctcattatcagtttatgtttggcggtctttttggcgtcccgatgggctcttcgatttcaaaatgctgggccaacggcttttcatttcattgttttcgcgttccaccaaatccgcgtgccgacccgctttactgcgctgtcgggcttcttattgccgtgcctttcctttgggtcggactctttctgatgcttcattttgcccttcttttatcatgggtattaaaattagaattttttccaaattcgatctttcagatttgtacttttgttgttattctcttccttgcctctaattactcaataacaactgatgtcattttggtcacaccttaatttccgttccctttttaaatccccccattttaagtatgtcactccaccaatccgtcgttcttccgctaacgccatccaaatgctcatttcccatctttttggggtgaaatgtgtgggaattgccccacccttcatgtccatggctttaggatgccggctctccttacatcgttggaatcgtatcaggtcactgaaaaatgcatgtttcctccctaacaataaaaatcacagatggtctcaaagctagccgtggtcccgccgtccaagcggacatcttcgagttttacgcccttcgcgatgcgctgtttctcgtttcccttgtgcttccgattggcgccttcttttatttcatggctgcgctgcaagtcgaaaaggatcgtggcaagcttgagcagttggcggcaacaacacaagaaccgtcacaagaaaacttaagaatttgaaaatttcaacttttgtatttacttttgcattttcatttccaccaacacaaatcaaacataaatagggaaatattcccatgaaaaatttattgcaacaaaaatcggaaaacaattggttgaaagcaataagcgactaggacgatcatatcaatataatgtttcacctaggcctctttctcaaaatcgacgtgcgttagcactttgcttatttgctgtgccaattgcgacgtgctggcgcagagaaccttgcggctcattagatcgaattcagctcctaaaatgaagaccatatatcacttaaaaaaagagtaaaacccgtcgggtcggtgacagtccctcctgcttctttcactattacaactgccgcagccatatccctgaaggggaaaaacgaaaaaattaatattttaaaattatagcaaacacaactaaacgaaccaagaatggatgccgtactccacgtaagcgtcaagcgaaccctgagccaagaacatcttaaatttaaagctaaaggggagccgatgataggatgagtcagaccatgttgatggcagcggaaccaaaagagcgatgcctaaaaatcttttaaattgaagttcgtgaactttaaggtcctcatttataaccgacccgtgcacatttcgttcacccagcaaagtgcggaaattggaaacgaatgaattcatttgggcagacgatcgatcagagccgatctgagaaacgagcaaagcttgctcaaaatctgatgggtggtaaatcgggaataatagagaaacaacgaaagatttggaactattttttattatttattgttagtgtggggaaaattggtttttttgcaacaacgaaatgtacacattaagcgtaagtaatcgcagaccccctaaacatgcacaacttcagtgatcgtgaaattgatgactcaaaaatgaactaacgtacccgtgggtgcccgaaagaactgcggagcgcaaattgccgaatgcattgtccaaccatttttctcccttttctttgatgttatgctgaccaaaagtttgacaaataacagattgatcaagtgctaaacgaaacgatcaatgatgaaaagtggttagaaatgcataacagctgcgctcatataagcaattattgttgaaaccaaaattacctttcgcggatgaaactgaaattggaaagccatttttcaaggcgcctttcccttcaattgcggtgtatagctcatcagtgattggattgaaaacgatcccagcacagagagatttgttgatagcaagaccaacacaaattccgatgaatgggatgctttgggaataaattggtaattccatgtgattattttaattgtaaattaccgatgtacaaaattcgtcgtaccatcaattggatctatttaaacagttaaagtgaatgaattgaatcatcaatgtctaataacacttgccaataatccatgtcggcgcatcagtcaattcgtaaagtattcctgccgcgac

SEQ ID NO: 7953 - DNA, 993 bp, Heterodera glycines
tttttttcttttttttttaaaatttgaataaatttttttggaaatggagcaattttacgtgtgggaagcggcccattccagtgttgtccagtgtagggtcgacaactcgtcgttccatcgttgcttttagtttcgacagtggtgatctcgacagtgaaagtttgtttttaaaaacttgctctatatggtaaagtttcgatcaatttgaaaaattaaaatcataaaggacaggctctattcattgcagcggggtttgccgatttttgaattctactataagaaagagcttgtagatatttgcatcttggcactcaacgccagcatttgttagcatatttatcccacacgattcgagaatcgtatataagattttttaataaaaataatcgtacgcatctttattattaccacatgctcaattctagattttgctatatgctaattgtatattgatcgtaattcatatgtacaataaatcacgtagaaaatcaactacatagtctctgtcgaatccaaccgctgtcgataacagctgctactgttttatctaacttatccttgtataacttattaaaatcgcactaatattttcagatattctctccgggtgctgtacctcgaaatcctttaaatatttgaccgcatcgatagaaataccttttctttccattcgcatattcctatattcgctctctgcgttcttcatctcatttcacgcataaaagcgactagaaccataaagaataggtagatatgatcattgatcagggtacccagatggaattttaggcaatcatgtcgatcattggtcccgaaaattttttctttaaatttttttctgaaaattcttataacacgtttctaggggtgttttgaggcgctgagcacgaatcaggcctccatttcgaaccctaacccgaattcgaacaaagtcgaaaattaaaatttttcgatttttagtctaaaaatagtttaaacgattttgttgtagca

SEQ ID NO: 7954 - DNA, 1361 bp, Heterodera glycines
tctttgaattttcggacgggaccgtccctgggtctctaaactaaagtcttcctcagtttaaaaaatctgtgaccgctcaaaaacttttaaatttattttttggcaaaatgtttgtcattatgggcataattgtttcaaattgctaatggtgctatactttttcgtcagtaagcattttcgtcagtgaacgatttcgtcagtgattttcgtcagcggataatttcgtcagtgaacattttcgtcagtgtactatttttatttattttgctgttttccatttttttcgtcagtgttccaattcgtcagtgaacattttcgtcagtgactatttcaggctcaattttttatatatattactttctttgtatatttttaatagctgagaatttattttattcaaaaatgggcttaagcaccataatatataaaatttgattatttttcaccacaaaaaacttaaatatttaaatgcctatttactttcaaatgaattcgacagtggtaatttcgtcagtgaatttgtgtttttaaaaaatgattaattcaatttaaaagtgcaaatggtaagcacaggcccgaagatattcaagcggatcacggtttccaatgtcctggaaaagagcatttaaattgttgtcttgtctgacatatttcccctttcttgctgcgtgtggcccccttattccatcagcaggcgcaatctgataatcaataattcgctgagaccacatctcatcttcttcaatcattttccggacaaaaccgctgagtcgctgatttcctttaagatgggcattccaaatggcatgccagccttcaaggctgttattcgtgcgtgaaagtccaagtgccaaacggtaaataaccctgtagctcagctgttggattgagggttgacaccacaatgcaaaagtagttataaacgaggccaataggaacaaatgccaatgcttgcaatgacctacggtgaaataaggctactcataaacaaacaaattttacaagcgaatttttcccatttttataacagtgtttttgactatttataatattgtcctagccctgacctaatgcttcgttggaactcaatttcctgacggtattgggtgtgtaggttttggagcctttggatgcggcggtaaattgcctgcccaaagtgaaaaaggcagccatttcggattgcatttggaaaaacaattcgagcagaatgaatggctgccgattcaaagtcactcattagcctttgcggcgaccaattgttgccaatgctgtctctgattgcctcaaagaaacgtacatatgttgccccctccttatttggcaatagcccataaacgcatgggactgaacaatggtcgatg

SEQ ID NO: 7955 - DNA, 994 bp, Heterodera glycines
  unsure (1)..(994): unsure at all n locations
tttttgaaaattntttttttccaaanngggatgggggagcaaactacagaattaccattttttaattgatttttatagtaaggctcattttgatgtcttttgaataacgtcataacacacataaatacaaaattgacccccccccccccttgtccacctatgaaattaatgcttaaatgaatttgaattacttaatgcgaaggtccctgaagcgaattctgctgggcagcggttggtccggcaatggaaatggcacagtgccgtgtcccgtaattacggtcagttttggcacgtagcgtttgcggatatcgattggtctccaaattgtccattcgggtttgtcatcgaaatggttgtccaccagcgcgttgaaacggggcgaaagcaatgccatttttaagccgagttgggcatggtcaaaaaaaggcagaatgtccatccaaacgtcgctgcacagccaactgaaattgcggaaatttgtggataggtaaaaaaaaatttggtaattttttaaagaaaaatgccaaaccgtcggttcattttgtggcaattagcagtacaatttgcagttttcgaaggatttgtcacaaagaggtgaataaatgtgttcgaaatattcaaaaaaaggaagaatgtccatccaaatgttgaataacacgctgaagaataatttttgattttcttatatgtacattttcatgttcaattgcaaatttgccacaaaattatagccattggatggtattttcagggacccacgcgtttcggcgccagcatgtttttccactataacttttttctttggcatccaaatccaacaatcttggtatcattcgaaagctcttaacatgtataacttttttgctaattgtctaatcacgaagaaataacttaaaaaagcatctaaacatgttaagctttcgaatgatatcaacaatattggatttatatgtcaaaaaaaagttatagtggaaaagcttcgaaacacgagcgc

SEQ ID NO: 7956 - DNA, 4650 bp, Heterodera glycines
ataatatgtatatgattccgtaatttgatccatatttcgtgattttatgttttcgagccttagtgaatgtaatggatagggcccggattcttatgtttttgcttatttttcagtggctttgtttcggtgagatttgaattttcgcccctatcggcattgttgaaaataaataaggatggatctcttgaaaattttttatgattgtggacaaaaaagaaaaaaaattatctttatattgaaccaaaatgaaaaataagacgaattttctgtaaaactttttttttgttgttttgttttttttatttaaaaaaggattctgaacaacaatgacggcgaaaatgcaacaaattctgatcattgtgagcaaacgacaacaacaatgaacgttatgaagactggagaagaacatgacatcaccaatttcaaacttgggaaaactcaaaaggtatgcatttgtctttggtctgaaggtagaaacttggtaaaaaataagaaacattttaatctaataatttttttataatttcctctttgattcatttgcattttagtacctctttgccatgatacccgaccttttccgactttatttttgaagtcagcagaagcaccgatagacaaatggacgcagcgagatcagctcgaaatttcgtgcacaacatgcgagttttggggatcaaacatacaatgatgatgaaaaaattcgtaagctaatgacggctcttagtctccagttcgtgggaaacgcaataaagtaaaggaatatgaaatttggaagaacgaccattctttcccttagaattgttcattccatgttttttttaaatttgttattcgttcaattttataaatgttcattgttttttgcgaaattaatataaatttttttatttatttatcgataaagaaaaaattgccatcagaagggcgggaaccacttactctgatgactgatcacagtaaaatagtcacagagtaagtgaataaatatcaagtgagatcacaggttaaaaataaacaataacaaaaaatttatatgaaaataaaatcgaggtcaaagtcaataaaatgcctcaaaagttaataatttctttatacattggcgctttcagaatcaagagtcaattctaataattttttaaaggtgtttaatgagctagacattaacgttttatcaagggcattccaggccttgactgatctgttaacaaaagatttggaagattttttagattgtaatttaacatttaaccggaaaaatgacttgtttcgagtatttaagttagttcttttaaacagagaatttgggtccaaatgtgtaaaaccatgtaaaattttgtaagtagttaggaggtcaaaaatttttcttcgtttttcaagagtagctaatttaaaaaattggagctgttggtcatagggaatatatggaagacaacattttctgaaagcgattcgagtaaaatatttttgacatttttcaattttgataatatgcgatttaagttgcggattccaagattcaggggaatattccagaagtggacggatataactaacataaatatttttccaaactgaaattttctttgatttaataacacggaaaagtaaacgcatacggtagtaggcgttacgggtaattttgcttatatgttcggaaaaagtaaatttattgtcaataagaatccctaagtcacgaatagtttcaacttcacaaattgcattatcattaattttatattgttccctggggttattctttccgaagtaaatgataaaagttttattaatagaaattttaatataccatttcttagaccaatcagagagaatatttaaagcatggtgcatagcaattctatcattttttgttttatgtacggaatataatttgacatcatccgcatataattttatagaaatttgtttaggaattaattcaggtaaatcattaatatatatcagaaacaaaagaggcccaagaacagaaccctggggaacgccagagctcattttatactcagaagagagagtattatcaacccgaaccctaaaggtacggttcgaaagaaagtcagatatccagtttaagattttacccctaataccgattctatgaaccttatataaaagtaaattatgggggataacatcaaatgctttcctaaaatctatatagacacaatcgatattcttattattataaataccatcataccaattttcaagggttgaaattagttgtgttgtggttgatctgccctttataaatccaaattgatgttcagagaataaattgttctttaaaagaaaatcggaaatagcccaaacaataaatttttccataattttgcataaagaacaagttaaggcaataggcctatagttcatagggttacttttttccccttgtttatgcaaggggataataatcgattgtttccatatagtgggaagttttcctgtatcaagggagagtctgaaaatttcagtaacaaaaggagtaaacgaaagagaacaattttttaacagtctaaaggtaataccgtccggtgatgtgttatttctgttaggtaaagttttaagaactttaccaacagaaataatattaaattcaacgtcgtttattgttggagaagaaaaagaagtatcaaaatcaagagaataattatttacagtaaagttttcagaaaaaatttttgcaaaaatttccgctttagaagttgagtctgaaacaaacaaagtattatactgaataactggtggatcctctactggcttaaagtattttctaagatacgaaaataatctattcttatcaccggatagtattttattttctttacgggattgaatatttcttatttgagtcttaatatgtaaggagatacttttatataaaggttcatattttcctctattttctttcattagcttatatagacgtgctttttccctaattgaagccaataaatgcggtgggtaaaagtttttggcggacttaatagataaaatagtttcaggaatattaatttcaagatttcttcgaacagaactaaagaaaatagcatatttatcctcaactgtataaaatttttgtagtagttgaggaagaaatgaggataaatatgcatcgaatagaaaggtattagatttagtaaaattcctaagaataatttgtttcttggttgcattttgctttaaaacacaaaaatcaaaaagaattgttagatgatctgtatctaaaagtccaccttttacttctaccgcatttattaagtcagtttttgttgaaaggattaaatctaggaaggattgctccctagttggttcattaatgcaggatgtcaaattatatttattaaagaaatcacaaaataaattaccaaaattacttaaagggaaaggttttttattttttatagttaaatctttagttccaaggttaaaatccccaagtatacagcagttttctgaaatgtaaaggtcaagaaatttgaaaagatttttggtattttttaaattagtagatggagggcgataaataagaatcaaattaagtgaattgtacttttgaaactgtaaaactaatatttcacacccaaattttgtttcagaaaactttacaaaaaactgaaagctatgccgcctccacgcttattcaatctgttagcgtaagaaattgtatgattttgaagaaaatttgaatgaaaaggaaattggttttcatttttaccccaggtttctgtaaaacaaataaagtctaaatttaaggattcaaaaattgtttctatttgttcgcatttgttatagatagaccttatattaactaaagcaccttgtatacatttattaaccttatgaggacttttgaaaaatcttgcggtacctgaatttacgtttgtaaaattttttgaaattccattatgggtggtccccgcaagactttatgaatttgatttatggcaaaaacaggcataattaccagggtcatcgcgaaaaacagagacatcgtttcggggaatgacatgtccagcataaacaatgaaattgtgattcggaaattggtcgcgggctgtcttgcaacaattgatcaaattatgccgctccttgagttgttcaggagagagagacggacggacagatacagcttgaaatttggagtttttaagtcggtttttattgcggagaaatgattgtgtcatctttcgggttggcatttccactttgagaagtctgggtcttccttcctttctttggcccatccggtaaaccttggtcggcattgcctcgatttcacaaacgtccagaatgtccaacacctgctgttggtcagcaattgcgcgccgtgtggaggaaaggccactgtccgattcgggaacgcccataagaacgaccgaatgttctctccggtcctcctccagtaccgcgcgagtgtcctgggtcgacgtctcatgaagcatgtccaccgcgagcttgagaagtgcatccagttggcaaatgactgcacgaacgggttcagacacttcagtgctggttagcagtgctgcgatgtccaattgcgctgcgccgtccaaaaattgttgtcgtttcgttggaattgttgagagaggggatgttgtcaagtgtgccgcggtacgttttgctgat

SEQ ID NO: 7957 - DNA, 2329 bp, Heterodera glycines
gtctcactcaaaaaaagtcacagattcgatttctcgagggtcaaatctctgtctcgagtaaattcagaagtctcgaccatcgtggccttcccttcccttccttacgtgtcctatcctttcgttggagcccactctgtcgtagtcggacacaatcacatgcaaatggacccgctgcaatggaaaggggggcactttttcgctgttggcatggcttttcctttttgccaatttctttcgtttttttcgctcacttgcattttttcggggctgacttcgaatgaaaacgattcgttgtaatacgggttcaatgtcttcattttgatggtcgttttcttcttctccaaccgtttgttctgtgccatcaaataaattttgacgtacggatcttttggggacaaaggaaattttgaaaagaatggcaaaaaatcggaaaaagggacggaccggaaaggccgagcacatcctaaagtggtaattagttaattaattgattgaatcatttggaaatgtttgcttttaatgagtcacccgccctccaattttaccatttttttcaagtttttgcactccatcacaaccaccgtcagtttgtttttgtttggcacgtaacgcaatgccaaacaaacatcgccgagccgattttcctgaaatagaatttccacaaatgaatttgatacggtagccaaattattaattaactaattaggtttcaattaaatctccctaatgaatggccgtccctttattgtctttctttcattttccgtttctttatttttaatccgaccggcggtgcttcgattggtgccgtcttttctatggtcgtggccaagtcgattttgccgaggggaatcgaaatttggccgatttggtcatgtttgccgaaccgatctgaggaaaatgcataagcgaattgtttttgtgactttttgctggtcagaccgaagtcgaacacattgagcaccaaagtctgactgtttatttcgttgaagggcacctgaacaaagacaaaaatgccatttaaaactaattaaccaattaattcgttaattaattactttgaattgaaaggactcgttgaacacggggttcagcgacttcctttgcacctttaatttaatatacatacacttttaaatgttgtcttacccttgtttggaacttctttttcttgtcctgaatttgggtaattacggtaaaatataatattttttaaatttattttaccggtaacaaaaacaatttgacgtaagggtcgctggtgccgcccaaatccatcgccggcagactttcggcacttacaatgcccaccgtcagctgaactcgactcaatttccgttaaccatttcattttccaaccaatttccaattccccattttctcctcacattgcttttgtcaaagtcatattccaatttgtagctgagtgtgcccagaaatttcttcttctccttttctggcgctgcttcctcttttcttcgtccattgttcgccagtggcgacgccatactcaaaaaacggtctgaaaatggcacaaaaattgtgctaattgtcctaatttaccgatgctcgcctcaattgatagcattttggggaaggaaaaatggggaaaatttgaaatggaaatgaattttaacggggagaaaatcggcaggacgaagaaagaaagaaaggccttcaaatccacgtgggaaagagagaaaaaaactcaacgaaaggggcgcttagcagtgccaacccaacttataaatatgtatgaacagcgcccggggagggcgcaggtgaagcaacgaaaagtactaattaattgcttaattaattggggggagggcaatgaatgggcgcggcgatttcgcagatttgctttttctttcgttactcaatttggccattcaaatgaatgaagcatcgatcgatcgttctccgtttgccaaatgagtgttttaatggtcgcgtgtgtgtgccgtgtgccgtttcctcctattgcccctgggcatggttcttttgttgtccgcttacaaaataggcctttaattgtcactcccttcggggcacggcacggctcagcttcactaattagggaaagggatggatagggggggggggaagaggagaaggggagagagagagcgaaggcacttcgatttaggggggggggggaaattagattagtgtttaagggtggggtaacgttaaaataggaaggagggggggaggtaatgggttgtgccattcttttatgccattttgacgccccattttgggctgtgccattttggaccgaccgatgccctgtctctctcttaaacgctacctccgctgattaaaa

SEQ ID NO: 7958 - DNA, 3844 bp, Heterodera glycines
agcaatgattgcgctggaattgttcgaggcgtgggccttgccctgtttttttttgttgtcctccgccgatggcaccgctctgagagagagagagagagagagagagagagagagagccattctctcgccgcccccttctctttcactcggagtccacggttaattctcgagggtccctagaagggaatgccgtcgacccgaggcaccaccccctcccctccactcacccacccacccctcccttcccctccctccgcgccatcgaacggatgggaagggggaggcaaaagcggcacaatacccaacaaaaatggacgggataatgaatggcggaagaaagggaagcggagaaaatttgcagcaacaacggaagaagggtggaaggaaaatgaggagaatgaaaaaggaaggggggagaagaggggagggggctgaaaggggagaaggcgggggcgagagagggggagtacattgtgccgggaaaggggttgatgcgggaggggaaagaggagggcacagcaggccgatcggggacggtagggaggaggggaacaaggggggagaggggagcggcgggacaggcggaggggggcggggcgggggattgccgcagcccttaggggggtgggactaatttggcttctttctccatgcattttttgtccataattatattcatttgctccttcgtttttgatggatttaatgccaagtttaccaagtttttttattctcaataatttcttttaaatttgttttttaatttaaatgtttatttatgcccggtttttcctctaaattgcccacttcccttcccccctcccccgcccattaaaataattcttttaagggacccattggcacttttcgttgttcctccaaagtgccgctctctgatgaacagcgtgaaattgtttggcatcgattgaaagcaatggaaggcacaacaaatcctcccccccctctctctcctccccagtgtctctccccactctctctctctctcttcgcctcgggcaccaaaatcggggacgacggggaaaagcggaaaacttgagcctatgcaaataattaaattatttcatgattatttttttattttttatttttttgagaatgtgtacatttatttcaatagtttttggtttcgttttcgatttgtccatttgcaatttctctctctctctctctctttcaattcatttattaatggacaaattgggagggggggggaaacagaggggagacagccgtgcaaaatggacgaacgacctttcaggaacattggcacgctgaaattctccgcccccgggggcatgaaatgcatgggacggcactctccgtcccttctcatcctttggcacccttccgtccgttccatcgtctccccctttttttgcttctccccctccgactcatcagacgcggcaaattgaagcgaaagagcactttcgcctcgggggaattatgagagaaattttcgaactttgcaatgaaagtgaaaatggaatgaacgaaatcggcagcgataaattggcaaaaagagaaaaaagaaaaacgattcttttaaataaataatatttaaataatttcttagccccgccattaatttttttgttcaaatttcttttaattttatgctcggcttctcattggtaaattaatgaattttcgcctccaccgaaagagtgtgggacagacaaaggacaaaagcgaaagcgaaagcaacagctgatctgatcggtgccattcttttcatttcatttcccaaggcgattgttcatccgacagattggaagaagcaaacgaaccaaacaataaatcagtgccgccacctgtggtgggaggggcgggggaatttcacgtcccccggggggggggggggcgaagagtgcccccgggggtccctccctccctttccctccctttctctccctttctctctccctttctctctctctctgtccgccccccgtcgacggttccaccacaaaacaaaaaactcaaacagaaaatgaatgaacgaacaaacggaggaatatgcgaaggaataatcggcggaagagaacggcccattctctcactcattcggctgccattaatccgccgaaactcattttggaagagagacaaaacaaacagcgaattgtttgtttgcttgtttgtttgtctgtttcttctgttgttcatccgtcgccaaaggaaaatgcgccgaaaattatttattttatgcaacaaaaaacaaaacattgtccaattaattacccgcgggggggggacggcacaatctccgccgtccccttcttctctgggattggcatttgccatttgattagcatttgtcgtctcttttcccttaaatttcgcttatcaccttcattccgtttttccgttacatttcttttgtcattcgcttttacttcattttctctgttgaattaaccaattaacacaattaagtgttgcttttggtagttttggcatattattaccgatggattatccccccccccccccgcctcagaatgcccttctccgtccgtcctcgatgaccttggcatttggtcatccatttttctgttcctacgtccaagtccgtcccaaatgtgttgctcatgaataaagtcggaggatttgctgttttgttcattgatcactcgtcagtcctccgtccgtgggaatattacaattttcgtcattttcgtcgtccgttccgcggtgcgccccccccccccccgcccaatcagtcaaatgcgccgttcatccgttcattcgcagtatttaatcatccatcccattccaattccattcattcattcattcgatttgcaacagccaaacaaaagaaaaacagtaaaaagggcgacaaattgaaaataattattaaagaaattggcacaaaaaataattaaaatgaaaaaaaaataaatgaaaaatgaggacaaaaaaaacattggtaaataaacgacgcattgaaaagggagggacaaacagaaacattcactcactttacaatttcgcacagtgaaaaataggaaaattgggggaaaatgaaacgaacggacggacaaaagggaggaaatatttgggggatatttatgagacattttggaatcattttcaatttttctttcactttttttttgcctttccgtcccaattgtttttggcattgccaatgccaaaaacaatcaaaaacaaatgccaatgccaatgccgtcccctccaccgattcctttgccaattattaattttgctcctccaactcccccccccccgacaaatccatcattttctcccaattttcccccaatttctcccaaatttctttcttccgcctttccaattcgattttcccaatttattgtcaatttgacttttcactgtttcttcattcaattgccaattttgtctttcgtctgtccaaatgtttctttctccgttttcttttttcaattttttcttccaaaaccttctgctaaatatggcattaaatttgtacagaataatccttttttgcccaataaatttccatctgaaaaatttggcacatttttctgtcgccgggcgatgaaaagcgtggcattttctgctccggaaatcctttcatcagtctcaaaatgtttttgcacaattatttttaatacctaaaaaccaatttctgaatggaaatcgcaatttttcctccgatttttctccaatttttacatttttttcctttgacctttgaactttagttttcttttttgtttgctaattttatcaaaatacattcgtcttttccgcctctttccttcacattttccccttaaaattcgttttcatttttattttatcaattttt

SEQ ID NO: 7959 - DNA, 4883 bp, Heterodera glycines
  unsure (1)..(4883): unsure at all n locations
ctcaacccgtccccattaatttccaaaacccgcggccgacgctagaggatgcaaatgcaaatgatgcctgcctcccctctctccccccccccccccttcgcctcattcattgccccgtccgtctcccctttccatgcttcaccttctcatcatcattagcctttccaatcaaaatgcaaaccttaagaagaaacaacaaaaggggcgccgcgccgaagggaaattgccttgggggccaatgaatgaatgacttgccaattggccaattacacgtcaaaacgcatgcacgaaagccaaacaacagctgagatttgttgattgttttcagcagaactgagaaaacgacggcggtggtcacaaaaaaacagcaaaaggagccgaagtgacgggggcagccaaagggaaaggaacgatgccccagggggaagccctggggcattcattcattgggcaattaatgccaattagtgacctcttctaattttgcatgttgctttttgaatatgtttttatttacatattattctttcaattaaaaaattaatcaccgtataaaatgatgaaatgtatcaattaatcatagacatttctaaaacacaaatacaaactttccaataataaagcagctaattgggaagaaatggcgagtggtgagggaatgcgaacatttcgcttgggtgagtgaatgtgcgagaagagagagggcgactttggaactgccaatggcattttggtgatcagtgccaatgaacactcgctgctgttggtccgtcctcgtcatctttcgtttcgtcgtcgtcctccgccccttcaaattgttttgtccgccgttttattttcgccctggggcgtaaattccgcgttgacaaaagtgaacccttcgaattcgttctgaaggcaggcaaaagaataatcagagaatgagaggcaaaagcgaacattggccactgacctggtccaaattcattaggaacaatcggtcgaccggcgtcaatttgggcgcttcgccagtgaattcggagtcgaaattggaagtgtcgtcggcggatcgctgagagaaaaaagggcaaaataaaacacaaaaaaggaaagcgaacatcgaacagagcgacgaaaagacaacgccaatgccgaaaatgagaaccaaaaaggcacaaattacaaaaaaggatgcttaattaggcaattaagacagcaaaactcattttattaagaattatgacgtataaatttgactttgaatgtacaatgaagggaaatgacagaggggaagagagagaaagatggggaaggagaggagagaagagagcgagagagaaagagagagagagagcgagagagaaagagagagagagagagagagagaaaggggagggattgggaatagcggaaggagaaaaaaaacaaaattggcaaggacacacaaaaagtgaggcaaaagtgaatgaattatagcaagtaaagtgccatcgaaacacaaaattgaggaaaacagtaaaagtctataaaaccgatggaaaaggggggggctaattcattcttggttggcttaacgaaaagaaaccgagactcaatggtcgggagtgatcggaagttgcaagctgatcgcgtcgtcgccgtttcggctgcagtccctctgcagcgtttcctccgcataagctccgctctcggcactcgctgcttcagcgaaatattgcgaattaaaatggtcgaacaaaatgaactcgtcgcctttcatcccctccaaaatgtcccattcgggcggcgtcaatttaagcggaaggcgcagaaaaagcgggtcgaaattttcggtggcgaatttgttagactgaaaatgcggacaaaacgaatgaacgaacggacgaaaaacgggacgaaaagcgaacgaaaaaattgaatcattgggaaaaacgcacaattttaggcttgaacggcggctgcacttggcgagtttcgattttgtgccaatcgatccgacggaaaaagcaatgctcctttgacggaatgccaaacaatcagttcaaaaccgatgtgaattgcttttaagctttgccaactcactttgacttgccgttctccgtccgcgctgcaccccaaccttttggagggcgctttgctcagaaatcctttacaaatcagcaccgattcctttgacatcgatttggggtaagagactgaaaatggccaatcaaatgctcataatgatcaattatctgatcagatcagtcagacttaccattgtgttcggtgatcgctgtgaacaattcgtcctcgtcctccccgtcaaacggcgcttaaagccaaaattatagcgcccgccaatcgaatggaattactaacgttgtccagcgagcatttcgaacagaaggacgccgtaagcccaccaatcgacagattttccgtacggttgatagagaattatctgaaagggtgcagcataatgccattttgatttaaaaaaagtgccaattgcagcgacctccggtgcgatgtaatccggagtgccacagaatgttttggtggtggtgtcgccctgaatgccctccttacacatgccaaagtcggtgattttgatgtgtccgtccctctccaacatcacgttgtccagcttcaagtccctgtagatgatgcccttggaatgcaggtagaacaatccgcaggcgatctcagcagagtaaaacacggcgaccggctccttgaacttgcccacctgctggatctgatacatcagatcacccccgttgacaaattccatcacaaaataaagacgatcctaaaaggaatgggcggggggaatcaaacaatggcacggaggacggaaatgccattggaagaccattgtttggaagcaggaatggagtgccaacaaaaagggaggcttgtcgggcagtgccagcactctcttctccaccattgtgcactccacgtcgtcgtcttggatgatcacgtcctgggaagagagtcaaagattggaaagataaatggaagttttgcgataaaaccttcttgagaattttgatggcgaacagttctttcaagtgcttgtgctccccaagaagtacctaagggaaaagcatagttgacaagggaaatgatcatagtctgatcagaataagatggcaatttgcctgatcaaaacagcggttcgaaagaatatctgatcaggtggcgtcattcctcctgattagttcgaaagaccgcctgatcagatcattttgctctttccatcgcatctcacctttccaaatgatcccttccccagcacagtgatgaaattgaagtcagccgccttcaccacttctttgtgtcgctggactcggttctcgagtgccgtcgcactttgccgttgtttcgtcactgatttggctcgtccctcttcgccaagtgcgcccttccgttgtccgtgcagatcggccattttcttctgcagccgctcaatgtccttctcgtcctcaggcggaatcggaatgttataatattcgcctgaaggaagaaaaattgccaaagtgagcgaagtgacggcggaagagaaaggcaaaggaaacggaccctcctcgtcgttcaaaagcttgaaccatccgttcatcggctctttgatcagttcgctaataccgaatgagagtgagcccatgaagtcgttgcggctcgtccggtcccaatcccacacttccaccgacagtcttcggtccttgtcggacggctccaacttgctgaagggcactgattgacaatcccacggcattaaaccactttaagccatcggctcctcacaattggaaatgttcatcccaaattgggttcagcgtcgcttttatcgtcctcgttttttgcttggcctttccctgctcatcttcgaatgggatcaacttcagcttcacataagggtccgaaagtccgttgggatccatcggaatcaaattccgtgcctgaatttctgaccatattatcagcaaaaaatgtattgtcaacccaacaacacacttctcgaatgtgtatgtgaagaacaccatccttggaatgggaatttcgctttggcattgtgtcctctttcccccgatatcatttcacctgaatgaaagtgccaaggtcgatccgccccctcttctccgtgtgatccatgccgcacatattcggcacgtatttgacacatcgatgatgaactgaaatgcgcctaattgtgcgagcttttttgtgaagggcaatttggcactgaccagaggtgtagcagcattggcacttcatgccctggtgaatgagcccgtaaagcaaagagccgcaatggtcgcaaaaggtgggcgacgaataagtggtggcctgaggggcaaaatgtcaatgagtgagtgggtcatcagcttcaacaaatccaatccgatcacctcccatcggtgctgctgtcgtgggtccttaatttcgaattataataattataaaattagttaagctccttcccactccaaactcacgtcactgtccacccctttgtccgcgccgggacacgcgaaactgacaaactcatggcatcgcttatggacgacctgagaaaaggggaaaaaagggaggggagggataaaaggcatggaaaaagagaggaaaatggacgagacgaacagagaaaatagaaggagtgattaagaaaaatgattattggaaaatccaaaaggaattaattcccttagatttggcgcattaattagttaattgctgctgatttattctttttaaagtgtccgttcgccttttaaccattccccgctgattggcatttgactccgttattaattaattatgcgttttgacccaccaaagtgcacacttggcactgaaagccttgtttgttcagtcccccagatgaaatctttgcaatgagaacaaaanggttggtt

SEQ ID NO: 7960 - DNA, 1274 bp, Heterodera glycines
gttaatgagtatttttaaatttgttatgtctttttcatttgccttttctctttttctcatcgctctctccgtttcttcctctccctccctcatctctatcgttctcttaattttcctttgtttctttcttgtccattttccctttttccccccgtggccacactctttctaatcttccgtccggcctaactctcctttcccgcccccattttcagtaaatttattcgtcccaagttgaattaatcgatttgccgtttcccttacgtccccaaaaattcattccaaatgagtcattcatttggtggaaaaggaataaaacgggagatgaaatcagctaataagagatagatatgataaggaaagaaaaaagcaggagaaaagtgtgtggggggggggccaaaaagaaaaggaaaaaaggggggaagaaagtgtccaaatttaataggaatcagtcacatcagcagcaagtaataataagaaacaaagaatgaatgaattgaatgagtgctaagaattggttatttgagatgagacggcgaattggcggcgggggaaaggggggggacaacgtttgttctttccttcgttcgtttgttcgatcggtcggtcgatcatttgaggcattttcttttcatttaaccttctcattatggcaattgctcattactgatcggtcgtctgctcgttttactcattaaaaaagtcattgaaaaatgacagggaaaaactgccgcagtcactgcactcaacgccggaggcgaggggggggggtgtttttctttcccacccgcccttcccccttccccgggggtctctttgtccattccttaggctatccctccccttcgtcccctttccccccccccccccccatttgtgcctttgttttggaaattcggccaacatttcctcaactgctttccaattgttcgccttacatttcgctcctcctctgatgctcgccgttgcgccgataaacaaccgcctgaaggagttaatgccgaatagtcccatgcatttccgtcggctgcccttctgttgctgtctacgccttctcggcgaatcgccgctcctccgctgcgaccgggcgaacacaatcgaatcgggcttcagcggcgtttccgtggccgcttcgccctcccggcattccagtgccgctccgtcttccgcctccgttccgctttccgttccgccgttcgtcgctgcctttctccgccgcccttccgtcgctttggcatcgttcggttgccctttccgctccttcttcctcttcc

SEQ ID NO: 7961 - DNA, 4200 bp, Heterodera glycines
tttttttcttatacccccccccccccaaaaaaaacattttagaaaggtcttgttcatcacgcgggcctttccgactttattttgaagtcaacagaagcatcgacaaacaagttgacggtgttagatcggctcgaactttgtgcacaaacgctacgttctgcaagacgcagtcattttgtctaacaatgacactgggtttgaggttttactcatagttataccacctgtccttttaaaaattacgaattagaaaataaaataggaaaatttggctcttatgcagtttaacccccataatttttttggaagacatttttttgttctaacaagtcgtgaaaacatatttaaagggctttctgggtggctgatcaagaatttattcaaaaataaaaatagccaaaagaaggaatttttatcatttaacaagaaaacatccccgcccccctcaacgtgtaaagaatgaatggtgcaaagaggtcgcggaaaaagggccataggtcgtcgtcgattccgaagggctcccccgccggcagcccactcaattaaaatgtcccccccccctttttaactgcttcggcagctcttttccgtttttttctcatttctcaataattctccgccgtttttgtcccaatcgaatgcaccacgcgcttcgctgctgctgctgatgtctgcttacgaccgaccacgcatttaggcggcggatttggccaattgtcgtcgtagttttgatgaaataaattaattaaattccgcgtttcattttgcgaaatgcagccaaatttttgaaacctgttctttcacgcagaagaaacattcattttgaaattttttgggttggtttaatttgtaaaatttatatgtgtaatcaaaaggactgagctgaataatcgacacataaaattaaaatgactcaggtattcacaacgagtggccacgtggatgtggtcaacagaattaaggcctacataaatcctccgtcccccgcaccgtccctcacatccatccaacgcccaacacgccattattcgtaatgtctcaaaattggattagcaaaataattttgatggcagcagtcggaaattgaaaataatggcgtttagtattgttgaaatgaaaagcaattcaaatacgctaaaaaatccaaacagagtcaacaagatcatattctatgtggattgtgatgatattaaggcgaataatactccaagaattttgccaaaaccggacctgagaagccgggaccgggaccaaccggcaaactttaaaaattcaaaaaaattcaaattttaatttatttcaagtgaaatattaaataattattatttttttgtttggttttttattaactcaaaagttaacggttaattaaattataatatatttaatcaatattttaaaccaacaaagaaggtgtgaccatctaaactgcctattaccgaaaatctttgtggattttaaggctgatagagcttatgtagagttttataatgatgccaatattctaggattttgtcgacaatgaaaaaatgtctcattccaaaaaactcgagctggcgcctaactccgatactgaaaagacccattccctgaatacttaaccgaatataaattgtaaaggaaatgaaatgaaagaaatcggatttgtataggcaaaaagtggatggttgtaaaccgcgagacgaaaaaaggtttaattgaacaccacacgactgagactgacaaaagcaaaaataggtttgccaagtcctatccgtgcaatagtcaaagcagttaaaaatgaatatacctaaaataatgagtagtatgaaattagtatgcactaaaaatgccaaatatgcactcaaaatacctcagatatgcctaaaacccgaaaaatgcccaaatatggacgaaaatatgcttcaaaaactaccaaaaatggctttgaaccctcaaaaaatacagaaaattatgtaaaattcttaattgactttcaaaacataaaaacaatggctaaagagagttttttagagaattacaaaaattttgggttttttgtgaagcgcttttcttgtaaaaattacaaaaaatgcccgaaatacatatctctaaaaaagcaaaaatggtaaatatgcatttattctcgaaaatccctacaatatgcgtttataagcataaaaaacctccaccaaatcaaaaaaatttaacgtagaaattcccttttttattgcataaatagtaaatgtgtgatgatcaaatggaaaagtaaaccggaaaagtgcttcttttatataatggaggatagagaagaagaaaatcatactcctttttttgctaaattttttgtttcttttttggtcgtcatcattataaaaggaatgcattttctcagtttcgaccattccattcctcattcaacaacaacagataatgttattcttattccctttgccccttattttgcttttgctcgtggccattgttttggtcagccagtgctgcggcggttgtgtgaaaaaggtgtgttcagaaaagaactttcgttttatcaatttaaaaatcccttttccctttttgcagaaaggcggcagcaaaacggacaagccgaccgaacaaggagaaggaccagcacctgaaggcggcagcaaagaacagccaactgacaagggagcaacagcagcaaccggcgacagcaaaacaaagacgaggccagggccaacgccgtgtcaagaaggaggaacgacttccaaaggcgacagcaaaacggacaagccaaaggcccaggaagaaggaacttcaaaaggcggcagcatcaacaccaagaacgcgccaaacgctcaggtagatgaagcaacctgaaaaggcggcagagcatcaataacccaacaaattcccaggtcggcccgacagcatctcgacgtccaaaacaaacatcaggcggcagccaaatggacaagctgaaagcccaggaagaaggaacttcaaaaggcggcagcagcagcaccaagaacgcgccgaatgccatggtagatgaagcaacttcaaaaggcggcagagcatcaataacctaacaaattcccaggtctcaacgaacgcgccgagtattgccaaaggaggaggaacgacttccaaaggcgacagcaaaacggacaagccaaaggacaagaaagaagcaacatcaaaaggcggcagcagcagcaccaagaacgcgccgaatgccatggtagatgaagcaacttcaaaaggcggcagagcataaataacccaacaaattcccaggtcacaacgaacgcgccgagtattgccaaaggaggaggaacgacttccaaaggcgacagcaaaacggacaagccaaaggcccaggaagaaggaacttcaaaaggcggcagcatcaacaccaagaacgcgccaaatgctcaggtagatgaagcaacctgaaaaggcggcagagcatcaataacccaacaaattcccaggtcggcccgacagcatctcgacgtccaaaacaaacatcaggcggcagccaaatggacaagctgaaagcccaggaagaaggaacttcaaaaggcggcagcagcagcaccaagaacgcgccgaatgccatggtagatgaagcaacttcaaaaggcggcagagcatcaataacctaacaaattcccaggtctcaacgaacgcgccgagtattgccaaaggaggaggaacgacttccaaaggcgacagcaaaacggacaagccaaaggacaagaaagaagcaacatcaaaaggcggcagcagcaccaccaataacgcgccgaatgccatggtagatgaagcaacttcaaaaatgcggcagagcatcaataacctaacaaattcccaggtctcaacgaacgcgccgagtattgccaaaggaggaggaacgacttccaaaggcgacagcaaaacggacaagctgaaagcccaggaagaaggaacttcaaaaggcggcagcagcagcaccaagaacgcgccgaatgccatggtagatgaagcaacttcaaaaggcggcagagcatcaataacctaacaaattcccaggtctcaacgaacgcgccgagtattgccaaaggaggaggaacgacttccaaaggcgacagcaaaacggacaagccaaaggacaagaaagaagcaacatcaaaaggcggcagcagcaccaccaataacgcgccgaatgccatggtagatgaagcaacttcaaaa

SEQ ID NO: 7962 - DNA, 6866 bp, Heterodera glycines
  unsure (1)..(6866): unsure at all n locations
agcaatcgcttagaaaaagcttctaaacatgttaagctttcgaatgatatcaacaatgttggatttggattacatagaaaaaagttatagccaaaaacacgctggcgccgaaacgccagcgccgaaacgccagcgccgaaacgccagcgccgaaacgccagcgccgaaacgccggcgccgaaacgcagtggacccactaaaccgacagccgataaaacaaagtctgaaaaaaaaataaaacaaaaaatctatataattcagcaagaattttggaataatgatatagcttgaaggaaaatgtgattgctaatcagtgatcgcagatcactaaaatattcccaacaaattgatcaatcggtccattgcaggccaagcacgcgctgtaaaaaggagtagaaatcaacgagttcatcaatctgaaacaatgatgaaaagcggaattttcattgaaattaaattggatcggcaaatgttagttttaccaattttgcggtcggtgtgccgacaatctcgtgcccctggtccacccgtatctttgccaacacgggattccgttgccaactctcagcttgagtgcgcaataaatggtacagttgtgccgtatatttgagtgtatgtgccggcacaactcggtcctgaatcatttttattgttcggcactctgtcattgaattcgttgtgcattggcccttggggaggggggcgggggaatttgcttggactaatcggggattgatctcattggcactcgcaaagggaatttgttgttcattttggcacaccttttttgatttgtccccaatttagcggtattttttgtaaaaaaaaagtgccaaaaagcccacgtcatgatcggcagccgtcaaaagagttgccggccactgctgcccgggagtgatgctaagctgctgaagcggtgaatatctaaactcattgtcactaaatccctaatgattattgcttttttacttataaaggtacgaaaagtctgtggcattttccgggtcgccgaattccgactcccacgtggcgccaacggtgaatttgttgaagcggagcatgtccaacacgctgaaagcatttcaaaccatttttgatccgcctttggtcgacccacccgtattgagtgatcacagctccgaagagatcgggccgctgctgactgcagacggcggtcaacaaaccgccgttggagtagccagaaatggccagccttaaaaggcgttggttgttaattgaatggcttggactgattcaatgagaaaggattcaatgtaaaggggatggagtgatcagttgctgatcgtagcgaatacagtaaatggccaagaaatgacagtacagtacttcgagctgttggtgtactgtttgttgatgagatactcggcagccgcaatgaaatcgtcgaacacattttgctttttctcccgcattccctgttcatgccatttctcaccgtattcactgtcggtcaataaaacatttttcaatttgattttttcatttaggcatgaaaatgccactaaaatttcccaccctccgccccgaatgtttgcggttgccacaacgcctccaaaatgttgcatgaacatggcgtcagcggaggaaaagaagggcagcatggagtcgccgaagccgccgtaaccggtgagcagcacgggattatcgccggtcagcttcatgtccttgcgatgggcaatgaacattggcacctgatcggatttggaaccattcaaacagttggtacaatactcgcccaattaaatacttaattaattaattgattgttcctttaccattgttccatctttgctggcatagaaaacctgaaacttggcaattgaccaattcatggaccaattatcagaaactgcttgctcttgctgctggctgacctgttcttcgacgaaggcgtcggtgtccaacaccggcactttcgcctgccgaaacacttccaactgaacgggttggtccccaaattgggcaaattccgcgtggaaaatggtgaacggagaaatggacgactcagttttgaagaacacatgggaggagaatttggaagcaaaaaagttgttgttggagctaatagttgagtccattataactgagccgaatggcaacgtaatttggtaaagcatttggccactgttcaggttgtgaacgaagagagcgtcctgttagaggaaaaccgtatttcataaaataaatcccccataacttagaacccccccccccctccatgaaatccccccccccctttagaggaagccccacttaggttagaaaaccgatatttaaagtagaaaatgaattacaaagcaaagacaaaaatccatggaaatcattgtttaatgaacacggcttagagtgattgcctgatcaatcaaacagatttgataatgtcttcagaggaacagcgaataatcgatctgatcaagtgatcgaacccgtattatcggaatgatggaccggttttgggcatttaattcaatttgattcattaattacttaataatggtcccctggtcattagcaccttcacattgtccatgtagcaaaccaacagtttgtctttgttcacggggtaagcaaatcgcattcttcgctttgggtcctcctttatgacctcttgcggcttctgtgtcgtgctgccctcgagattcactctgatcaatttgtacattggcgcatctttgttggtgaaaatcagtgccgagtgttcgtctgagtccaccatctgtccatttgtatgtcaaattaattaagtgattaattaattcaaaaattgaattgaccattgtgctgttttgtgttttaattgattctaaaaaagtgattggtattttatttaccataatttcatttacaatatacaccatcacagctatactgtatgtatgtacttggaacaacttttgctcacttcataatccgcgtcaaattggtcaaacagcggcttcatcttcagtggaccggtgattcggttgttgtcagccggcagatcgcagtaaaacatttggtcgttcgcattacccccaaaagacacaaacaaaaagcgaccatccgatgacacttggccatagctaaaaaaagaattaaaatgaattaaaaataattaaaatcacatcagcaaatccgactgattgcgtccttgcaccttaacgtcatcggatggaatcaactgacaaattaaaattgtcggccgttcttaccaccaaaatgtccttctccgagtcggtgcccattttgtggaagaaaagcgaatggaaattgaattcctccgtctccaattgttttaaatatttctgaaagaggccattttaaaatttaaatcttttttaacaatttattaaattgtaccgtgccattaccgaataaaacagtcccgtgccgtcgctgagccatgaaagtcccgaaaatctgacgtcagcaatttgatcgggcagctcatcaccattgctttgtttaaactaaaaatctgtgaatgaacccaaaaatgcttcgtttggcccaccttcacagtagccgcatcgctgcccttttctgagataccgtatgcgaacactgtgccgtccttcgagaagctttccatggtcactgccgtcgtgccgtccttggaaagcgtgttcgggtccagaaacactttgcctggctcgtccatggaattggactgataaagcacactttggccttaaaagagaaagaaaacattttccacttttagggcactaaattccttcaaaaatcacaaaaggcatttcaaatataaagagaattgattaacagtttccgttttccctactctgtaagccgctgttacggtaataatagaacaaatcgccatggaagcttggcttgaagaattctgcgtaattccacatgttggtgaggctgaattgagaagaattgaaagaaaaacgagaagggcatcgcatctttatattttaatttttagaatttttaagccatcatttaaggcaaattcaaatggcaaaaaaaaaaaaattttaattcgaattatttaaaacgaaacgaacgtttgattcattttttgccgcaatggactggcctcgaggaaaggctgcgaaatttggttgagttggctgacaaattgccgtgtcacatttgcgtccgggttctccagggcgcggtaagggtcggggacctgaaaaatgagaaaagcagaaaggaaataaaataattaagaaaaaaatgaaaatttaaaatataaaatgaaaaatttaaaaaatttatatattaaattaatgtataaagatcacttcaatgccatggtaattatccgccacatttcgccgcggtgcctgcggatattcccgcggatcaatcgccgtccccgcctttgtcccattcgcttcttcagctgctgctgctgaatttgtgctcaattttcgtttggagtgctcggagaacggagcaaatggtgccattattgctgaaacagcacaattaaaacggattttactaatttgccattcttcggagataaaatgtttctgctcactttttcccatttgcgccatttttgccacattggcactgcgatggccaaatgggaaggcattggcattggcatgcaattcattgaacgcaattgggcgcacattctccccaattgttggcacaacttgacattttttggtggaattataaaacatttttattttaaacacaaagaattttatttgtttcctttttagcatctcttttttcatttattcacatttttgttggttttgattcgcattttccgtgccggtgccttcgtgccaatttccgtcccttggcgatgccaaccgtgcgcctaatgccgggctaagggcgctttgctaaattttaaatctgagaaattctatgatgaccaaaaagcaacaatagacggaccaaggcaaatcccgcagttgccgtaagggcaatggctttgccaagtttggccacaaaaccccatgccgtcctttccgtcctttgtttgtcttggcacttcggccgcaccattcgctgggaccaaataatgaattaattaactattaaatgctttttcgcacaaacagaacaccaaccgtttttgtcattttttgtgtttgttggggttgaacatttgactaaaaaggcaataaaaaagagacataaaatagaaaaattcatttttataattaataatgaatgatattttattttctgacatttataatgatgaagcagaaacagccgaaaattaaattgccgtgtttttacatgacactttggcatcgttggcaaaaaaaaaagataaaaattgtaaaaatgcaattgatttttattattcattcaaattttacgtagattaaatgagaaatttttaaattaaatttcccccattaaattaaattaaataagtttatttgcatgtatattttggcattttccaaaacattctctattaaagcgactcaatcaactcaattaaaccttttttacctttttctgtggttattttcaatatttttcacttcattcttcttctcacattccaatttgtttatcatttaaatttattgcgtaatttttaattatttttgtccctttcatttgattatgcaattttctcaaaaatgaccgaaattggcgtgcaattagcaattgttggcgagtccgtccgtccgtcgctttttcctttcacaatttgcaattcgcattcattcgtccgtcattagtccgccgtttttgcgctttagtccaccgaggggatggacgagcaaagaaagggagggcgaccgaccgactgattcggtgagaggagtcggtgagtgagtgcttcaccgagggtcgagtggccggcttcacctcccccccccctactcgcccaatgtctcccgccttcccttaatttatgtaaaacaaaatccggtccttcccaaccgtcgatcccaaccaaagtcatcagctgctggctgcaccagtcgccggccgacgcccaacattttcatcatcctccaacagcagagggggcaaacgaaaaagcatcgaacgaaagcacaaagacggagggcggggggacaaattgagcaaaatgagggggggggggcacaaaagagggcggcggaatcgtttgatcctctcacagcctcgggcgacaaaagccaatcctgaaaagccactccgtctcaccaaaatgaccacaaaagccacacaaaatgttgttgttttgttgtgttattgttgtggaccggggcggaggagagactgacggacggacggaggtgggcgatggaagcggagcagaagcagcagcatttgttgtggaacctgtcactgttcgatgagtgggagggtccctcccccgccccctttttttgttgctttttctccccgccattggctaaggaatgttgcgtgcttactgctgctttgcttcatcttctgccgccggttgcttcttgcgactcattttttgtgtgtctgtaatttatgcacagacagcggcgtatatttgaggggggggggcggacggacggcgcccgaggggcgtggcgggggatggacgatgggtcggctgcctaatgaatgaatgggtgactcatgccgaacacttatgaccatttatatacaggggattctgtctgattgcttatcagacatttgttggattaacagatgagaaacttacttacgatggcttttcgctctttgttaatttattttgcattggctttgatgcttttcgtccattgcncatttttgttatgggacaaggggatttacaantatattacattttaaaaattattataaataaattttccaaatttatttttcctttaatccgacanaatttttaaatatttatctcttagtaacnatcacatttt

SEQ ID NO: 7963 - DNA, 1678 bp, Heterodera glycines
ttcattgtcaggcctttctgctttgacttgtaacatcctttcggttggaacactttgattcgcgcgccgccagcaatttgtgtgtcgttcatcgaccgaattgcgtcacgacaatccttaaaaattttgttcgcaattgaattgttaaatgcgtccatttgtgagttgcccacctgcgaagatgcaaatgtgagaagaaatgttgagacggtgtcgctcggcttcaccgtacacttctcggccccgtctttgttcaaattaaagcgctcgaacagcgcaacaacttcgttcagctgagtgaccaaagggaagccacgcgcaacgacggaaacccggtactgaaaaggaacgaaaattgaaatggaaaaaagggaaactaattcacccaccatttcccggatgattatcatattctgacggattgcgtcggccatctccgcccgtttcagctgcgtgatggcaatttgatgtccgttgagaatgttcatgttccgtattgccgcttttgtggccattgcttcgtttggcttaaaatttacaatacttaatttagtttttataaaaaaatgtccgaaatcggcaaccaaaaaaccgcctaagaaaattaatcattttaagagaaaaattttgccaaatgggagaaaatgcttaccaaattaatgtaaaggacgccgttttgcatccgcgcaatgttttcatatggcgcatcgaattggacaccgagaaattcggcgagttgttccgcgtaaaccattttgggaacattttccaaacggatgctaaatgaaataaacaaataaataatgtaattgtccttttttatttcatgtctcaccatgagttcgaatttgggtcctctcggtaccgttccaagaaggacaaatggggacgcaattccaattcgtggggagtaaattctttgtttggtgccgaatcgaaagcacgtctgtccatatttgagagtttgacttggtgcaatgacaaaggttcgttgtccggctccaacaaatcaagcggtggttgttccgggattccattctgatgaccggacgcaaaagccgtctttaacattgggtcggtttttgctgaatcggtgtgaagacgggcctaaaaagcgaaaaaattggcatattcatcaaataaaaattggattttggctcagactcggccttttgtccgcataactgacaaacaaaaaatcacaaacagttcggacaaatcgctaccaaaaagtgtcatcatagccaatttttttttaattttcaaataaatataaataaaataatggttttcaaattaatcaaaaccaacatcattgtcactttcggcttcgtccattgaatagtcctcttgaatcactaaacccggagctgttgacccaacggaggtatcaatcgacccaaccgaagcattgaatggaacattgctcgttttggcagcagtcgacggtcggacttgggcggagttggcaaaagacgaagcagtgactagaaaatggggtattattatagtaatagtgaaaaagcaaatgtttaaaaaagggcatttcaaaaagtcatcgaaaaacgaacgctgctgtcgattggttccgagtggcaatgcattgttgaccggtcttggccaaaacccattgttcgacgagcccggtctgatcagtgaagggatatggctgaccatc

SEQ ID NO: 7964 - DNA, 5352 bp, Heterodera glycines
caaaaagcaacacttataggactcaatttacttcatttgctttagtgaccatttgcgccgcagaagcacccccgggcctcggccgatagttcgccttaacgaagcaatttccactgctttaattatgattttttttgttgcaaatttgcccatacattattggcgtgattctccggaaatgaaaacgctccaaaaacagctgcatttgaaaccaaattcagtgggcccatcggattggccgagtccgctgccggcggttgctgctgttgggctgggcgttgtctctgctgttgttccttggcttgtttgtctctgtcagtctcttcctctttcttctcatcactcggcttcgtccgctcctcctttgcccaaactgtcgttgttgctgctgccgttgatgatgatgttgatgaggtagcagcccccttctccgatcggctttggtcgtttgaccgtcctcgtccgtttcgcccccgcggggatctgctccgattggtccctctgtcgcgctccctctcccttggcctgtctctgtccgccctctcccctcgtccgcgctctcttctgctgttgggatcgtctgaagaccttttgtctcccctgtccttatcgtccggctccatgaccgcgtattgctcgtccgctttccgtgccgttattcgttccgtcctagaaattttaagtggatatactcgtggggaagaaatttaaagtgtgcaaaaaggtctgaaaagccaaaaagcttcactgttttttcactcaccgaattgttcggttattaatctcgccatggtatctgatcactgatctggcgtccctctcgttgtcaaattcaacaatccaacggtcggaataatttcgatcaggctgatagacgcgggtaactttcacacattcagcattcgtggttgataaatacctttaaattttttgcagtaaataatgtagcatgtatataatgcacttactgtttcacgtcgaaaaaggtggctttgtatggcacatttgacaattgaacacaaacgcgttccttcaccaaaggctccgattgaaaagcggcagaatttggagaaaattgcgcggatggcttgaattcattcccatgagctgatggtccctgataaaaacgctttcttgggtccatcggacccgatggtgacctgaaattttgtattttgtaaactgcaaaagtcaattaaaaaaagcaattacctgctccgttttcgttttggtccattaatccctccttcaaaacgttgctgataatgagtttgtcggggttgaaagtgctgttgttgctgataatgagctccgcccatcggtttcgactcagaataggcgttaggaaatcctccaactccatgcgttggtccaccaaattgctgttgaacggctcctccgtgtgcgccacctcttcgtccaaatggcggtcgagacggacgatattgtcctgcaattggcccctgatttggcatgccaaactgagcttgatgatgagaaggagctgcaaaggaattatgatgaagcaaatatcggcctttcatttccccaccttgtcctgttggtctattttgttgctggttataaacttgaattggctgattaggagtctgaaaacgttggttgtgatagcctgccgcaggttgctggttgaaaaacccatcaccggcataagatggattcgaaggacgtggctaaaatttgaaaaagtcacaggctaaacggcgaaaagtcccaattcttgtgatttttttaaaactttttaaggtaataaacattacatacctaattctctttggtcaacgaataaaaaataaggatcggttcaatggggagtcagctgagcgaattgtctaacaatgagaatatctaccattttttatacatttccagtatttttcaataaacggcgcccggtactcagttagtaattcagtcggtctttatgccaaattatcatttaaatttcaaaaaaaaattttgtgagaaaaataatgtcttcagctgtattcaaaacatgacaatattattatcttcctgctgcttttctgtatcatgtaaaaacaaaaattgaattttgatcaaaaaaggacctgcgattgttgggcaacaccagccgcttgcaaaggctgtgaagggacgttaagaggaggaggaaatcccggaggctgttgcggtatgtttggcaattgctgttgtgttttgcttggtgaaccgagtaaacggcccaacgacgacggagggactccgccaaaagacggctgagtggagccgggaaagaccgggacgggtgccgactgagaaacgggcggagcagcctgctcatggaacagcaattgcgagtgcgacccctgccctgaagcagctaattgttgagatggcacgttttgtggcagttgaagttgaggattcttccacgagtcaccgccaaacaattgttgatacaacggggcaatggtttgttgtggagcaaaagccgtggaaatggaaggcgaagaagatacagcaggaagcgcaactgaagacaaataatgtgaaaatgtaaaaaagaacgaactcctacataactgaattgaacagaaatattcaattttctattgtttttgtaatttttgtctgttacaattttgattttgtcgttcgacaacttaaatggctgtcatgtgatcggtgaatacgaaaacgctgatcatatgttcagtggaatcagtaactacgtaaaatcatttaacattttttgtggaacattaattaaccatatgtaagccattcgcttttggctattataccacaattgacaaaaattctgtcatgctcaaataagcatgccgtttggcgcgtagcttacaaataaggcataaagcgaaggacagaaaagaacaaatgggagatgtctggtacttaattatatattaaggcatgtcaaaatttatgcgttaacaaacattaaaatttacatacatttaagacaatgttcaaggtggggaaaggtgtgcattgaaagtaaattaactccgatgctttggatggagtagcatttgaatttgactaataatgtcgtttaaatttaaaaagcgtattacgcttaaggacacgatgtgccaaatgataggtggccggctgattgtacaatacattttttggaataacattgtgttttgttctccctccccctgtttttgattaagaaattgtgaaaacgtgtttccgtggcttatccgtgtcgttgaccacgaaactgacacagtaattgatgttttatttgttaaatctcgcatcagaaatctaccccgaaaagccccagaaatgttttcatcttttaaatgagagttgtatatcaactgggagggggggggggggggggcgacaaaccagcaattattggtacagtatttactttttctatttagaaaaatcttaggtacttaaattcaacaatgtattgatttaaaaatccaagggtaaagttcgtaccataggaaaggagtgtcaaaataatattaattcgtcagtaaaaatggcgagtaaggagaaggagcgcttcacttatggagacgcagacatgagacattttgattgaatgtcaaaaattcgtatcgggaattgagtcagaaggttcgaatattcaaaatcttttaacaagttttatgtctacaaaaacggcgagtgcgagcgattttaattctaattgtgggtacgcaaaaaggcagattaattttcaacactttatgagatgttgcctattttttttctccgagattagatccaaatgacaaaaagagggtgtggttggcagttcaatgaatacctcgcggtgcacggcgagagagggttttccttatttctgacaatttcgaaattcttcattcccaacccccacgcccaaagaccgaaaatgaccttcactttgaaatttccattgtgctccatccttggccgattggtctgctagtttcgctgacttatcatctgcggtgaatttcactccggccgtttgttgctgccccaaatgttgaacagcgccacttggtgcactttgctgttttgcagcaccggcgagagcttgtgcatcggcaatcacttgttccatttctctcctcgaagaaagcatcagccgaatttttgattggtgcagtaaacgtccgtccagcagcatagccagcctagcgtcttcgtcagtctgaaatcctatgaaggcatcgccattcgaacccccgacaatgttgactgatcccttagggattttcaaatccccaaagaagtctctgatatcatgagcttttgcactaaggggcaaattttgtaaacgtattattattgcggacattaattatccttttcaatacttgagaaatgagctaaaatgaataacgaattataaaattggaagtattaatgcttttttgttttaaagtttttgcgaagttcatggtgattgaaattgcgcagatagaagatgggactcaagttgatttaatacatatttttaaaacaatcaaaaaattgttggagactgcaaattcaaaaatgccgcacaataataatcagcctgtcatcaggcaacaagacagttacaagggattggatttgattattcttttactttgggtgttggaaggtggaattggatgatttaaatgcaaattcaatgcaacggggaaataaggaatttttcaccatttatttcaaaggaagttttaagtttgtgcgttcatcgttcccaatttgatagaaattcaaatgaagttgtagactcgctaaacattcctctgttgccagaaaatcaaacttccctgctttttgaaagcacaaaattacagaataaaggaaggtaaaaaaagagggaatgaataaaaactttaatttgctatgaaggaagtagaaacaattcagacacaaataaatcagagaaatggcgaagaaagaaacaaacgcaaggcaaaaggccgccattattcagcaaattgattagaaaaaagctgccagacacaaatattcagaggcatattttaacgaatggaagtcagacacaagcaattaaacatttcgccatttaaaatattaaaaatttaaatttgagaagaaggttaaaggtttacttccgtaatttttcttcctttttttctacttttctttgcttttatttatccactgaaggatggtcaattccacaaacaaaacctgcacaaattctcttcttcttaaattattgtcggcactttcttatgcgctcagttcaatcgctgttatgtttatcaataaaattcttcttacaaattacaggtctttttgattttaattctttttttatagaaaatttgtttgttttttgggttccccatcttttcttta

SEQ ID NO: 7965 - DNA, 1426 bp, Heterodera glycines
tccccactcttttacctcctttccctcttacttctcccactttcccctcatttttcggtaatcactttacaaattacttttgcaagagtctctccccgcgtcgatttatgtgagcccaaatcagagtccaatgttttattagccaataccacgcattgatctcacaaaccctttgataattccaccgttttttgagtttttcaaatctaaaattgaggtcgaggacaatttggcgacgaacatccgcaatagaagatgaaatgagaagtcaattttaaattggataatgacacaattcgtggtcacttagttaattatgtcatccattagttaattgtccaaagtgattcccttttcctcaatcatttcgtattcattttgtgttcgctatgatcagtgccgtgccgagtttgattcagtcttggcacattcagtctcgagtcagtctcgtccataaccaatgcttcttcaaatgcttcttcctattctttgtcgtcacttcgttgtgccttaattttacctcgaatttctaaacggctgattgcctttttgtctttcttcgcatttcaaaaggagcaaagacttccaattacaaattggaggaaaggcgaagtggcggtgggtgacgcggttattttggagagagaggccgaggaaatgagcaaaaaatgcaacccaaaaagtaatcccattaaattcaattagtgccttaaatgaccaaataaaagacaaaaaaaaacattaccgagaaaagcaaagggccgaaaatcagagaaattcccttcaaaaaaaatattggaggagaaaaaaggaatgttttcctttcggatgactccgaattttcggctttttctgatccatttggcttttcctttttgctttttccttccccccccccctccgctctctccgttctgtcgagtaacccctcaaccgcgcgccttcgtcccttcccctcttatcctccgatatccctctcaatggttgcttcatcccccgccttcctccgtctcctcccgcgttccacttcaccaattctcacacccacacacattgctccccgtgggctatcatctccctcctccctccctcttcgattcgtcctcacttccctccctcatttccttcttcacttctttcctcacttccctcatccgcttctcatccgccagacccccccccccccccctacgtgagaaaggatattcgaacgagagacactaatgagagggacaatttgcgaaagacatctttttaaattcacaccgaattgtcccaatcgctgcccacgctcagtgccagagcgaaacaagggaccgaacacatcccggcattgcaacagctgcacagcgaaaccgacgtacgagttgggtatgaggctaaagatggaagcttgggaacggcagatcagaaagaaagagggggg

SEQ ID NO: 7966 - DNA, 2147 bp, Heterodera glycines
ccccccccccccaacaattgatcatattctttcctctcattgaaaaggcactaaggaacaaaagccgcgcaacaacaaacaaaaacaacaacaacaacaacaaaaaataattgaatttaaaaataacttcaaaaggcacaaagggcattcagagaacaggaagaaagagaaagagtggcaagtgaagaggagcagacagtcagagaaagggcagagagcaaaggcaaaaaacaactgaccgatcagagaaaggaatgcttacatttgctgaacaaattagaaaaaagtgagtggacatcccaattgaaaaagcattctttgttttcccaaatcgtggcctttgtttttttaatgtttccaattcgtcccctaaattactaattaccccctctccctcctaattacccccccccccttttacagtttcctctcccattttccgtccttctcccaccattggagaatgacaaatgtttcggttctgtctttggcggtgttcgcctttgctttgctcaacagttcgtttttgccaactccctattaaagctgatttcccttcagtttgctacgcccaattggcccctccgacgacgcgaaactttcgctgcttttccaacggctgctgtgaccaacacggtgagttgggtttggtcatttggagtacgaagttggcattcgttttcttggcatgacataatgccattataagaatcgaagcatttgatgagtttcccccccccccctcccctcagaatggtgccgtttctgggcatccatcggcgaatgcctatcgaacgcagattggatggcaataaactgtcagttggcttgttcaacttgctcccgcgcgaattccgcgtccgcccctccgacgcgtcctccgccgcctcccgcgccggctgcgactcgtccattcatcacagaagtaatcacaacggcgacaatggcaagcgtaacggcgagaacatcggcagagaggaaaaatacagtaaggaggaaaagaacgaaaatacggtaaccagaaatggtggaagatacggtagcgaatagaaagaaaaatatgggtataaaagtcaaacaaacttaaaatgtgaatctgtttgctttggctttccattgttcgcctttggcagggtccaatcgcgggttcctgcgaagagatttcacgcaatccgtccaccgctgccactcaactggccaagtcggggctgctgaatccgatcgaagagtcgcgccagagtctgtccctggacgacatcacccgcgcggtcagctcgggctgtgtccccgaggtttgtgccgtggcacgtcccccgccccccgtcgctattttgccaatcttcgtccgttgttcagtcgtcccccggggactgttcgcgttcgctgtgttaccatctctccttccgaacaatggatggaatgtgcaacaacctcaacaaaccgttgatgggggcttcttttcgcccttatttgaggtgagattggagaaaagaacaaaaaaataaggcagaaaaagaaacgaaaatggacaaatttgattaaaatattaaagagatgagagagagagaagaagaagaagcttccccgagaggaagattaatggacctattgaaacgacaatgatcatatatgcttgagcaaatcgggaattgaatgttggtagtttagctggcagaacactgtctggaaagccagaaaaagtcggcttaaagccgctccaccccatagtttttcccttaaagacttcccatgatcgctcttatattcacggcttttggttggaatgggaaaagcttttcgccattctcttctttttccgttgccattctctttctctttagacatttgccggccgaatattccaatggcttctctgagccgtccggtcggttctccgttcggccttgcccccatatttctccaatgttcatttggcaggtgtgggcaaaccgaacgcgcgcgaggcgtcccgtctgattttggcgagtgcgcaagtcgtctcccacgaccaactgaactcgctgctgatgcagtggggacagttcatctcccacgacatggccagaacggtcagtgactgtcctccttcttcccctcctctctctgatcactttttccgtcgcttcccccactgaatgatcgctttt

SEQ ID NO: 7967 - DNA, 1583 bp, Heterodera glycines
tttttaggtttaaattccgcgacggtcgcaccggcttcctgaagctgtcccgcttcaacaatatgctggtgctgccgttcgacgactcgcgttgtgccagtctcagcacgtgcaccgcgtccttcgtggccggcgacatccgtgccaatttggtccttaattatgccaattacccatcggcgactgtttaaactcttcccccaaatttcagttcctcggtctttcttcaatgcatattgtttttgcacgggaacacaacaggtcactcccataatcacattaattcatttccctattaatggcatttactcgcccatttctcccattgaatccttcccaaacagcgtgtttcctctctctctctcgctctctctctctctctcgccctctctctcgctctctctctctatctcgctctctctctctctgggatttattcccccttccctcccgaattttttctctcccctcccccgtaatttgaaaagatctccgtaattacgggttaggattttcataattggaatccttgatgtccagccgtgccccttctttcctcttctctcccgttcatttttgttcgtttccctcacagaatcgcccgttctctccagtcaatgaatcccggatggagtggcgaccgtctctttcaagagtcgcgcaaaattgtcggggccgagattcaggccattctctacaaggagttcttgccccgcgtgctcggctccaccttcgaccgactgatcggtccttacaacgcttacgacgccaacgcggacccttcggtggccaacgaattcaccacagctgcgtatcgctttggacatggaatgattttggtaggacactgttgatccagagcatgagtcctctaattaggagcaatacgctcgactggccgagaatgggccaatccctgcgggccctttcccatttggcgaaggtaagccgcgacacggcacagccattccaattcgggcactcacaaggtgtgttcaagtcgcagaagctgctctttgagggcggcattgatcccgtgctgcgcggcctgtggagcactgcggtgaaggtgcaaagggaggggaaatggaaaggagtcgttgctaattaatgatcactaatggattggcataattaaaagggataaaaagggacaaaacggactcacacctcacttccaaatgctgaagcacctcctctgtgccattcggagtttacttttgtttgtgccttttaagaggccccatcggatgactcccgccatcaccgaaagactcttctcaacgttcgcttttccttcccttttccgctttcatttgccattattctctcttccaattagcactgatctcggctcattgaatataatgcgcgggagagaccacggcgttccttcgtacaacaaaatgagacgtttctgtgggctgagttccgccacttccttcgacgctctctccgatcacatctccgacccttcggtccgcgccattctttcctcaaattacgcttctccaggtcagcccctgaaaaacggaggtgctttgttgcagctttttgtgctttgttcagaatgacgacctgca

SEQ ID NO: 7968 - DNA, 2261 bp, Heterodera glycines
attgtcggcgaagtgcgacgacgcaaattgtccaaatgttcagcatttgaaatggtcaaatgaccaatgtttggcgcaaaaatgggccaaatttcacgaacaaaaacatcccaaatcggctgctcatccatggtgtatgataatggaatccacaaatgtaaattggtgcctcttttgtcgaaaatttggtgatttgaacgaagaaaagcgatgacggagtgatcgatgtaactgagaaaatggaaggaatgcttttattgtcatagctctgctttttaagtactcaatctgaatagaatcaaagcgaattttgctgggcaacggacggtccggcaatggaaattccacaaatttgtcaccaatttgtacataaagtttcggttctggtcctttgtccttgcgacgaatttcgattgatctccaaattgtcaattcgcttttgccattgaaatgcttgtccaccaacgcattgaaacgtggcgaaagaagtgccaatttgaggccgagttgggcatggtcaaaactgggcaaaatgtccatccaaacgtcgttgcaaatccaactgaaataatgaaagtaaattagggcaaataagaatttttgacttttgaaattcttttaccgtcggttcattttttggtaattagcataatttggccgagttccgaatgaggtcaaacaaatagcagaataattaattaattgcgttggataaaacctggtttttagggttttcctatttttttacggattgtatttgatgaagaagcaccaaaatcacatttaacgaattttttccaaaaaatggaaaatttttgacagaaaattattcataacttcacccaaaatgaaaccaaattttaaaatattgatatcattcaataggcccaactgttttctattagcctataaagtttcaaaaagttccgttaagtttcaaaaaagttataacttgagaagctcaaaaaaccaagttttttacaacatttttggtcgtaactttcttgaaacttaacgaaacctttttgaaggcacgatgacatttcgcctactaagccaagatcggagtttcgcctactaagccaaaatctgacatttcgcctactagacatctcgcctactgacacttcacctactggacatttcgtctactaagccaaaggcttcacatccatggaaaacaaagagtgattaagaagctaatggagatgcgtcactttctgtgttctttgaaaaatttatttgctttttttggctaaatttcattagcattataaatatagcgaattatatgtcaaattagaatatatatttggtgaaatttgctgtcgaaagagctaggtattttaggttagcaggcgagatattcaataggcgaaatgtacagtaggcaaaatgtcagattttaggtgagtaggcggaacgtccgattttggctgagtaggcgaaatgtcagtaggcgaagtgtcagtaggcgagatcgtccagtaggcgaaacgtacgcacaccctttttgaaattttgcatgctaatagaaaacaactagagctattgaatgatataaagaattaaaaatttggttgattttaagtaaagatattgaaaaaaattgctacaattgatggttttttgaccaacatcatagcaccgaccgaagaaacggcgagcagaaaaagggaatggcacagtgaattggaatggaacgcaacagaggagaggaggaccactaaagagaatatttttcaaaattatgaccatttgccgggcgttttaccttatccccccacccacaaatcaatcaatcaaataatcaattggacggatagagagagggaaaggatgaaaatagcattggggaaggaggagagacggaagagaaagagaggaaaaggaaaaattcgaagcaagaagagaaagaggaggaaaaggatgaaaatagcattggggaaggaggagagacggaagagaaagagaggaaaaggaaaaattcgaagcaagaaggaggggagaaagaggaggaaaaggatgaaaatagcattggggaaggaggagaaagagagagagagagaaaaaggaaaaattcgaagcaagaaggaggaggagaaagaggaggaaaaggatgaaaatagcattggggaaggaggagagacggaagagaaagagaggaaaaggaaaaattcgaagcaaggagggggagaaagaagaggaaaaggatgaaaatagcattggggaaggaggagagacggaagagaaagagagga

SEQ ID NO: 7969 - DNA, 3197 bp, Heterodera glycines
agggattcactttcgcaatttgcctcgccggccaagcgcgcggtgcgcacccattttgggggtattcagcttttcctttcgaaatttgccgaattcggttactgtcttttcattgatttgttccatattaggacatagatccatgcctacgtttttccgtttcttactttcaatgctttttttaactgcaggataggcttcctcctctattatctccgcatttccgctccgatttattcggatgatgacggggattgagagaacttttgacgccttatatgtgccattctctccatatttatttgctgcttgctttttgcccgcggagtccccttgcctccctcgtgtcattgagtctcttcgactattctcatcgatcttaaccaattggtttcaatccattcatttggtcggttgcccgctgcgattggtgacgattttgatgggccaaattcaacaatttctgctggccaagcattgtccaaatggttgcactctccgagaaaagatggccaacccaagcaattgcattgcgaagatcacaacgaacaaacgaacactgattggatcaacaatttcaaggaggtgtggtccggggggggggacaaaacgtagccgcaaaattttattttaattaaaaaaattatttaaaatttagttatctagcctaaatcaaaaaaaaatagataaattcgaaaaaaattattaagaaaattcaaggaaatgtaaaaaagtcgtttttttatttttggaaattcagaaaattagtttttatacgagacggcgacgttttaggggtgtacccggtctgtggatggcattctgagttattttctgaaacccgaccccaaaaaagttataaatcgaaaatttctgaaaaattccgaattttatcaaaaatttcggaaatccgaattctgtgccatccctgctggtgtggctccacatttttggcaaatgactgatttttgttttccaaattgtttagcattttcttcgtgccaatgccatttcttccgtcagttacgaaattcatttttctgttcgtgcgccgtcaatgccaatggtgccatatacaaaaatagttataataaaaagaaataaaaaagtacataaaattattattatgattattaaaaaattttaagctaaaataatataattttttttgactatatggcataaggaaaaaaattgaaaaaccccgaacgatttggtcaaccccgaaccccgacttttccaaccccgacggtcggggtcgcaaccctagttcacatcattggtcccataattttcgactttttgttcaggtccggtgtttggagttggtcaaaatggatgccagattcatgatcagcgacaccgaaaagcccctaacaaatttttcatgactttcgaaaaccaaaaatcttcaaaaaggtggcactagccctactattaccggcatttgattttgtacatatacaaatttgaattttgcgcttaattaaggtcattgtctccgccaccggaagaagtggaagaagaagcgggacaaagcatcacaaaaggatgttctgacaaatgagtgacggacaaacgaacaaaaacaatgattcagcagcagacgaaatgaattaattgagaatgaacggccgatcataatttatcagtagggttataaattatatggactaaaaaacgcaaaatatggactaaaaagctcaaaaatggccatatatggaccaaaatatggattataaactgccaaaatatatcttttaaagcctaaaaaattcagtaaaatgtatttatattcaatatttgctaaaacagactcaaaaataagcgaaaaactgcacaaaaatggatttaacatttaaaaaattccaattttattaaattctagcttcacaattgcaagtcaaatactttcaaaatttttgtaataatctcattctgtttgcagcgaaaattttcggaagtgtggacaaaatagctaaaaaaatttcaaaatttcgaaaaaattctctttttaggggtgtattttttatttccaaaacatagatctttagtggtgtatttttcgctttttttgcatttttcttgtgaaaatttgctaaaaacggccaaaatatggactaaaaatgcaaaaatcgcgaaatatggatttattcccgaaaacccccaaaatatggatttatatggactaaaaactttcttcaaatcaaaaaattttaacgtagaaatgctatttttgagcccctttcttcatagcatatgcgcagaaaaaatatgcaaaagcatataatttataaccctaatgattattcatactacatttagttattttcgagatttttatgcttcaatttaacaaatttgaagaatttgtgaaaattttgcccccaatttggaaaaatttatgtgcatatttttcactttttatgcgcatagtttaagattttatgtgcatttaattaccagccctagtaatatcatgattcattttcagatttttatttaaaattttcttattttaaaaacaaagttgtgtcaaaatgtttccatcccttccatttttggcaataatttttcgtctcccattggcacattgtctaacccatcggtccattttcgtgccttttttcaatttttgatgcctattatatgtaaatagtccttttttcgcgattttttggtgcctttttagtcgtgtctacaaataacttattgaattaataatcaattcgaccagttcacgggaagcggttaaattctgaaaatggggggtgtcctgattttaatgacaagcactgtactgttattggaactataaattgcgtatgaaaaacttcacaccctgaatttttcgtgttaattgatacataccagggatggcattccgaggccctaaaaattttcaaaaatcggaattccgaccccaaaaatgtcggaattccgtgccatccctggtacatacccatgggatgcatcgagacgagagagaaaatttatattttaacggaaaacaacacaaatcagagagtaaaaacgagcataaaaaatggtcagatcactcttattcatcaccataaatccaaatgatcgaacatttctcaaatgcattaaatcaccttcaaaaatgtggcacccatttgcgacgggggacaaaggcctaaaaattgtggaaccgcccccctcgtcgcgggcaactc

SEQ ID NO: 7970 - DNA, 2809 bp, Heterodera glycines
  unsure (1)..(2809): unsure at all n locations
atgcctaagtttataatgactaaataacaagaaataattatttacacccttcctcagtggccggtggcgtagtgggtttcgcctctaccgcaccttttttctgtcctaggttcaaatccccgttatgtaaatattttttcccatttatttttgcactttatgcaaattatttggccgaggaaaattgattcccgtccaataacattttcattcattttttcaaatgtacgttaaccccaaaaatattctttttctactccaaaaatattttgaaaaatataatgaagaaaccccattaaatggttctgaaattgctattgccaaaaattttgcttctgaaattgaacgatgcctcaaaaacaatgaagaattggactttatggaagaattggtgtttgatcaaaatgccgaatacgttaaaattgaagggcaattgagcgattccgattttgattataattccgaagaggaaattgatcaaattaatagttctttcggatcaggtccattgataaatatcttatttaaaaactcaaaattttaaattcagaaaattcaagcggatcaagtttttttacgtctcctgttaaaaaagtgcctcgagatgattttgcatctttttcggacaagaaaaaggcccttcaattttatcgttcggctgataaggggcatcgttcattatcatgtatgaagtcgacttataaggccaaaaatatatatgcagtggcgaacaccagtcatattatgaccaaacaactgatggttgaatgggtggacaaagttctttgtcctgctcttcgcccaaaccaaaaatcgcttttgatcgttgacagttggactgggtggaacaattttcatccaaaaaatggaattgaattggctgttaaacaaatcccaaagcatggaactggaatttgccagccattggatgtctatgtttttcggtatttaaagggtcaattttcaaatacaaaaaaatttagaatttggaaagaatttaccagaaaaattacgcagtttgtttttgtttatgacataaatatcaatctccacgaccgcgacaacattataaaattacagtcattaatacacaatcagctccaagcaaaaaaatttaacaattggcttaattttgcatggcgcaaatcagggttttatggtgatgagcctttcccagaattcattcacccagtaaaatattgttttgaagtgcccaaacacaatgacgaatgccaaaaattaaattgtgacaataacattttgctccgttgtgctttttgtgaaatttttttatgctttaaacatttttttaatgattatcatttatgtgaaaacgaataaatttaaaaataatctaaatgggaatcaattttcctcggccaaataatttgcataaagtgcaaaaataaatgggaaaaaatatttgcataacggggatttgaacctaggacagaaaaaaggtgcggcagaggcgtaacccactacgccaccggccactgtgtaagggtgtaaataattatttcttttatttaatcattaaaaactttggcattttttatctcggcacaggggtccatttggcagaaattgaaagcatttttcttaagaacccaggggtgctctatctacccaaaaaatctcattccgagatcccacggacacttggccacctccctttgttagcaattttttgtataaattttgttaataaattgcactgaaaatttcaattatttccgggcggcgcctatcggcacgccggaccttaaaaatacttaatcttcttgaaaattttgcttaattcgcaaaacttggtcatttttttttgacaaaatctgttaacataacaaatcgcattaaaattacaaaattttgccctgccagccgcgcctatcggcaccgccggacggacgcctctccctcccatgttctccaaaagaatttctgaaaaaagcgtgctgcaaaaaaatggcgtaatagtccttttcccaaaaatgttctaaaacaatgtaaagtgacatgaaaaattgaataattctttcaagcaaatatagaaatatatcaaaaacattttgaaatcaccttttacttggctaagaattgacctcggaattcagatttccgaaaatttttggggcctcggaatgccatccctggtgtgctgcgccaaaaaataataaaaattcaatttgagcctttttggccctaactctgagaaatcgcgaaaagcaaaaaatgtctatttgcattgcttgatccttttcacaaaccgcaaaaaatttaaattattatgaaactgccaaacagccatcctccaaaattcgataaaataagtgatgttcaaaaagccttgttttaaatttagaggatttgctaattggccaataaattatcacttgttaggcttaactgatttttaaaggtttaaatggattggctttccatttgaataaaaaaatttatttgcataatttatgtcatttaaaaatttgcatgaaacgaacaaaaagcaaaaaaaaaaaaatcaaaaaaatagataaatatttaaatgaagcataaaagaatataaaaacaggttataatcaacattgaaaggcattataaattcaacgcaattcctctaaaagaataaaaatataatgtaataaataattccaaaattttacatttttggcaattcatcgcgcctcacaatttgcgaatttaattgcacattgaaaaaattgaaatccgaattgaaatcccttancattgacacattgaaatgtnnncgtcatttttcattgattttgttccatataattaactc

SEQ ID NO: 7971 - DNA, 3320 bp, Heterodera glycines
  unsure (1)..(3320): unsure at all n locations
cccgaccggtctctaataaaaacctntanccagagagaaggggaggggcagggaagttagtgcaaattgctgtggggcaatgacaatatccattcatttcttccggtgtttttttttgcataaatttatatcatatgtggtttattcaagttaaaccgatttgtaacactttcttgaaataaaaagcgctttatttgtgtccatcgagaaaaaagccaactagcaaaaacaacgtcggaataaaatgacaaggtgtaagcaagttattaaatttgatcaattattgcatcggaagttctcatatacggatgatgagagcatcggtggaggaatttcatgagtttagagggaatgaataaggactttggttttagagtcatcacaaaaaaaactatggctgtacgaatggtcgaggaattataacaaaactatgataagtatagagagagggagaggatttaatgggaaaaacacgaatagaacagctaagaaacgacttgatcgctgccataagtctgctctattgaaaactcgagtttgttagccttgcttatgcgcataatgaatttggtttgtaaaattcattttgaagttgaacctccgaaaaaattactttccaaactcgaatcttaccaaaacacagtattaaagagaacgaaaaatctacaagaacttatcggtcatatacacaaaataaaattagattaggtatttgggaaataaaatgagatatttgggaaatttaattatttgggtttgaagagttcggccaattgagagaattggttgccaatgttgtgatagaaggcggattgttgtgctgttaaggaaagagcaaatatcgtaaaaatatataaacccatctaatgtgattcacagaaaaaagagccgaatgcgatggcgaggtccaagtccctctcttcctgttggtgcgtcattcagcaagcctatcgaagtgattcaaatcataagaaggccaatttaattattcacatggcataggcgcacacgtccacccggcccacgaatagcataacgtcgccatcagagattttgccttccttttgcagccgtttattttcgtgcatttttgtgaggacagactgagagaataagaaatattttgcacaatgccaaaagatcattcagtcactttgaaaatgttcacagtgtccggaatggacgcgtacacgcctttgctgacgtagagaaactccaaccaactgctccaagtcctttttgccatggtcttcgtgttgagagccaatccgatgcaaattgttcgcactgacttttatggccgattttaccggattattcgctaaagtgtcggaattgcagtgaaaagtgtcgtcggccttgccatttcgctgtgattggtccatgtcgagcgattgccccaccaattcgaaggactgcgccaatttctgccaattgcttttgtgtgcttaacaatacatatttgtaaatttaaatgaatgctcaaatgctcttttacgtccgattagccgtttctgcgcctcagtgattcgttcgtacaaaattttgcaactttcttccaaacttcgcgaacttcgggcgaagttctcaatttgttgttcgctaaaaacccgtattttttgaatttcgtgtgggtctttcgtacaaatcttgcaaattcagctgctcagtcggtgctgtgatgcaattgaaaaagttacctccaacatattcgtctttttcagccaatcgtttgcctttcttccattggttctcaaaactatcagattagttttaaaaagtcaacttcgaaatgcctcatctgtgcagctaataaaatgacgccatactcccgactgaaaatgagtttaattaggtgattccaacaataagttttcaatttgttgccccacttgactcaacacggggtgccgacagattttgttgacccaaagttggaggaccgaacgacggtgttggatcaagtcgtcctcgtaaaggccttccaataatatatttttattacagttggcctggttctaagccacctgccacttgtttctctggcaatggtgggattggaattggcaaatatttggctgacaattgctcatggagccaatcgaaatgtttgtagcgacgagcgacttggatgccggtcaaagagcaggtgagactgtacgcgatgaaactctgacgaaaaaagggcggagggaatagggaaagaaaggcacaccttcagccccttcagcttggattccttttttggcttcgtaaccatgcaagtgtagccataatcgtcggcacatttccatttcctttcagcaccaacctaaatgaagggtaataaattattcagggcacactcacaaaggaacattccgagctgtgaaggtcctcttgtcagttcacaacaacatttatttattaatgaagaacccaccaaaattatttcatggctttcccccggttgtccactgaatttcgtagtggcgagaatgtacgattccatgccacttttcacgaaattggagaatctaaagcaaaacattgaaaaaggagcattggggatcaggaaaagatcagaaaatgctgaactgttaattcaaatgggtttgaattgaattgctgtaattcgatccattgagtcgccccccccccccccggagccaacggtgactctcgacctgttgatgtttttcatcttggccgctccaacagaggccgcttgcttctggctcgacattgaagcgacttcgggccccgtggagcgactgcgagtgacagcaccggccgatttttggacggagtcaaaggaacgtgcgctggtgaactcctgaaaaacccaaagtcaacgaaatggaaaaaaagagaaaagaccaaccaccaacacaagctaaaaattaatgaaagggaaagccgaagaattacagcaacaaaaatggaggacaaatggacaagcaaaggacgacgacttcactcttcgaagttcgaaccttttccgcgtcactttttgaggatgcaatttgctcagtcactgcttccaattggctttgcgcatcgaacgaagtttgcttcttcagttcaaccacagttttctcatccaattcggaattcgcaatttcttcaccttcttcagacactcctttcagtggctgacgaccgtttgaagcctccgatgaattcaattaattaacaatgcccaatttggttttccaatactctccccatgatagaataattaaacaaatgagaaaaaattacagtcacttcctcgtcttcttcggaccaatcggtcgtcgaagtcgtcgtcaatttgttgcgctcccctcaccgtcttt

SEQ ID NO: 7972 - DNA, 1248 bp, Heterodera glycines
atacattggcgcggaaggattggttgggagggcaccctttgtaaggcggcggagccatcggaggaggcacggaattctgaagcaaattgaatttgggattaattgtgccataagattcggcctaggattggctttggcctaaccaacagagcaggactaagggtagccaatgcaacggatttggccatatttgtcacagttgttttggaatgggaacgtgaaaggcgcctctgtgtggctgcgcgtctcaacgatgaagcagacggcttggatcaaaggaaaaagttttcagggacggaatgagtcgacaagagaacagtgaacgggacaaaaataccaaccccaacaacacaaatacttccccgcggggttgtcacgagagatttaacggccgcagtttgacccccgaatgggacgagtagcgcagtttgtgccgccagttttgttgggtccaacacggagcaagtgtgacgacggacaagaagcgaacgacgccgagaatggacatccgaaagtcgcgaatctccatcgccgaacgccgtattattactattattagaatggttggaacatttttccaggccccgacgtaacgaagaagtgaaaagcatcgattgtttcttatattttcagaaagaaatttgcattttgttagcaaaataaattacctatatgaaaataatatgtttttaagatagaaaatgcaatttttctttaaaaaaagacatggaaatggtcgcaatttgctgaacaagagaagggacgaaatccaataaacttccgtttcctaccaaattggaaaagcggaaaacaagccaagtaaatggaagaatgtcaagagaaggagacaaaactggggacacgcaaagaaattaattgcgtatcagcagaattgatgaatgaatgtagggagggaaggaagaaaatgaaaaggatgaaaaagaagcaaaaacactgaaacagaaaaaaaattggagtggaatttaagcgcatttaaagtaaaattaggaaagtgttttcaaaaaatgtttatacaaaatttgtagggaaaaaataaacaaaacctttatgaaagttttgttcttatgacttttatattttgatttttatactgaaaaatctcaaaattctactttacaagtcttttgtggaaattttatatttttgtgtgctgcgcaaattcggtctcaaatttaccttttaataagctttatgaaaataaaatatactcgatataaacacactccc

SEQ ID NO: 7973 - DNA, 1841 bp, Heterodera glycines
  unsure (1)..(1841): unsure at all n locations
ttcatggatatctcttgaaagggataaatccccttcccctttaatcactttactgctaaaaactgccaaaatagttagtttttaggttctaaaaaactcaaaaataggtgctaaaatggggaaagaggtgccaaatagtttcaaatttagagggatgtaaatcgtaaattttatccaaaaagtaacaaaattaagctaaattaatatattaattagaaaataattttatttgaattcttatgaaaatgtgaaatcgttgtcaaaaaatgcgaccaataatgaaattgatcttcagtaggattaaaaataaataaacaattatttggtaaatttaaaaaagaaaggcaaccatattttatttttcgaattttaccagcataaaatttttttttattaaaaaaccaaaaataatgaagcgaacaaaaaaaaaattaaaaatttattccgaggcgcaaaaattaaattctgtgaaattttgatgaaatcaattgcttaccaatatttaattatttatttatcaaatatttatttgtttctattaaagatcagtctcaccgattggtcgtattttttgccaacgctttctccactttcattagaattttttatttttcaaacatacagagtttgaaatccttattttttttaaattggatcaaaattgcaaaattaattttaatcgattcttaaacaataaaccaacccaacatcagcagaggtgtcacgattttcatcggatctgctatagaaacagtaaaaataactcttcaacaaaaaaaatttgaaaatatgcctttttctgccatatttcaaataacaacaacacaaaaaaaacataattatggatttataaatactaaaaattttaattctttacaaaaattttctccataatttataaaaaaaaattcccaaagtgccttttgtttcatcgaaagagaaaaaaattaagggaaaaaaacgatttcctatgagacaaattgaaaagctaacaaaaacaaaatttatttaagaaaatgccattgatgctgcatatagtagtgccaattcttccgctgactccgttttgagggccccacaaatttttgctattccaaggaaaacaacatcgtcatttcataaaaatggtaatcttgagggttgtaatttgctttatttagcccattgatttccggccacaaaagaagagagagagaggaaaggagaagatagaataaaaaaaggataaaactacgagagagagagaggagagaagagaggaaacgataaaataaaagagaagagaagagagaaaagatagagagagattgaagagaggagagattagaggagagagagtgaggagggagagagaaaaggtgaggagaggagagatgtgaggaaacgacagagagagagagagagagagtgaggagagaatagaggaatggttaaagtgagagagcggagaggagagaataaaagaatggttaaagtgagagagcaagagagagaaagagaggtgagagacagagaaacgagaggaaagaagagagagtgaggagagagccattaggcctagaaaaaagagctctttcgaatggtaccttcaaatcaagtgccaaaaattaattgaaaatattaatttgtattccggttattcttccgtcaaaaatgacgccaccttagctacttggaggccattaaatattttatgcataaaatccttcaaaaaaacacataaaaactattcactgtgcccatacctcagcgggtataagtcgtagagtagaccattttgtactctttctaatgggcccacttaaaatttcctagaaaaattttcccanaccccactagga

SEQ ID NO: 7974 - DNA, 1814 bp, Heterodera glycines
tctctctctctctttatcctgtcctcttcacattaactctcttgctctttatcctttcttctattctctcctttcctctatctctcgctctcctttactttcttctctcctcttctctctctctctcccttctttcctcacttttctcctcagtctctctccctaccttctctctctctctctctctctctctattgctctctcactttacatttcttttaattcctcactctcgcctctcctcactctctcttctttccggaatttaccattaaaattggcaaaagtaaatttaatttgaatttttaattttatttattttattattataggtggaattcgattttccaatgaagaaaagatgaacaaaatgaatatttattctaaaatgaagaatgaaaaaccgtctttaagttacaaataaattgctcaatttttgagagtctcattagccaacagatggaaaaaagaataaattcgtaaattttcttaatttttcaaattcgtctcaaatctgtgatttaatgatgttgttctttctgttgttgtcattttttattatttttttttcaaccattatttttaaatgcccaattatttggctgaggtttcagttaagcgtatttttgaaattccaaaatcattaagattatttctcaattctgattcgatggctttgtgaattatttttggttagcgcaatgccttttcatatttcgaaatgccattcaaaaatatttttaaatttttgtaatttttacatagtgatggtagtagagttgatcaatatgaaattctgtttaatatagtaaaaattttttaaaaaatgagtaaaaattaattattctttaataagtatttttcgtttttattgcatttttgtttctaattttgggcaaaatgccaaaaaggtgcttatttttgtataaaaccatttgaaacaatagaacaaattgctcattatttgctataaatttttttttgataaatattttatttgtatataatttgtcattttgtattcatatcccttacaaattttggcattttcatcataaaaatggattatatatatattatttaataaaaaaaattttggcatcactgatttttcgatgaaaatgtaatcattataattgtgaaatcatgaaatttttttgtattttaaataattatttccgtgaatgacgaaataaaagcgaaaggcatggacaaatatatcaatgaaaattcaggtccacggaaaaaccaaggtgccgaaaatgcgtgctgtcgcgttttataaatccgccacttaacaattcgcgttttataaatccgccagttgcattttataaattcgccaatgtagtaattattttttacttatttttaaattatttttctttaaaccctcgttttcttgactactaaaggtgttttcagtgctttgactttttgcactttttttgtttatgatatcagcgagaacttgtccgttcgtaatttctttttctctaaaataacgatctagattgcttaaatgacaatttacatctttgattttttggtcctttcgagttgaaattcctttatcatctaattgtaatataacagataagacagacggtttaaatatgtttctgtcgtttgtgaaaaatcattttcggaaatttcacccttatcgaccatttccttaaatgattttttaaattttattaatatcatttagaacaaaattgttaatattttaatatcaatctcttcataggttttatcccttggtctgggatttttgagccagctaagagattaaacattctttcatcattctc

SEQ ID NO: 7975 - DNA, 2124 bp, Heterodera glycines
  unsure (1)..(2124): unsure at all n locations
ccactttttctgtttttgtttttgtgcacatcttcgatccttatctcgaccaatttccatgccttctcaaataccgagtttgcatatttgcattagctcttatcttttttgctacatattaacataaatgaacatgagggtcattcattcgttgcaatctcaccaaaaatggccctggttcgattcgacgaagccaaatctaaccgaggaaaaattctgctttctcgccttggtttcgagtattccttcgaaaacttttcccgtcttgaggaaggctgggagtattggaaatgcccacggcgtccgccatactgcccgggtcgcgcgtctgtccaaattccatggcttgtcgatgaaaatggaagtcgttataagatgggccgcataactgccgaacacaaccatggcgcaatctttggacaacttgctgtgagccaatttggcactcttataggaagggttgctagaactattattttaggagatttcaaaaattaatttgtatgtgttgccttgaaaatttattttaaccctgggtcccctggtttggtcctgatgtaccctacataatttcgttctactttgtgaagataagacaagcaaacaagcaaactcgggaagaggcccaacgcgactttcccacgacgagtcgcaatattgtgcgcaatgttcgggcgaatctttcggttgatgctcgtgtgaacgcaccaagtccagtcaatatgcgcaataactacaatatagcaaaacggagacaccaagaagagctcacggaaaattaaaatgattgatagggagggaaatgcaccaaaataaagtgaaaaataatataggtcggagatgttggccttgatgttttgcctgttgaaaacatcgtactgcctgatgctcttctaaaccgcgtcatttgcaatgaaatttttaacggccatcgaatgattgttttctgttctgcatctgctctcgaaattcttcgacaatacaacaccgaatgtgccattgatggtacattcgaagtaaatatacgggggattttggggtcactgatcacgaatatgacatccgtttttctgcaaaatgggggcagacaaagttttacccaaaattgttaggcaaagaatccttggtactattttaaattggcccgcttaagtcatgcccgcgtggatttgcacagttatacacaatgagcgctatcatcgaccattgctcagttccatgcgtatatggtttactgccgaataaggaaggggcaacatacgtgcgtttttttgaagcaatcagagacagtgttggaaacaattgggcaccgcaacgtctaatgagtgacttcgaatcagcagccatcaattctacgcgaattgtttttgccaactcaacccaaagtggctgcctttttcattttggccaagcaatttattgccgaattcaacgacttccaaatcttcacactcaatacctccaaaatgttgagcttcaacgaaacatccgatcacttcaagctttggcatttgtacctgtcgaccttgtttataactacttttgcatcttggtgtcgacgctccatccaactgctgagctacagggttgggttctttgcaaaattctaaaaacatcgccctcccccaatttttcattgatttttaccgcttagaattgattctttacttcctcatgacatggattggaccacgtcatgtcattgagaatgaagagccgcttgttgactaagacaacggaaatatgggcgcggctgcggacggctggatccgcgacagaattgaagcaatgaacttggcacagcgagatgcactttttcccattcaattgtggaatataactgagcgtttggcacttgggttttcacgcatcaacaacagcgtcgagggatggcatggaatttggaatactcttttaaaaggaaatcaacgtttgagcaatttagtgcgcaaaatgatcgaggaagacgaaatgtggtctcagcgaattgtggactttcaagtcgcaccagctgatggaataaggngggcgcatgcagcaagaaaatggaaaatatgtaggcagggaaacattttgatgcactccttcaggatatcgaagaatcgtggtgacccacttgattac

SEQ ID NO: 7976 - DNA, 4069 bp, Heterodera glycines
  unsure (1)..(4069): unsure at all n locations
aaattgggggctgtcgacggtggtcaaagcgagcgtaaagttccgacaaagggacggaacccttcggggagaggggataaaactttggcattttgagtgccatggaattgggatggttttaatacaccagagtctcgacaagttttcgctcaagagcacacgcaccaccagtacagtaaaagttacttaccgtatcattggggtccattttccggaacacttcctccaccaattctctccgttgtgctttcagagggggcttaaataaatttataaaaaaccgaaccgatcatggcacttttagcggcacggaaaaggccaccccgcccccgggggtcgtcgcccccggccacaaaattcaccgtaaattcctccaccattttggtaaccgacagaacaccagcagcagctgaagaagtgccaagacgaacggacaaacggtcgaaaatttctttcgcttcactttcggagagggaaagagaagggaatgagcgaagggtttggacaaattgggcacaatccatcgtcgtgacatttttggaaaggaaatgacttaaattttgaaaaaatattaattaggtaattaaaattgggaatttaccggacaagctttttcccagtggcaattccaaccgccaaacatttgagctgaagacgcaccaacggatcttcacagcgatcctggcaattatttattttttatttgcaaaattttattttttttataaatttatttaatatttttaaaataattaattttattaaataatatcttattttccacttttcttttttgatttgctttttctcaccgcttcttttgccgctttttggcgcaacatttcttcgcttaatatttccgcggacggcacaatgttcaaaatggataattctttaaaattttcaataatatgcatagttccggctatttttccattgtttttattttgtttcggcttacgtgaaacgggctgaaaacaggcggaagagttgacgagggcattgccggagggcattttgacggtttaaacaatttatttgcaattcaaatataattaattgatagcctcggattttattaggctttgaattcacacaaattttttaaaatgtattttaaatttgttttaagcggattaaaatgaattttcgtgcattttttcttgttttctgtccattaaaaggcattgtttcggcgaatttgacgaatgttttatttattggctgtgttttagctcccgagggcattcagacggaaataaatatgtaaaaagagcgaatgcccccgggggagcggacattcccaaaaattggtttcctttcgctttttgggcgtgtggcggcggtgcatccctttttcgggggctcgtttttgtggcatcatcggcagaaattgttccatccgcgagagtttatttaatagaaattaaaaaaagataaatcaattataatgattattgcgaattttgtcgaaccctaaaagtctgaaatttggcgtttgtcggagtgagaaaagttgggagtttgcgatgggtaactcccccaaaatgccatggttgaggtatcagtcaaccaaccaacagttaattagaacaaagttcagcagattaattccaggtcttccaattatgttaggataatttgactaaaggaatcttaaggactcgagaaatacgaaaaagtaaatgttttacccattttataccatggaatatacgaggagttcgaaatgcacgtgccaaatgaaaaaagaaggaaatgaatttaaaaagagggaaatgaagctaaagctgtaatgaaattgagaagcaaataaaaagggcgggggggggggggggaaagcttttgggcggccacccgagcaatgaaattggccgagagcgcttttcccgctcctttttttggttagtgggacagaactctttccaaacggacaaaattaaaatcgcatcgaatgatggcattggcatccttaattaatttaataaattttatctgacacaaacacaaggaagtgatacatagaagaaaataaataataataatgcgactgaatttgatggaaaaagggggggacaaatgcttacaattaggaggacaaacagcacaaattcggaagagattcacaattcagaaattgcaataaaaacaaatcaattgctgctgctagcggacgattgtgaggagccattcccaacagaagcggaagaatcagcgcgagaaatgggacggacagccgaaaagtgttccttgtgaatgaacgtctgaaaaattaggtaaatgtttaaatttatttgggagtcgaacaaaaaaaaaactcactaaaaaaagggcaatagctttgccggcaagcgcaccacaaacgacgtccacgttgtgatgtttgtggtcaaacagacgcgaaatggccacgaaagaggcggcaccgaacaacagaacgtacagcacaacaaaaaggtcggtgatgaacagacgacgaaagcagggcaaaatgcgacaatggatgtaaatctgagtggaaagacaaatggactacgaccgtacgaatactccaacagttcgatgctaatattggtacggtatggcaaagcaacggtaatgaaaaagagatacgataaggaaggtggcgaaaaagaaggcggtggaggcgtgtcctgagtagaaactgcgacgggagtccaatattttggcgttgttatcgtccagcctttggcaggtgtacaagtagaagaaatgggtcgagtcgttgtttgtctgcagccgtccaccccgtttttgtacttcaagtccgttgggtaacactgctcgatgaagtcgggtcgcaatccgcccaccgacagcttcaccaggttgacgcaaaacaggtcaacagcaatgccgagcagccaaattgctaaaaagttgttcatttaaactacattccatttgacacgaaaaaacaacaaaagcacacaaataaatcgtgccatttggcagagcctccgatcgaaattccattggcacgcagatttgaagccaaggcgttcatccgggtccatgtgcaggcacatttcgccgattgtgacctgaacaagatgaaaatctgtgtccatgtttgaattaacgacaacaacacaccacaagaaatgtgaaaggaatggcgatcaaatagaaatatttgagagggacggtctctttcgaaattgacgggaggttaatggacaggtcgccacaggaaaagcctcttactacgggtttgaaaatgaatttcagactgaaaccgatcgcacctgaacagaacaacagtatttgttttgctattggtaaaaagagtctcaccaaaaacaatagcaattgcaaagcggatcaatggcagatcatggcttctttctgttttcagcgtcataattagctgactaaccaatgcagaagagaatgtttaaatcaacaaagtaaaattaattaggtcggttaaagaagagataattttagcacggtttcgtcgtttggaacttgttccaaactctgatcggagcttctctcaacattttaattttaaaaaatagcaaaaatttgtttaaaaaacatttatgaatatatggccaaaaatgcttaaacaacagggtttaagggtttttccggggccggtgatcacgaatctgacttccattttcgaccacttcctgaaccccgttgctcgcgtagcttcgcagcctccaattgtgtacattgattnctgaccaactggagttcaccgttgcatttcaagtctggctgcctaatgtgaacatcatttgggctaaagagagtaaaggtaaataaaacacttaaaaatacaaatttgtgattaaaaaaaaatagaaaacagtcagattaagataaaatatttttaataaattcgtgacaacccataataacgaaaagtcgttgctttcgtattttttagaattttatattatttatttttgcacgagttgcctattgtactaattgtttgtacgagttgccatagacccattagttagcaaggtaatttaaagacaaatttgcacgtttgtccagtaacaccctccccgccaatttccctcac

SEQ ID NO: 7977 - DNA, 2580 bp, Heterodera glycines
  unsure (1)..(2580): unsure at all n locations
aaggcgttcatccgggtcccatgtgcaggcacatttcgcgatttgtgatctgaacaagatganaatctgtgttcgtgtttgaattaacgacacnacaccaacaagaaatgtgaaggaatggcgatcaaatagaaatattgagagggacggtctctttcgcaattgacgggaggttaatggacaggtcgccacaggaaaagcctcttactacgggtttgaaaatgaatttcagactgaaaccgaatcgcacctgaacagaacaaccagtatttgttttgctaaatattggtaaaaaaaaaaatctcaccaaaaacaatagcaattgcaaagcggatcaatggcagatcatggcttctttctgttttcagcgtcataattagctgactaaccaatgcagaagagaatgtttaaatcaacaaagtaaaattaattaggtagattaaagaagagataattttagcacggtttcgtcgtttggaacttgttccaaactctgatcggagcttctcttaacattttaattttaaaaaatagcaaaaatttgtttaaaaacatttatgaatatatggccaaaaatgcttaaaaacagtttttgaagttttctggtcataatttttgaaacaaaaggaattttaatttgcagctaatacctagactcgtagagctatcgaatgataccaagaatgtccaatttggatgcttctacatagaaaaaattgccaaattattttatggtcgtgtgaatagagcccaacttcgacaaggattttttgttctagttgttcatttttcgagtctaaaattgggtttctcaaccgatgtgaaaatttgaagcggtaattggggggtgggcaaaattaagttttggaggggtcgattttcaagtcgaaaattttgtttttaatggtcaacggcataaaatgcaccatgcacatatatttttagctacaattacacatgcaatacaagacacagtgaataagcatatacatcggtgaagggtatatatatacatacaacgatttggtagcaacaattcgatgtgcaaaacggtgatgacacaaatatacacatgggtacatacacacaacattgggtagctacaattcgatgtgcaaaacgggggaggcgcataaatatacaatatatacagagcacacaaaatgtatcattgtcgtcagggctcgtccgttgtgagaagcacacgtctacaggttgtagatgaccggcagattcttgcggcgcaccattccatcctcgccgaaccactccagcttgaacacggtgtcagacgggccgggcgtgttgcaccattccacgatcacgcggtcgttcttgatgtcctcgttattcgggtcgaaggttgccacggtgatgatcacgttcacggtgtcgccgacgcccacggtgccgcacggcgggttcaggaagatgcgcttcggcttcgtcgtcttgaaggcgaacccaatgcgctttgagcccgtgttgatcagctgaaattgcacaatgattgatcacttagcagagaaagcctcccaaaccgacaaacgtacgcggaagttgtagatggtccggatgttgaatggcgcgttgaggtgcagctcatgtgctggaattgttgcgatgtcttctggatgttgccccattgttgtcgctgttgttgcggttgttgggcacgtcgatgtgttgctgatgaaacaagaacggaataggcagaagtgtgtgaaaacgcctctttatatacatacatttgagttccgtttgttactgctaaaaatttttttttgtgaatacagaacgccaaaagaacaaatacaaacataaaaatagacattttgttttaccattttttatgaattttttttagcttttctttgtcaataatagaccaaacaaaaccattttatactcattttgaagggaaaatttttaggtattttcatgtctgaccatttctgggacgaaaatgtctttgatctggtcgctgaactcaagaaggaaggccgccatgtacggcttgattggccgtccggtcaaatttcacaaataattgccagcaatggctaaaccatcgccaattgtcaagcacttttgcttttatttgttcctttcgccttatagcttcgaccataacaattgccagaatcgattccgacccgatcattttgtatttgaatatcaaattacttttgttactgtagaaagatttcccaaaagtttgtgcatatccaatcataaaaggcttttaattgaaaaagataggtttatgatataagcatatattgaagatggacggagtgcaaagctgggagtaagggaggagaggagaacgtgatcgagttgatttcaagacaaaatcaaattaaaaacaaatacagacagacaaaatcaagtaaattgtattcaacccgatcaagcaaaaaaacataaaagaggggggattattcagcagatttaaataaaatcaaacataaacaggtggaattgtcagacaaaaagatcagaagagtgtgttggcagtgatattcccgggcaataaggaacctcgctaagacaaaaatttaaggtatcttacggaat

SEQ ID NO: 7978 - DNA, 5049 bp, Heterodera glycines
attaataataattattagatttttaattttaatgaaatccacacatttaatttattggaatatttaaataggtaaatgtttgataattaatataatctctttttttatcactcatgcacacaaaaagcgatcaccataaattgagatgggataattattttaatttttttatattattaaatcacataacattttttggtaatttctgtgctctttattttattcattttgatttataaaaataatttgcttatataatattaataatgaaataagttttaaactgttaaaaagagatgattatcatttgtttcgttcattttgtttaattaaataatacacttcattaaatgtattaattattagtcagttttaattgtaaaatggtgctaatttctcactacatttttacaaaggttttatatttttcaatttattgatattttctaggtttttaatttatctaaattatatgacctataaaatttaatgtgctgataagaattaattttagaaaaaaaatatatttttaaattattttatttaacttgtctcaatccatattcatttttgggagttttataaaagcacacattttttaatttatttatttaataattttaaaaaaattatttttatttaattttgaacattgatctccaaaagttcgttggcaatttagagcagacatattttccctaacattttttaatttttccaaattttatatagccaataaataattaatcaattaatgtttttggtaaactttgccaataaataactttataaatttcttcgtataaaagatattaaaaaaaaagtttttaaattatttttattgcaacaataaatggcaaaatgttagttgaggatctgtgagttgtttaacagtttttgattattttcattatctttttacttttttgatttattctaattctatcaaatctcttcaagtgcaatgtttctaacttatgttcttttattgtttatgattttttctgccttttttattaattatatacaaaataagttttttaaattatttgttgcgtttgcatactgatgaaatggtgggatcacatttcagtcttgtttcatataagttttacaataatatttttattatctgtttcaagatgcaattgtcttagttatcaacccaatccaagagtgtacattagcaaagaatattttaaattttcaattattcaaaaagaaaatataacaattaagaacattattagtgaaattattttttaaatttatttttaattgtcttttaaatgaattataaaaattcatgtgtgcgacttcatgtgccgctgttagtgcagttagtgtacctgttattcttcaaaccaaaatattgattagaataattgatagaataagataaaaaaatttatttatttatttattttcaataatttaatcgttgctaaattatatgattaagtttcaaagtgtatatgtaaagttcctattttaatttttaaatttctttaaataattttatatcaaaagaacttttctttcatcatcaatttttttttaaacaatctgctgtagtaatcaaattatatttgaattgttctcattgttatatgttttaacattgttaacaatattttgattattttacatttaattggtcaaatttaataagataagtgaatgaatgaattaatatttgctttaatttaatcaatttttgatttttattttgttattatttgtgtataaactgttattttttaatttcatggtgtgtttcccactcgaattgaattcatatgtctttgtgtcgaattgtattgataaaattaattatatatttttttatttcattttattttaattaataaacaactcactcaatattttggattttaatttattgtattctttcttatatcttgcattaattaaaaattattattttttataagttttacaatttagaattttaattataaaaaaaaattaatttttactttaaaacgagtttttgtaatctattagataatttaattttattatataaaaaacctaaacattaatttattttatttttaggaaaaatgtttaaacccacaataaagttatgcgctaaaacacgcaaatactccaaaatagggttgcaaccccgacgtcggggttggaaaattcggggttcggggttgtcggggttggaagtgtcggggttcggggtcggggttgccaaatcgttcggggttcggggtcggggtcggggtttttcaatttttgccttatgccaaatagtcaaaatttttttaatattttttcggaaataatatttattaatttccataataatatttgtattgtttttatatttttttatttctttttatcagaaattttgtatagaattaattttttttttcttgaaattttaaaattttttattacttttttgttttccaaaacatcttttttcacgtcgctcttttctaaagacttaaggagaaagggtacggcgtccggcggtgccgataggcgccgccgggaaaaaatttggttagatctgttaacagattttgtccaaaatatgctaaatttttgcgattttgagccaatttttttaataaggtttatgactttttgggccctgtgatgccgataggcagcgctaaattttggaattaagctttattttctaagatttttcaccaaaaaaatttatgaatttcggtaaatttttgtttttcttcgatatgtattttgtcaaaatatgccaagattggtcgatttctatgagtatttaatttaaaaaaaaaacaatttgtcacaaagaaaataattaaagaagaaaacgtcaaacggtatcgaactcacgacagaaagtaatgtcaatggcactaacctctacaccacattccaaatgtccgaaattgagcaaatcttctttatttaataaaaatttggcaaatggttaaaaaaaattcaaatttcgtctaacttttttgcattttctcccacgaaaatgccattcttaggggtgtatatttaaccccgaccccgatcggggttaagggtcggggttcggggttgtcggggtatgaagcgtcggggttcggggtcggggttttccccgaaaatggccaaaaatgtcggggttcagggtcggggcggggttgcaaccctactccaaaacattgccgacttcataattttgcacttttctcagtattcgctcatcggttccttgtaccttggcctttttgatggaccttcctgacctctaacatattcttcataatctgatctaaacctttctgaatttttcttaaatcgtcaataaaacgcaaatatgtgggtgagcatagccaaatccgattttcaattttcgattgcaagcttctgcatagttgttggtacggtcgctgccttccaaagtacgctgaaaaacagttcacatatcataggaaaattttggaggtgcccttgttcctcttccaacataagtgttagtaaaccattcaaaaatagtcgcaagttccggataatgatcaagagtatgatcttcgagttcctgtaaggaccgaattatatcctcttccggaatgaatgcaatcgcagtaatcattcgagaatgaagtgcaaaatttgcatccgtattgtaacgacctaaaagatgtgctgaagacaaatgtttgcgtaagttttgtatgaggtgaaaaaacagcatctaatcttggtgtcagcaaattcgcagattgtcaaatgaatgctgtgctcttgaattgtggccaaatatctttgatcatttggaaaagtttcgcatatgtagctagctgcatctttgtttcgaagaagacaaaagagaacaccggaaaaacgaagtcaccacgtcgagaaagaatgaaataaatctgttgaaaaagcggaggagaagccgaaaatgtgccgtccatgaaatgctgtatgaatttttgccaattcaacgtttacaggatcgccggcttctgaacaaatatgttttccgtgctctgaaactaaagagccatcttccaaattcgtccatatacgaccacgacagccacgaatttcacatctccaaaattgcaccattccacttgcactgattttgtttcttgcttatgtttttgtctttttatctatacggcaaaattaaaatttcgtttaaaaaatttaattttctttaaaaaattaaaataattcttaaattttttcttttaaaaattaaaatttcccagaattttttttgcacaatttatcggcgtcggcgagtcgtgttgtcggcgagtcaaccatcggcgagttggcgtcggcgagtcgaccatcggcgagtcggcgtcggcgagtcaaccatcggcgagttggcgtcggcgagtcgaccatcggcgagtcgggagtcaaccatcggcgagttggcgtcggcgagtcgaccatcggcgagtcagcgtcggcgagtcaaccatcggcgagttggcgtcggcgagtcgaccatcggcgagtcggcgtcggcgagtcaaccatcggcgagcgagtcgaccatcggcgagtcggcgtcggcgagttggcgtcggcgagtcgaccatcggcgagtcggcgtcggcgagtcaaccatcggcgagttggcgtcggcgagtcgaccatcggcgagtcggcgtcggcgagtcaaccatcggcgagttggcgtcggcgagtcgaccatcggcgagtcggcgtcggcgagtcaaccatcggcgagttggcgtcggcgagtcgaccatcggcgagtcggcgtcggcgagtcgaccatcggcgagtcggcgtcggcgagtcaaccatcggcgagttggcgtcggcgagtcgaccatcggcgagtcggcgtcggcgagtcaaccatcggcgagttggcgtcggcgagtcgaccatcggcgagtcggcgtcggcgagtcaaccatcggcgagttggcgtcggcgagtcgaccatcggcgagtcggcgtcggcgagtcaaccatcggcgagttggcgtcggcgagtcgaccatcggcgagtcggcgtcggcgagt

SEQ ID NO: 7979 - DNA, 1812 bp, Heterodera glycines
ctttcgcccctttgtcgcctttcgcccatttgtctccctttcgcccctttgtcgcctttcgcccatttgtctccctttcgcccctttgtctcctttcgcccatttgtcccgctttcgcccatttgtcccactttcgcccattttgtcccctttcgcccattcgtctcatttcgccttttgtgccactttcgcccctttgtctcctttcgcccattttatcattgtttcagtttttctgtccctttttttgattggtatgcttttgatttgttttgttttcttccaatcattgccttgggcactttttaatgcatttgcttcgtatgaatattttcagctgctcattcgcttccatcatccaattttcaattctcaaaacttttcatcaatcccttcatttaaataaatttaattaatttatttgtttataaatttaattaatttatttgtttaaatttcattaatcccttcatttaaataaatttaatttcattttaaattttcgttaattagcaacaaaatgccgaagaaaaagccgaatgagaacaatttcaaagccaattatgactttagcacggccaattctaagaattggttaaaatagaaaagtcgacttgcgttgtcacgacattaattgggggggggggggggaaggccgcgcgaaaggccgcgcaaattaatgacaaattgtgtataaatttcattttcccattctttgctcaatattccattctcaaattacgccgtcccccaaactttgccattcattgcgcccattgaaaaattgcccgatttcagtcgtcattaatttaaacaaattggagatataatataaatatactttattaattaatgggcagattctttctaagcccaagcagattcttccttaaatgcttcgccaaaagttttgttttttctttcttgaactaattaattgatcaattaattaattatattaactaattatagttgatcactttgtttggcttcatacgcttaatggccaattcctttgaatgtcaaatttattttagcaaattttcactgctttcatttaaagttattaaattcaccatataaaatgggcctttgccaaagcgatgagtccaaagaacaacaaaaaaagaacaaagccattgacaaccaaatcagagatgaacaaaaaacggaaaagaacaccttcaaattgttactgctcggtgggctaattaacgaaaatcacaaatgaatcccattaatggctcattaggaagtctctccctttttccgctttactcaatccaacatagaaaaattattaggcctgattaattaattaacttcatttggcatggaaaataaaacatattttaattgctaataattgctaccttttattaatcggcatcagaattcattcacgtcatactatgtccattttaggcgcaggcgaatgtggaaaaagcaccataatgaagcaaatgaggtcatttctttgagttgtctatgattgttgggaatggatctgacctgtccgtcgttaaacatcggctgatcattgatcaccggctaatcgatcgatactcgaacatttgccgaatttccccccccccccccgggggatatttctgcgtttttcaattttaaatttgtcatgcttttaggtttattcacaacaaccaatattcggatgaggtgagacatcagcagagccatcctgaataattttgccctttccaggaattgctgcaacaacgggcggtcgtttactcgaacacaatccacgggatggcacaattgctgaggggcatggaacggttcagaatcaca

SEQ ID NO: 7980 - DNA, 3210 bp, Heterodera glycines
  unsure (1)..(3210): unsure at all n locations
tcagagcgcaaaaaatggatccactgtttcgaaaaagtcgacgctattatttttgttgcggctgcatctgaatacgacgaagtttatttgaagacaatgaaacggtaaaagcatttgggagggacgggaaaagaaacggtcctttcctcttcggtagtcatactgtaacagttattgtgtacattagagaccggacgggatcgggatcccgcgggatttcttcgggatcccgcgggattaaattcgggatcccgacctcgggatccgtcccgagcgattttttaaattcatcgggattgattgggatcgggatttcatcgggaccccgaaccgggatccctcccgaccattttaccaatccctgcgggatcccgctggattgaagtcacgataatttttcaaaaaatctccattttttaaattaagatcttgaattttaaattaaaaaatattgtcatttgctaatttttcttaaaaaaaatcccttaaaaatcccaaaaaattttacaggtctccaaaattccactaaaattttcaaaatttgacgcaaaagttggccattttgtgacttttatttcttcataaaaataattttttttttaatttctaaaacattattctaatcttattaggtagttttatggcacaacgatttctaagaattctgtccaataatcagaataaaattgttgtctacgcatttttccttcggtgccaatcggacatcaccagacccaagaacccattattttcttataaattagttcaaaatcacaaaatatggacagtttttgtataaatttttcccggcggcgcctatcaaaaccgccaacctctccccccccggttcccctaaagtttttgaaaaaatttgcagcaaaaaaaatcttaaaaatctgattttttgattccgtttctcaaaattattaaaaatgatcatctgaggcgaaaatacaaaaattgatattaattgattaaattgtaaaaaaattatttaaggctatgttgttaaatgttctcatttttgaaaatctgattttttgggcatgatattccaattttgaaaaatttctataaaaatctgatataattcacatccctttttttcttcaatcgaattgatcaattataaatattagataaacatttgaacaaaacttggcacaaaatgtaaaaaaaaaaattgggtttgagcaaatcccgataatcccgcgggatcccgaaaaaaatcttcaggattgatctggatcgggattcggtcgggatcccgacccgggatccgtcccgatcgtttttccaaaatgttcgggattgatcgggattaagtcgggatcccgactcggttccctccgaccccagttgtctggtctctagtttaaaatgaaagaaaaaaaaattttttttttaaattaaaatttcattaaaataaagaattttatttattaatttctatttttcattaaaatgtatttgttaagcaataaattgttcatcgttgttccgttttcttatttctcatgtgtgtgctataatttgttattaatccagtaatttttcgtaaacaatttgtcatgccattcaattccgtatttgttgtcatatgcatttaaatttttttagttttcccaattttttcgtatttaaataaattccctaaacgaagtcactcaaataaataattgaaaaaagaaaagctaatcgtttgattttcattaaatgttgcctacttttttgctttttactacaattccattgttcattttcctgcattctgtccttggtaaggtggttgagagttcctggattaatattaattgctctaaacacttttaaattcataatacatatttagccggcgttcttccgggatgcggagatgacgagcccaatgagtacgattgcctgaaaaagggggtgaatatgtgtcatttattttaattttttttcaataaaaaccccaatttagcggggggggggggggtgagaattgaaaattgaataataatgagaataagcataaataatatttagtgcgacttgattaaatgccctaatggaaaagtgtgcggttactttgtcggcattgccaaattaggcaaagggccgtttgaaaagaatgagtacccaaagtgtgtgagtgacccttccgaattgaacgtcacaacgccaaatgatggaaatgcgcacattgaagtggatggaccaggagtatgagaagaacccctttatttaattaacaaaaactaaaatttaaaagccatttttacaaaaaaaattagtgtaagtcggtggagtgtgccgaagggtttcaatgccaagtgcggatcacaatcgacaaacatggcgatcgaccatatgcacagataattggaggtcggttccgtgagttcaacgatttgcatggctttgccttggaaagattccctaattatttatatggaccaaatgagaaaataaataaatgggtaaaagcattaggtttgacatcacagcatctgctcagaaaaagatattcgttctgtcttggaaagatttatacggtacccattttgacagtacaggtttcccacaatgtgtgaatgccactggtggatcgtttcaagagccaaattatttcattgttggaggcccaggggtaaaaagaggcagtttaatgataagaaggataataaaatttagtgtgaccaattgccttctccctgcccatcaggcacaaaatgtgttacaattgttggaattgcaaaatatggcaaatacccatgggcccaggtccatgcatattttataaaagtaaacaattcttaaagtttcagttttttgagcccgtttgcacaaaatgaattggcgtgggtcgttgagatgaaaaaagacaaattttgttttacattttacctaagcttaattgcagagatcatttgaatgataaatgaacagttctcaaaatttgagacccgactggaccatttttttaaaaagtataaaaaagttattgtcttaaaatttaaaaattttaagttaaaattttttggccatgacctttttgaaaactattgaaatttttgaaattctagtgttttatattatacaaaaggttataaaactccaaaaaaaaagtcactaaatgcaattcaggcgatatttttagaaaacttcatatttttaaaattattaatattatttaattttaccggangtttttatagtattacc

SEQ ID NO: 7981 - DNA, 6076 bp, Heterodera glycines
caaatggtgaacttcagctaagtcttgcttaaaattggctaaccattttttgtcattagcattagtctgaacagaaaatatgaaattgaaaatttcaattttaatttatatatttgtgaaaacaaaaaatgttgattaaaatggacggcggttagttaaaaaattaaagcattaacaattatttaatgagaaaacgagctctgttcgcccccccccccaccctaatcgttcgtcgtaaatcactttcggtgtgtgaccggaaatgggccggtggaaaatgcggagttaatcagaatttcttgaaaaaaacgagatacggtaatggaacaaggttacacgaatctaattacagtatgtattgtttatgcattttggtaaatgcttattttttaaaaaaccgaatcaccaatccaaaaatgaaaactcttattcaattttgagtttttgtattaatgtgttaaccacgacgccaggcgcccagctctcgatccccatatattttgggccttctctttaattttcaaagaaaatttagaattttttctaggaaaaaatcaaaatattattagaaaaatttaaaaaaaattttaaggttgattttacaattatttttcaaataatctttttgaagaaaaaatcaagaatatttgtttttctagcagcaaaactaagtctgttgttagagaaacaccatggttaatttgaaagaataaaaaatttcaccggctcccaaaaagataaataaataattggaatttacatttttgtggataacattttttcgctaaaattggttccaatttttggaattttcctaaagcattagtgtggcagtgttaacactaagtgaatgggcgggaaaggttaattaattaatacaaattaccgattttctgatgcgattaagtcgtacgcattcctttggttctttaaatgagccatcatcattgagaacggcgcaaccacccaatgtcgtcatttcgcaaaagcatgctacgttgtcttgaaatgtttttatgtgctgatcaagggaccataagcgacaaatgtctctgtctcgaagctgatccatgcccattggctaaaagcaaaaaagcaacaatctcgagaaccaatcattttaagcggtactcaagaccaaaagttgactccgaggcaggggcatataatttggaaaaaattatataattttaattcgtccaattaatttaaattaaataattataaccctttacatttttattaaggtaattgttataatttactttcaaaaataactgatttaattttgaatattattttataattttcaaaaaaatttttcccgagaatattttatttccaccggaactaaacattggcaattcctctcatataaatgtccatttaaacaatataaaatgataaaaaatattattgttattttcttcatttgatcatttaaaaagggttgaaaattatttttataataaatttttttaatcttaattgttcccctttaatgttttgaaattgctgaaaaattcaagtgtaaaaatttttcatttacgttataaatgaacttgtttatttattgtgacgttttttggatttttttttaagttagacgactttgaaatcaaaatcatttgccagaggctcagatattatttaaataatttattaaaaatattaattattttcgtcctgattactgtactgtcttcagactgtcaactttttttcccacaatttcacttaaattgaaactggcctgatattctttccatgtttcattgagtttgttcagtttttgcaaaactttactaagaacgaagttacttgcattcgtattgtaactcaattgtgatacggcaattactgtttttgtcatattagcgatggttgtgtcaattgaattatcgtaatacttaaagaaaatcaaccgcttaatgctttcgcgtttttcctcaggaaaatccgatggcgcaagaatataatcggcatacagcaagtcggttgaatctaaattcgaaaatttttaataataattataaattattttaaaatacaaaaataaatggatttttttaatttttgaaataaaatacaaaatttaaaaaatttattaccaacttcagtcaaaactacgtgaactgaacaaattaatggcaatatgtgaataaaataaagtttcattgttcaacctttgaaatttgttaaatcttttataatataattattatttttatattatacaaaataaaaaaagtaataaataatggaaaagcaaattcaggcaaaaattaagcaacattttcaattcttcataataattacacgaatctgaatcgatttccacaatcaatataacaattttttaatttaattattttcgttttaatttatgaaatatacaattaactcttttctttattatcaatttttgggattcacaaatttaaaagttggtaacaaaattaaaatattaaataaatagaataaaagataaaatatcttttttaaattttattatccaaaatgcgccttaacaataaacaaaattttatgagtccatttttgaataagcaatttatgcaagctggcggcggtttggtgaatgattacggagggacagaaggtaagaacaataatatgtttgacgggattaattaatgaggatatgtacggtaattttgaaaaaagtcagaaaggctttgaaattaattaccctattatggtatcaaaaatttagccaaatgcgtaacataaattgtatttttattgtccgccaggaatgtttgatccatttggtggagatactggtgcatacccatcaggtaacgacagctatatacttttatttttaattaagccactattaaaaatagggttctgctccgacccctcggggggcaaaatttcgtgggccggggaccccggtcggaaaagttgcatttttttactcaaaataaaattttggtcactacccgacctggctaccggaaaatgtgtcagtgcatttttcttggaataaatacaattttcttgggtttttaaagtcactgatcttgaatattgtatatatttcggccaattccgaccccggagccgaattcgaacaaaaagacgaatacattaattacccaattggggtgtcacaatttagccaaataagtaatataaattatattaaattgttctccaggaatgttcagcggagaagatgatgcatacccaccagcaggtgacgacagctgtataccatttttatattaatatattattaaaaggcctggaacaatactaccaatacggttagggatacggcgctgatccgatatacagtgtggacgaaccgtagggtcatgaaggtggattttaattttgatgaccagcagatgatggatgatgatgatatatgatggcaaaatgtattattatttgtatctacaaattaaaaaaatgataataaatttattttaaatgaattctacataatttgatacttaaaccctttttgttctgccatctctgttttgtttttaaatttttttctatgctaattttcggcgctgaaaatgaatttaacatttattttaatctaacattcatttgctgtgaaataggcacaaaaagaaattcaaaataggcactaaaaaacctcaaatttagggatgtataaatgacaaaaattattgaaaaatgaaacaaatttcgtaggggggtatttttttaatatttaaaaataggatttttaaaaaatttttgagcctcttaggctctaaaaataagaaccaacaaaataggcaataataactcaaaaagtaacttaaaaccaccaaaaagcacttgttaaatgttttattaaaaatcaaaattaataaatccatctttttaaaattttattgcccgaaatgcttaattataaacaaaattttatggttcgaatttggagatcagtttttattgtggtcttttattaccaaaaaataaataaatattttgttattaaaaagctataaatagttaagaaatgaatgataaagcatttggaaattctttcatttaaaaaatattcaaaactgataatttcccatgaaaaattttaaaatgaattctttcttttttttcatcacaattcttcccacaatggtctgtcaaaaaaggatgagttttaatggctaagcgttttggacccatattaatttgactaaaatttaaaactcaatttcgagaaataaaattttataccttttttataataaatttattttaaattgtaccaacaaaattagtaaattgtttattgtgcctttattcttgaattttttgggattttctgctacttttgtcgacttgaacccaatagtgagatcctcgaatagctagctgtacaacaattcacgcttattcagtaaaaagtgccataatttaaggcacatttgtccttggcacaaatttttggcgacgccgatgccgtgccgaaactgtcaccacccatccagctgtacgacttcattgctccgagagcgtatgctaattggcctaaagtggttggccaagcgcttaacaaacggaaacaattgcatgaaaagattgatgataacgaagataaagagcaactgcaacaaggggagcgtttcatcaatattccgtcaattaaaaacatatttaacaagggtaagtcagaacgtaatggatcataaatttaaaaattacattggaaattatttgaaaaaaataggcactttaatttatagttatttttggagaaaaattaattaaaattaagagcaaatatttcaatttatcctattagaacattaaaattaattcaattttatgacagaaaaatcggagaaaccccaacttgttactaatttgtaagcgaactcgtagtgcctcgactagtattttttcgacaaattcgttttaacttttgtcaaagtcaatcaaatttaactctaatttcattagagttcttaattttcttgcaaaattaaaaaattaaaattttttttatcatgtttcaaaaaaggttatgaccaaaaagcgtaaatttttgcccatttttaaattggtcaactttgacctaatttaggacattttttcggaagacattacgagtcgggcaatgcgagttggtctggtacgagttgggtttaacgaacaaaaaatcatatgtttaatgacataaaagatataaaataaattcaattattttaataatttaacaaattttatagctcttccttatttggtcaaagttatgccaaatgttgcaccaactctctgcgcgctgaaaggttgtccgccaggaatgcttggccaattcggcggaattggtggatttcctggtggaggtggatttcctggtgcataccctggtggaggtggatttcctggtggtttccaaggtaaaaaatatcctggtatggcatacgatccctacgcttaaggagcgcccgggtacccaagcaacgaccaaaacggtggagcatggaatggtggtccgcagtacggcggctaatacgccggcgcttggcggtttacaaggataaacatcgaaacaaatgttatcgtgaacaaatccatgaattttatctgactaaaagatttgaggatatttgcatttaatattattattatttgcttctatttaacaatctaaggattcaaacaattaatgatgcttattacggaataaaaaattaatttgttaattaaagctttatttacataattattttatcatttttgttttatgagaattccaataagatcttgtgtaaacatgaaacgcattaatcttttttagcgccgagtaaatatataaaaatttaaaaaacaatgggctaaaaagaagtgctttccatttttgaggtattagacgattgccgagataaaaaaatgtcaaaatgattgtgctacactgaataaaacgccgtggtgcgaagcagaactcgcagtgggtatgcaaataattacaggaagaaagaagggttgcatcaaaaattggaactgtaaatgtttgctggatgaaacaggaaaagtactcaattgcaattttttgcaaagaaaaaatgatacagag

SEQ ID NO: 7982 - DNA, 4407 bp, Heterodera glycines
  unsure (1)..(4407): unsure at all n locations
cccaataaatatgcacaggtagtttgacggaatgagaaaaatggggattccggtttgggtgcactaaatccaccccgtatcgttttttgataatatttgatagagaaattttgcaaaccatttaaaaaaattatggttccagctccatttaattttaaggttggcttttgagacatatgaccgtttcgcagcaaatacctgtgaatttgcgcaattatatctcaaagcggacaacgactggtggttagtgttcaaaaggatcgaacggcgaattttggtgttgtttattttgcaaactgtgactacgtcgatcgttgacattgaattttacgtggaaaatattgtgaattctgctcctttcaagattctctttttcccttaataattcataaaatgacaaattattcaattggatttgcttccgttgtctctgagactttcgtttgttaatatttggtaaaattttagatgattttacaattaattttttaattaatttgacaatgagtgatgacgaggattacatgtcaagtgctttcttggcaaaagtggaagatgttaagccaggtgctgtgacccattcacccatgaaattgttggtatttgatttttggtaaaataattcccttaaaggtgtcggcaccggaagagaggggcgtcgaattttgcgaattaatgccaaccgagaagaggcgattgaaagacagcgggtggagaagccaaagtcaaaagccgaacttgaaagggacagactaatggagggactaaacgatccgatccgagcggagtcaaaaggctttcaattgttggccaaaatgggctacaaagagggcatgcgaatgggaaggagcgcagcggacgaacagcagatggacagtcggacgaaggagcccattctgatccaactcaggattgatcggtcgggcgtagggatggacgagcaccgaaaggagaagcagagggatttgtgtgaagcgcacatggagcgaatgaagcgacaggcggacaatgaggtgggacgcaattggaaaatgatgggcggggaatcgatttttaaaggaagaattggccatcgatttccgaagacgcaaaagggcagcaatggaaatgaagcaactgatctcggagatccaaaaactgagaaagacgtgccaagagatggacatgcggtgggcattgngagggagttaagcgaaacattggatttgttcagaatgggcaaaacaattccagacgaattttggttttggccgatttattcgaacaataatgaattggtcgacatggtggaagtggtcgacaaatcaaaccaatcgatggatgaaaacaaacggacaaaacgagagccttcagaaggagcggagggccaagtcgagcgatacacatacggcaacggggaggaggcaccgatggcactgaatcttaacgagttggacaatcggcacttggaagagaggtgggagatattgttgggcttcgtctagcacggcattctcccattattcaatacggtgcttttctgtcaattgcaacccgtgggaggctgaaaagtgaaatattcaaaattgcatgaaatagttttcccctttgtggactctagtttttctctgcttctcctgggggtggtttagtatattgtactgacaatgaatcagaggcttttgcggttaagtcaatttaagaaacattttagcttgacaaaaatcattgcgtacatgcggaaagtgcacttttattgtctgtgtgagtgtatgggttgtcaccaatttgcttctcccattctcagattgcggatgcgcattttcttcttcagaagagattgattttgagtgtccgggaatcattcgcgatgatcatgaataatttattcgtacaataaaattttttaccaaaataaaagtagccaatttttttattgctgaaacgtcaactgattcttagtttttatttaattttttggctagtcattctaaaattttaaagcatgaatacgaagacaaatcaaaagccgatcaaagttttatgtgcgggcgatgtcaatggaaagtttgcgcactctcagcgcgtgttaaagcggttgaccaaaaagtgctttattatgaagttgatccatttctatgtgtttgttttttcagtgcggccctttcgatgcacttttttgtgttggcgaatttttcggaccgaacgacgagcagaacaaatccgttttggagggagagatgcagctgccgctgcccacttacattctcggtgtgcgtacttacaattagcagggtgcctaatgtgccgttctaaatgagttaattgccaatttgataatgcttccgattcccaagcaggtccttcttgccagttcaccaccgtttactttccgtctgaaagttcggagctttcccaaagtctcacatttttgggtagaaaaggcattttgacaacagcgagcggaatttctgtcgcttatttctccggcgttgaagaaagccctggaggacaccagcaggacgagacgaaaccatttgaattcgaccagaaagcggttgatgatttacttttgccactctccgccaattcgggctttctcggcgtcgatttgctgttgacctcagtttggccagccgatgttatgccttcccttcttcatatgttacctaatccaagtgattttcaggtttggaaacactcctccaatcagcccacttctccgcccaatgggtccaaattgatctcgcggctggcggcggggcttaaacctcgttaccatttttccggttactttcaatgccaaattattcatttgcattatttaatgataaaaaaggtcatggagtccattacgaacgctcgccttacaggtgcttcttctttctgtttaatattctgttggtttttgttaaggaatcaccgcgttctgcttgaagctgcacaacacgtcacgcgattcatcggactttctccggtggacaatgcgaaaaaggaaaagtggctttacgcctttggcattgtgccgatgcgcaacctcccccggggcgaattggtctctcagccccaaaactgctcggaattcccttacatggaaatccttcaggtaacttttctcttaatttggattgccttttctaaagtaaaatattttaggattatcttcggcaaaaggctgaggaaaatgaacgacgaaaagccgcggaaggggcggcggtgcaattcttttacgatatgcaaacggtggaggaagaccaaacggacgtcggggaaggtcgaaagcgacggaggggaggcggacggccaacggacggacagcggaggccacggctcgacccgaaggcgtgttggttctgtctgtccaacgcggaagcagagaagcatttaagtgagtgaaaccagttgaggaggaattgtgagtacgttttcacatttcgtttggcaggggcgtacctagaaatttttttcggggggggggcccgacctgatttatttattttttcttttcaacggttgcatgacatttgcggcctgctgaaaatcggacatttgcggctcaactttttcgttcccaacaattttccatccaatttaaccgatttttatgctcttcctaacaagctgattcaagtcttccataaaaaaatcctaacccccacccaactggaagcaacgaagaggaggaaaagaatatcagcgaaacaagtcccaaaatgatggagaaagtatgaacattattagggaatatcagatcgctacagtatcaactggtggccgatgcaagtgttgatagattgattagcaaattccaagctcttgtgggggtttgacaagtccacttttggaaaaagaattataagattgaataaagttcggcgtaaattttaagaggaaaagtgattttcgataaataaccctattttggttggggtcggaaaagccgggccgcatttggaattaaaaagtggtaatttggcgttccgttggccgcaaatgtccgaccgcttttgtcgggccgcaaatgtcttaacacgcttttcaactgagacttttttttttttttgctcttcaactggacattttttatttaccaaatataaaaaactttgtttcccgctgctgggcaaaaactcctctttttcactaaaaattacccaatttgtccgttttacggcaaaaaacttgtaaaaatagtgcaaaattgaggtccggcggtgccgataggcgccgccgggaaaatttgagtgctatttgttacgaaaaggcttgcctttggcatggtttccctcactcaccaattttctccttgtttcccgccgtttgacatgggtttcccaatttgtctctctcttcacaatcagttgtttctgtggcttctcacacttacgccgcaatgcccaaagggcctttgaatgatcgccatttgct

SEQ ID NO: 7983 - DNA, 2125 bp, Heterodera glycines
tccctccctcttctgttttccgcgtgggatggctcgccagtgatgtgaagatttctgcccgtcattttctctcatttttccctttagcatctccaatttcaatttgttccaattccaaaaacaaaaagcaaagcattgcgcagtacgtttctcaatttggcacgtctcaagaacattgaattttcatttttaaaggatgaagacaatgtgagttttatttgtgtccgagtgttaatctctttgtttttcttggtttttgtttcatttgtttttaattaagtgaatctctaaaatttactcaatttcaagctaaccaaacccaaagtcgaaagaaacaaaatgatactacgagccataaaatactgttactcttttccattttacagctttgggatctcgtcggagagggttctccctatttttatgccgaatttcccgacggcagcaaaatgttgagccgttcaatggcacagtttcccctccaatttgggagagaggtaaaaaccagagaaatatctaaacatattttttatggctcaggtttttgccaacaaggcccttttggactgtgaagaaaaggtggattggaggaactgttcgctaggcaaaaaggaagaagagaagctgacaatagcacttaaagagggatttaaacctttcgcttttacgggcgatagttctggagatgaggattgaaattgccatgtttaacttgattatctccgtttaataattttgcatgaattgataaattcctctgttaatcacagtaatcttcattcaacacttctcacttttgttcgcataggtcggtctttttccattgtgtggcttcggtttttgcgattgtgttggtatttattagttattccacttacaattagtgctcatttatcagtttattctgtttctcgtcgaatggttctcccttctgttctaatcattggcggtgtttgtgggagtgggaaaagcacaatcggaaaggaattggccgaaaaaattgcttacaccttcgtcgatgcggacgattttcatacggaggaaaacaaagctaaaatgagcagaggggaggcactctccggtccgaatttacttacagaaaaacgaatgggggggggggagtttaaaattaaccaattcatggactaattaacatttttaattaggtgtttcattaagatgtcgatcggatgccatggttggaaaaggtttctaaaatttgggcgaacggagaaaaagccgaaagattcgtcgtcgcctgctcagcgcttaagagaaaataccggcaagtacaaattaaggcaatgctatagattactgcctcctcttcctcctcttcttccgatttcatttttttctgtctgcctgtgaccaattcctccaattcccccgtcccatcgcccaattcgatcaattcgtcgcttttattcattcgttttgctttaataaattcgtgctgaaacggcttggaggactcgtaaaggagggaaaagcaccctccacactccatcacattcggcaaattctcgtgcggggccaaacggaggcgcccattcccgtcttgacccctccctttcccgacagcgccctcgtcgttctcccccaattctccctatcacaattcctttccttttggcattggaggatccgggaattggcccggagcatcagcgaatttcaagcagttcagactcccgcagccggagtctcgcggatcggtatcagtctcccgctagccggagcaaccgtagggacggggcaaattcccgtcgtcgacgaatccaagcaggccagtgaaggaaggaagagccgggcggtgccaaatcgtccaacgaacgacagggccgttcgtcagcgcaactcccaccagccggagaagcgcgcagtgggcgggagtcgaaacccgtgatcgtcgagtcgagaacgaagcagcagttcaaaggggtccgacaagcccttctccaaaccttgtcggtggtgccgttaagcaagcagcaaatcgctgcacaatccatcaagcacagtccattttgtcacccctcccccctccattttcgtcccctttggcgccgatcggatcggtcggcagcatcaaaccatcagagctaacgccaaagggggcgca

SEQ ID NO: 7984 - DNA, 2558 bp, Heterodera glycines
taatgtcaattagttttaccatcaacaaatattgactaattaagcgtggataaatgacgaaatgttgagggtattgaaaatttttacaaggttttacttggtttgctcaaaagtcacataacaaaattttgctggataaatttgaaatgaaatggaataggaaaatgatgtccaaaagagatgctaatttcattaaataggattacttttccaaatttattggattttttttttgctcaatttctttcagaaattataattattatttttttaaatatagttgagtttttttctcaaaataatcaatataaattgtttttcacttatgtttgatttaacattatgcatatgttatgcgcaaaaatgtttgtttataatttcaatttccgtaaaaatttccgcagaaaatttattaatattattttgctgttaaatttataaactatttttttttgttaatattattaaatttatataaaataaatgtaaatgcattaataatttttaatatttataaattagtccctttaattttataaacgtttagtaagtagagttgcacgggaccgggaccggaacgggaattcccggtcccggtatggtcgggaccaacctggaaaaaaagaactggtaagaacggtggtctgatggaaaatttgtaatgtaattgggagaaagaaaattttgaaaaaaaaatttattctcaaatggcctagtggctattcttcctggttttcgacttgttgctcttggttcgattccctcctaggaattaaatattttttcatttactatttttgtctgtgtaatacatactatgatatttcttaactaactttctatttttgtgtttaaaaattctgccaaaatacaaaaattgcattttttaatgcaaaatctaagccaaatcatggcaatattttcaaaggggaattctacgatgactttataatgcctatttctgcctatttcggggtttttgtgcctaatgtgcctattttaaggatttcgaaaaaatccttaacacaaatgcaataaaacgaaaaacacacccctaagaaatggcccaataaaattttagaaaatacacccctaagtttgaaaatttttttccaaaaattaatcccaaaatttaatattttattttcttaataaaaatttttggtttaaaaatttgtccttattcgaaaaaagtttgaattatttaataatttcatttacaattgaaatatttaagtttttacgtgttttactacctaaaaagggttaataaaaattttttttgcctattttgtgattttttctgcctttttaggtgcataattcgcgattttttgtgcctaaaaacgagccctaatcataaattccaaactgttgaatttttgcgcggtttctctggcataacaaatgccatattacacaaatcaattttataatttcattttatagaattcctcaaaaatctgaatcgactttcgaaatctaaaaaaactctgatcgagtctttcaagtcgtgaattgttaaatccttctccacctcccatgtcctttatcccactttctcccacccgctttctttcttttgcaacatagggccaaattggtaatagtactggcttttgaaattaaaaaattggcccgatttacagaaccaggagcaaaaccctagcatcttttgaatcagtattgaaaaattccgtattgctcctcgaaattttcacatattgatagagcgatgaaattgggtaattcccgatcacttccccaaatcgcataaaaggcatctttttcatgtgcgcggctcaattctgcatttgtatgggatgggatggacagaaaagcccttttccttctcagaagacggagggctcagcggatcgacgggcaaaaccttgacatttagtgatcagactgtgatgcttacgatgttttttcaccacttacagtgaaatttcggaaaaaatttgccgtgaagagaaataattccatccgggccagcgattcgcccatgcaaactctaaaagataataaagaatttacacttttttgcctcgttttcgacagcccaagccaggcatttgcagtaagcctgagtttggcgacagatatcagaaatttaaaaaaactggatttgtttatttaaaatttgagaatccagggccctccgagccggcaatgtgaacaggcgtgaagccaacaaccttttgccaagtccgaacggaatcagctcctcaaatcgctccaattggcccatttggttcaaaaagcgctccggaagaaaccgacgagcattgggaaacacctttagaagaaagcggaagtagataaaattgaaggataaagccggatgcactttttcatcaaacagaacacagctgatctgagggacaataattgtgccacggccgagacggaaattggcgcctccgcccgccgcaatttgcacgtcggccattgtccgatgggtcaaattcagtggcaaaaggttgcacagccgctgcgtttccttccaataaagtaagaggggagaaggtgaaaagtgatcgaagcagtgatat

SEQ ID NO: 7985 - DNA, 1350 bp, Heterodera glycines
ttccatttgtaagaggggagaaggtgaaaagtgatcgaatagtgatattcgagtcagagttgagctcgagagcgagaacggtctcgacttggttcaattcttgtgagattaagaagaaaaagccacccaatttgctcgatcatatggatcaaaagaataaatggatgacttgagccgacaattgatcctatcagctctatctcagtttgatttctagtccgtaaacaaagaattgctcccgagacgcgaaaattagctatttttttttgtttttgaaaagagctccgctgagttctgacccaaatatcggaattccgttaccccccccccccccccctctctcctttcccatctcttacattgatcactgcgtttacgtagggcaatttgggccgatcagccgtcgtgatcatcattttcgcctctttcccctccgtctcgtttctctcttccttttctatgcataactcatccaactccttctgcattttttgttggacccgttggtccaatagcaaataaaggacgagaaaactgagggtgaccgaagttgtctcctgtaacggcacaaaatcaatttgggacaaatgagcacaacggatacagacaaatgatcataataatgggcaatgggtgaccaatcatttaccaattttttgccgtatttttcccgtgtgcctattctgaaattgtctgagacatcattaaaatcggaattgtccttctctctttaattaaaataacatttcaccccattcaaactttgaaatgaccaccctttaaaatagggttgcttcccgcacatgtcggggatcgggtctgtggggcgggggggggggctaaattgtcggggatcgaggaccccgatcgggtagtgatcaacaaaattttttaaagaaaaaaccaatttttctttttaaatgctcgtaaatctaccatttttttcactttaatcatctgattcaaattcattctttggtgccagtaaaagtgcgtccaatttggtattttataacaaggcatcccaggccccaaaaattttcagaaatcggaaatcgaattccgaggctcaaaaattttagtctcaaaaatttgacaattttagcggtgcgcttttcaaaaactttttggaaacttggggtgggaggatgtggtccggcggtgccgataggcgtcgccgggaaaatttttgaaaatgaatatattgttaagagaattttgtcctaaaattatccattcgagccaatttttaggaaaaatttggagttttggggggccggctgtgccgataggcgccgccgaaaagtttttcgaattttttatttaattttattaagtaattgttcaaaa

SEQ ID NO: 7986 - DNA, 1274 bp, Heterodera glycines
gattgtggagccgatcaaacggttaatgtgcaaatacagctgaattccgcttgtatcttcctctgctgctgcaaaagcgatctgttgccgaattcgcccaaacattgtgttgatgtcgctcaaatactataataaatgcacaataagggcttatgtcgctgaactgcttaaactttcgccactattgcccgtactgtttcaacttccgccattactccccggactggttaaacttctgccactattcctcttattgcttcaacttcgtcactattcctttcttcaacttccgccaatattctatttactgcttcaactcccgccattattccctgtactgcttcaactatcgccactaagcccataatgtttcaatttccgccattattctccttactgcttcaacttgcctcgcttccgcacccccctcctcaccttttgctccaaccgcgcctttcccatccccaaattgcgcatcgcaaatttgcgtgtcactttccacaattcgccctcggttctgatcactccgtaacattttccatgggatgctaaacggttaatcaattgttatatgaattgggcggacaaaatgccattctttgccataccggcgcacactttgaaaagttcctccatgaaatccctgccagcaaatgtatcaccgtccttgacgaacagttcgcgcatcagttggaagtcggccacgaccacaacgggcagctcgccaagccaaatggtgtaaatggggccgaacttacgtgcccattgttggtagatggcataaggacattttgaactgtttgatgtaaacggggggaggacattagaatggaagaaaataatggacgaggaggagggaaaggaagtgagaattggattaagaggagaaaagggggagaagtggaatggcagaagaggaggaggagaaggctctgggagagtaaaaatgagagaaagaaatagagagaatgagaaaagaggaaaggagaaaaagagagggacagaaaaaggaagaggaaaagcaaaaagaaacggaaactaaaagaaaaaggtagaggaaaggggaaaagggaaaaagagggcgaggggtagaataaagaggaagagaaaaaacaacagaacaaaagaaaggagttatgggggagttttaatcaagtgaaaggatgaagaagaaacaagagcagcagacggacaaaaaggaggcagaggaggaagcgaaagatgaaaaagaaaagaggaggtgaaaagaggggaaaaggagtaaaggggggggg

SEQ ID NO: 7987 - DNA, 982 bp, Heterodera glycines
cagaggcaatggcacggcccggggcggcaggtctcgtcgcttccaaacaaaatgccaaaagaggaaagcagagaggaacagaaggccaagcagtggcagcatcggctcacaatggcaaaatttaatttaatttaaaatattaaaagagccgaaattcaaattttacaattcaaattaccccagagaacaaatgcagagaaaacaaaatctcgtccacatttacccatatgcggtatttcgcaaaaaatactaaattataattcaataaaaatggaaatacgcccctaaataccgaaacttttctagaaaatccgaaaattaatcagtccatccctttttgtaggacgataagagtaaatattttcaaaataaattaatttgtaaaataaataatggctcaagaaaggggctaaatgaattaacggagagagtgaaagagagaattatttgttaattaggcaattagagagagaaagcgaatgcaatttgttgaaagttggtatagtcttggtttgtgtttttgcgttgtttggtatactttgaaattgttaagactgacgtcgtaccggttttccctttggtgttgcccattcaaccattagcgatttgcatttgttgtttatcaatttatcgccgccaattacgcatttatcaattggtcgatgaaaaaaaaatcaaataagaaaaaataaaaaagtgtttttacaactatgtagagtccatattcttaggcactaaaaactgccaataaataagtaggcccgaaaagacacacaaaataggcacgacaaatgggaaaatggtctccaaaatttcaaatttcggagtgtaatttaatataattagatagaatagcaaataatatgaaaaacaataataaaaactacctcccttcataatatccaaaaataatattccggcgttttacaatttgccgtaaatacgcgttttaggtggtgttttacaatggaaataatatctc

SEQ ID NO: 7988 - DNA, 1062 bp, Heterodera glycines
tgctccaatgacatttgtcggcttttaagccaaatgggggacttattttgtaattcttccgtaccgttttcagttctcactaagatgtcagttttcgagaattctgaaattccagcactacatgccgaaaacattgctccaattgacatttgtcggccttttaagcccaaatggggacttattttgtaattcttccgtaccgttttcagttctcactaagatgtcagttttcgagaattctgaaattccagcactacatgccgaaaacattgctccaattgacatttgtcggccttttaagcccaaatggggacttattttgtaattcttccgtaccgttttcagttctcactaagatgtcagttttcgagaattctgaaattccagcactacatgccgaaaacattgctccaattgacatttgtcggccttttaagcccaaatggggacttattttgtaattcttccgtaccgttttcagttctcactaagatgtcagttttcgagaattctgaaattccagcactacatgccgaaaacattgctccaattgacatttgtcggccttttaagcccaaatggggacttattttgtaattcttccgtaccgttttcagttctcactaagatgtcagttttcgagaattctgaaattccagcactacatgccgaaaacattgctccaattgacatttgtcggccttttaagcccaaatggggacttattttgtaattcttccgtaccgttttcagttctcactaagatgtcagttttcgagaattctgaaattccagcactacatgccgaaaacattgctccaattgacatttgtcggccttttaagcccaaatggggacttattttgtaattcttccgtaccgttttcagttctcactaagatgtcagttttcgagaattctgaaattccagcactacatgccgaaaacattgctccaattgacatttgtcggccttttaagcccaaaatggggacttattttgtaattcttccgcaccggtttcagttctcactaagatgtcagttttcgagaatcctgaaa

SEQ ID NO: 7989 - DNA, 1521 bp, Heterodera glycines
  unsure (1)..(1521): unsure at all n locations
tttaagcccaaatggggacttattttgtaattcttccgtaccgttttcagttctcactaagatgtcagttttcgagaattctgaaattccagcactacatgccgaaaacattgctccaattgacatttgtcggcctttaagcccaaatggggacttattttgtaattcttccgtaccgttttcagttctcactaagatgtcagttttcgtagtaccgttttcagttctcactaagatgtcagttttcgagaattctgaaattccagcactacatgccgaaaacattgctccaattgacatttgtcggccttttaagcccaaatggggacttattttgtaattcttccgtaccgttttcagttctcactaagatgtcagttttcgagaattctgaaattccagcactacatgccgaaaacattgctccaattgacatttgtcggccttttaagcccaaatggggacttattttgtaattcttccgtaccgttttcagttctcactaagatgtcagttttcgagaattctgaaattccagcactacatgccgaaaacattgctccaattgacatttgtcggcattttaaacccaaatggggacttattttgtaattcttccgtaccgttttcagttctcactaagatgtcagttttcgagaattctgaaattccagcactacatgccgaaaacattgctccaattgacatttgtcggccttttaagcccaaatggggacttattttgtaattcttccgtaccgttttcagttctcactaagatgtcagttttcgagaattctgaaattccagcactacatgccgaaaacattgctccaattgacatttgtcggccttttaagcccaaatggggacttattttgtaattcttccgtaccgttttcagttctcactaagatgtcagttttcgagaattctgaaattccagcactacatgccgaaaacattgctccaattgacatttgtcggccttttaagcccaaatggggacttatttttaattcttccgtaccgttttcagttctcactaagatgtcagttttcgagaattctgaaattccagcactacatgccgaaaacattgctccaattgacatttgtcggccttttaagcccaaatggggacttattttgtaattcttccgtaccgttttcagttctcactaagatgtcagttttcgagaattctgaaattccagcactacatgccgaaaacattgctccaattgacatttgtcggcattttaaacccaaatggggacttattttgtaattcttccgtaccgttttcagttctcactaagatgtcagttttcgagaattctgaaattccagcactacatgccgaaaacattgctccaattgacatttgtcggcattttaaaccccaatggnggacttattttgtaattcttccgtaccgttttcagttctcactaagatgtcagttttcgagaattctgaaattccagcactacatgcccgaaacatttgctccaattg

SEQ ID NO: 7990 - DNA, 6785 bp, Heterodera glycines
agcgcttgatgccgaaacgattccgacccatttttgttaggttttcgtgtggcaaaattagccaaaaaaaatttttccacatttggcgttgcgcttttgcctctgtttaggtgtcattcaaaaacatttaattgcattttttatttgattaaaacaaaacttttttatgtatgtataaacttgaacaattgctaaaacttaatcattcactgtaaattaattaattatccaatttgttaaattgtttatctatgtaaattcttccatttttttttacaaattgatttaaaatttagcattttccattaaaaaaataaaatggtgcgcacattgaaattccatgagaaaaagttgctgaagaaagtggacttcatcaattggccggccgagttggacaacagtcttcatgagaacaaaatcatgcgccgttaccatgtggagaagcgcgagcactacacactgtacaacaaactgtccagagaggtacgacgaataatgaaatttgaacttgtgggcatggttttcatggtaaaacgacgaaaatatttccaaacttttgaaaattacaactgcttaggctgggcctcccaggcttaaattaacaaaattctgtacgttttgcaattgatgcgttgcttttagcgggttgggcaattcgggttgtccgcaaattcaggctgatggccagggggttgggggtggtagaacccgggaatttcgaaatttgctgacctcggtgcgctgcatgattgaaacccaaaaaagggttgcgattttgatcgaaaaattcgacttttgcagggttttttttgggggggggggaggggaggggtccgtgccggattattgagttttttgacgggtttactgggtttacaaccagagtttttccttcctcataaaaaaaaccttttttttgcagatccgagaaatggccaaacgcatccgcgagttggacgacaaaaacccgaacaagttggtgttggcacggatgctgctcggcaagctgttcgacatgggcgtgattccgaccgcggacacgctcgagcgatgtgacaaagtgacggcatcgtccttttgccgccgtcgcctccctgtcgtttgccacaaaatgcaaatggcaccgacggtaaacgcagaccaaaacaagcaattgcaacatgcattttcatatgcttgctttgagtgatggaaattagggtccatttttatacggaaaaattttcaaaaatgggggaaaagtatttttgtgaaattcaaatcttgttgggtaaaagccttccggtccacaaaattttaaggcaccgcctgaaaatttagggtcaatttgtttgaaaattgagtaaaataaaataaaaaatatccatttttcctggattttatagggtaaaacctttgtacgcctacaatattttctgtttatggacacttttcagttatttcgttttcaggttaggaagtccagccaactggtggagcagggccatgtccgtgttggtgtcgaaatggtcactgatccggcctttttggtcacgcgaaaccaatcggatcacatcacatggacgcgggaatcgaaggtccgaagacatctcagcacttacaacaacgaattggatgactttgaggggtgttgatttgaagaagccaatgaaataaaaatacatgaaaaagacgcatataaaccatttttttttgtttcactgcaatttgtttgttttgttttttgctttttattgttgttgaactgttttctcatggacggtaaaactaaggaaccataggaattttggaaagaaccagaaaggccggcagaaaatgcattttcaattggaacctaaaaatttgttttttaatttaagataaagtttgccatttttcggcaacatggtttttaatgatttcggaaaagattctttttatctaaagctttcgaatgacacaaatttagttggccataaacctttaaaaattaactttcaaaatttttaatgttttgaagaaaataattgaaaatattgttgtcgtgtagcggattcgaacccccacccttttccctttactgtcttgcaaaagccacttgaccaccatacaaacgaatttttcgccttttcgggatgccatttctagcagggatggcacggaattccgacatttttggggcctcggaattctgatcgaaatttttgataaaggtcggaatttttcggaattttttttgagtttttttttcaaaaaattagcaatttttgtacaattttctgttaataaattgcattgaaatttttaaaaatttcccagcggtgcctatcggcaccgccggacctaaaagtccttaattttcttgaaaatgtgctggaaatagctaaatttggccattttcgggtacaaatctgttaaccaatagcatttttccggcggcgcctatcggcggacccctccccctattacccaaattttctttggataaagcgcgcagcaaaaaagggtgtaactgtcccaaaaaaaaaaatcaaaaataatgtaaaattacataaaaatattttgaaaatcattaaaaaaaatttaaattaatatagaaatatactaaaaacaatttgatatcacctttacagggttaagaattttaaaatgtagcctattaaatattaaaaatttttttaaattatattttatattttttgaaaaattccgacttccgaaaaatttttgagcctcggaattccatccctggttcattgtcattggctctattggcgtgctagaaaatgccgccattggttcagttccggaacaccgaaaatcttttttttttttaatatttttatgcaatttttatgcccaccccaaaccataattgtgcaaggagaaaatgaaaaaatttgccaagtgacctcctcccaacccaaaacgtcaccgaaagattttttgtcctgaattttcatccgtaaaaaaaatattttttttaggatttacagattaatagctttttcaagtgctttcaagcaataccaagaaatgtttaagatgaagttttgtggttttttactgacaaattaaaatttaatttcataatttttttcttactttggaaaatgttttatttttttaataaatttccccccccccccctccctccgattactcacttggagtgccgattggagatgtctgcgcaatgtttggtgcatctgttggggctcgtccgcccggcgacagagcacggcatggcaccgcagttcgggcttcatccgcttgccctcgtgctttacaaaaaacgaagtaaaaaaaaactattcccaattttaaatttgtttgaaaaaaccaaagctaagggttcaaaaatcaatgttttacgtgccgaattaggacttgtatctgggtttcatatttggcctggttttctggccaaacaaaaatacaggaaatccaaggcctggaatcaaatttttaatcaattatttttgtgatttttaattgggtcccaacttttccatttaaaaactccgagaaaattgttttttttttgtttgaaaaaacgaattaaatttttttcattgaaaaaacgtttagaaatggagaaacatagccaaagcagcaagcaccttgtaaatccagcagaacacgcgctaaatttaggggaaattaaaaaaaaaaatttttttttgcacttttaccgggtattgactgggcgccgccgaccaagtgattcggtgcgtaaaatattcagtgacactgaaaagtgtgggaaaatttaaatttgaatttcttacatataaaaatttacgaaaaaaaattgctggtcgttaattaacataaaaataattttttatttgaaattttagattttcaattaaaaacaatcaccacggcaatttttttgccgtggttctcaaagaaaaaaaagttttcaaacaaaaaaataaaaataaggagagggagggtagtgagaaaggcgtcgccggtgaaaactttgaaatttttaatcaaattgcaccaaacaaactcacccaatgcacgtctcggccctgagcccagaccggcacacgcacaggcgcatcgccaactgttgcgcctgttgctggccaaaagtggcgccggcgctgtggcgcgtcgcgcctttggcgacggtggcgccccacgcgcgcgtaatcactgccgaggggagggggaggaaagtgttaaaaatggaaaataggacacaaaaaatataatttaaaaaaagcgccaaaaaacgcaatggcaaaaatgcaaaccgtaatttttgaaatctgtctattttttgcaaaaagccgctacaaaatcggagggtgggcaattgcgcttttaaaatttaagggcctttttaagtcgatgaattgaaaacggaaaaggcttaaaacaatcttctttgtctgttgggccaataattttcatggtgttagaagttaagagaaatttcaatgaatgaatgccgcggaaaaagcccaaaaatcagggcaatagtaacgaacattggtcctgaatttttttaaaatttatttaggtaacccgaggcgctgagcacgcattgccttattttggctcaattactaacccgaaccacaggctcgaaaatttttcgagaatttaaaaaaaaatttttggaattgcctggctattattattgctcacaaccagtttcatccaagatcccctgcgtcattttccaaaagattgcaagattcgtgctaattgtaagaaataattttcttaaagcaaaaaaaaaaaaaaagattttcgggacaaataaagagaagtaatattgaaaaaaacacgaaaaaaatctgaaaaattggttggaagactcttttttccaacgggtaccccccaaggtcagaaaatcctttaaaatttcaaccaatttcagtcctaaaaattcccaaaaaaattaaaaccttccaacggacggtcaatggacgtgtcgcccttgcccatgattgtcaacatgttgccgagatatgtcacctggaagacggacaaatgtcaatacaaattgaaattgacctatttcgagggtcatattccccctcccccccaaaaaaaaaattagaatttttcggtaacaaatggcaaaatctaatgataacgaaaaactgcaaccagatccgttgaaaaattgggcacatcccttccaaggccttaattttcccaagtttaggattttaggaacgtggttgctgtcagttttattaacgttgatcaaatggcagagattcgaactaagcctttagacagtcaactcaaacaaaaagtttttttccccaaaatttgtccccaaaaattttctaataaaaatttacaaacttgatgcgttggagaaagggtgtatattcggtgagggactttgggatttgctggggttcgggttgagattttggggtcaaggaaagatttacttaattttcaacaccactttactgacaaggaattagagaataaggtgaattgcaattagaaactcaaacaacagtaccaattaagcctttgggcgtttgttgttgttggatgacagtccacggagaaaagcaccaaatttttgtagttttattacaatgattcaaaagcacaaaatatataaaaacttgagagaacacgaagacaaagacgaagaccaaaaggaaaattaaatgaaggatgcaaaaatattttaaattaacgcgaaaaacaatcgttgcaaaaaacaataaaataaggataaatcattatttatcctacgtcccccgccgtttgaagaccagtgtcctcacggtctgatcgccgcgcacctcccccggatcagcgaaagacgagcgcctgcgagatggtgtcggtcgaggcggtccagcagtgaaattgtcacaatggaaaaacattctgaaaaaataaaaaaggggatgattgtggggggggggggtgatcagaattgtggcaacggatttcggccaattggagaaaaatataaaaagaacaataaaaatgcaataggccatgtatgagaataacattatggtccgaagctgaagaaataataacaaaataagtaaatttaagtcattgcgagccgcttttccacattttaaattcttataataacgaactgggggcatttacaaggataggcgaatttttgatcaaaaatgggcgagagaatttaattgataataggcttgggagaagaattttttggctattgcttggttggcgaaaaacatttttgtacttggaattaacaaaaacacgtcgtcgtcgttcccgtttggtctgtttttgatccaaatcctcatttttatgacggattgcattaatggctaatttgattggtgggctcgggatctttttggggattttttgaagtttgacaaagggggtttgatcggttttgttggaagcaatctttgaattggatgaaaccttttgaatgaattttatgcgtttgacaggggaaattgatttaatcacttcgttggaaatgattctcgattgtatggggcgcggtacaatttttagggaggagattcgaccagagtttggcaatgaattattcgaatgttttggactctcaccgaaattaattatttcatttgtaattacatttccgatgtaatatccaagagaacttaacgcattttgtccaagaacaaaatcgtaagggaaaggttttttggtgaccacacaattaattttgccttgccaatttcctttttccatcggcacattcagtactccaatcactggtactcttccacccgtaaaagattcgacttcaaaagggatctctgactttcctt

SEQ ID NO: 7991 - DNA, 2959 bp, Heterodera glycines
tgcaaaattccagaaaatgttttatttttttgcggcatctaaatctaaacaaaatcattttttgttacccattttaattacttatttatttttgatgatgaataaatatggtaaacattttgattgtgatgcacatgtaccagggatggcacggaattccgactttctgattcccaaaaaaattataaatttacaaaaaaatttgtgaaaaagaggagcaatttaaacaaataaatttgaagaaattttgcacccaattttgaaaaatttatgtccatattttggccatttatgtccatattttgaccatttttgccatttatgtccatattttgcgatttttggtccatattttatggccacatttcgggattttatatccatataattttacaccctactaattagctgattaaaatgaaatttaatttaaaaaaaccgagatttcattctaaacttttttatttccatttctcgaccaattttgataaaaacaaaaatatattttaatgctcaaatttgagggacaaatttttaactaaagcattaagcagaaagttactaatccaaatttcgattcgaattttgttccggcaccgaaaatgatgatggataatgataaaaacaaataaatgtgaaaatattatcaacaaaaattttttaaacaattttaatgaatcgattaaagtcggcgattggtgtcctggcaatttcttcggcaaagaagcgatcgctgggatggcagaactgctccagtgtgatgtgatcagccgtctccggcacgtagttggccttgcgcagtcgaaaaaggaactcgtggcgacggcgcagtgccgacaacggacagcgcagggcgagcggaaatgccactgaattattttgtggaaaatgtaaaagtgcgataaaattgcataaaatttagttttctaaagaaaaaataatccgaatttcgagatttaaaccgagacagaaaatgaaggcttcaaaatgactaattggctttagaaatcattcatgaatttcaatttgcgttaaatgattttgtcatttgattcccaaaaaaaaatttcgaattaacccaaccattttttttcattttatcttctgtccctcacttcatgcattttatttttgaattgctatttgtcaaggtttaaaaaaaaaataatcggaaagaaaacaaaaaaattggtaacacaaagtcttgccattttatagggacctctatacgaaaaacaaagtcagacaattggaccctagcccctgattttttgtatggcctctcaatacgaacactttctgattgagggttcgtccctctccattccatggataaatatttaaaaaaacatttcaaaaatgtgctcccaccaatctgttcgttggtgatgcgcatcacgtaggccaagtagttgtaggaggtcaacacgtggggcttctccgacagaaacacgcgcgggtctttgagcacaatttgttgcaggcactgctgggtgaagccgcacgtttggttcagcgccaaaatgagaccctggagaaagagcattcgaatggaaataaatttaggaattttttaagcattttggaccccccaaaattacgggtcaatgtcgaaacaacctgtaataattttggatttgtctggcagctaatgtaaaaatttcgcagggcattaaaaactcaaaaattccgttttgtcggtaggcccattcttcacttctgcagtgggcggaaggaaaggaaaaaaggcgtaaacagatgagatagctcggtttgttaaattcgtggtttcttttccaccattttttggactccgtaattggaaacatctccgtaattacgaatgacgggtttatgtaatgagaaattttgccacctggattgggccgacgccaaattggatcagccttggctctttgacaattgccaggcgcagttcgtcggcgcggagatggaactgacgctgcaaccagcccaatctggcaaaaaaaaagaaaaaaaattttaaattgtacgacaaaaattttgtttgaattagagaaacccggaaaacatttccacaataatataaaattaaaaaaatgcgtcggggttcgaacctgcacaaaacaagttaaaaggaacgatgcacaccacttaccacagaacaaaatttcataacgcgaacgggactcgaacccgtgtcaaagtatgggaaaaccaacaacattcaccacttgaccgacttttaaaaaatgttttcggaaactctaagggttcgaacccaaataaaacaggaattttttttgttttgtttttgtaatttaccgggcatcgatacgttcctgcgggatgttcaaccagtagcggtactccacgacaagtttggcaatctgttgccggctgaaccgatggaattggaggtaatcgagccgagcctgaaaaaacgaaatggaaaattaaaaaaaaaaataaatgaaaaatcgtaaacatttcccgcggaaaaaatgaaaaatgcctacaaaattcaataaaacacaccttcaagtcgtcaaatgactgcaggagaaagtacgggttcctggtcaggtacgggccgatgtccgcctcggggaccccgcaacgtttgaccagccaaaagattttcgctttgatgtccctttccgggtccaaccggagcagggcacggccaattttcggcgcttgacaaacctggcaaatttttatattttttaaataaaatttatcgtttatgggagagccataaacagaaataccattcatttaaaaaattctgagtttggcaccaaaagtgcggaatgaatgagccaaaatgtataatttcaagccaaaatgacaagaaaataggatcagcgatgggtggcgattaatgaagcatttaaacaaaacaaacaataaattttaaatttgttagaaacaaattgtcaattctttcccctttaaaagtttttcattttgt

SEQ ID NO: 7992 - DNA, 3076 bp, Heterodera glycines
tttcaaagaaactccggccccctccctccaatgggctctattttcctattataatctgaacgaaatttttgaaaaatgacgcattttatagaatataggtagcccaatttggctcaattttgcacccattttgtgcaacataaaacgttcgactcacttgagtgtgttggtggcaatgttgacgggtcgaaagggtgtggattttccctgaaaaaaaattaaagaaaaatgagtgaagcgaaggagcctgaaaacttagggaggattaattgccatgtaaattgaaaatttatggtaattgttccaaaaaatatatatatatatttttttttttgttcctaggggagggggtggaaattcacaggaatttgttttctaaatcactcgcctcgacggcggttggccaaggtcacttttgtccagctcgccctccgtgtacaaaattgggcggaatcggttgatcggtcgagaagccgtctcatcgccggtctccatctcggagatgtcgggctaaaaacagaaaaatcaaaaaaaaaaatttgttgtttgatcaaaaaataattttttagggagcggggggggggggggggattttcaaattcgcaccaattttcgttgcaaggaaaggctcggaaacggatgactcggttggttaaattgtttgtttttattggagattcaaatccaccaatttttcggtggtcgtagaattttaatatgacagggaatgaatgaacgaaaagaatgaccaagtggtctttttgtaggggagaagtccgggttcaagaccaccagcctgtaaagttttctttaaatatgaatccaaaaacaaaaaaattcaaaacttttgtcaaagtcagccaaattaaagattcttagtgtcacatacaatagcccttacaaattaaggttctttctctatgtaggcgcaaaattcaagaaaattttatcatgttttattggaagcaatttttcacaccttttcggtcttaaattgtttgaaacatgataaaaaaaatttgagatctccgaaatttatagggtttcacatgcccttgccatggctgactgacctcgttgagcgggtccgccaccatgtcaacgccgagcacatcaccctcctcgtccaacttgtccgcatgatgttcaagcagttcgtccagctgacgctcaaccatttcaaaatgggcccagtcctcccgggcagccaattggtcggccgattcgtcgtcagcgtgggccttcaaaatacagaatttagtcaaaaatttttaatttaatgcatttcttggattctaaaatttataccagtggcgccgaaaaaacgcgaaaaaaagtttaacgtatgtggttcagttggtaaaactcttgtcttgggatgggcctggccgggttcaaacccaccagcctttcaaatatattttttaatggatttgacttcagcctgtgccattctacttatttttggtgaacgacttggaaaggtcgacgattttttcagctttcaacatcccatgtgccaaaaagttcatttttgttgacccaacccagttcgacttgaacagattgtggtacggaaatgactgaccagccgtgccatccgccgattgttgcccatttgcaatttggcatttttcaacggttgttgttgtacttgttgagcctgtttttgttgctgttcgccttggtgttgtgcggttgattgttttttggctccaaccgttgcgaaagcggcggcggtggcacgaaataatggacaaaacaatgccgacgacgacgatggtgaaaatgagggacgacgacaacggagcaatagcaattggtggccaaatgcttggctcattttgataacaaatatatatattgtctgaaaattggatttaaatgggtcatttaatgaaaaagtgacgaaaaaattgtccaatttaatgagttgtgtttatctgcgggccaaacctgtgcggtttacaaaaatgcactaccattccatcggatttgaggtcaaatgttcacaaaactaaggttcgaattttctatcatccgccttcgaaaatgatggaaaaatgcggctttattaatccacaaaaattccgcttttgttcttcaaattagaatatgtaatataacctgctgacagcgctccacaacaaaaaaaaaggcaaaaatatatttgtaactgacaaaaatgatatcataaaatgaatcaaaccaaatttgtctaaaattttatgtatcaatagcttgaagaaattggtcaaacaaagaaaaacggcggataatggcgacgatttgagggtaaacggggcaaaggcgctctaattgttgtgaacacaacaaacgaaacaatcaaaaaatggaaaaaagcaacaaaaagtgatcgaaatcaatcagtgctgatcaagaaaattgcgctctctgatcgaccaatttgatcaaaatcaatcatttcagctgggccgtccaccgagcagcaactgttgctgttgtttcaactgtgccttctccacatcttgcaactccttgtccacaatgtacggcatcaccatgagcagcgcgctggtcgacaacacccaagcagcactgcgtgcaaaagagaactggcaaaaaaaaaaattctatcgaaaaagtcggttttttggatttattgaaatttgcgcggtccaaaaatttacagagtaaaaatttaaaaaaattttcaagagttgaaaaattctgttgttgtcatttttaaatgaatttttttttgtttagattgtaaaggctaacatagtagagaataaagctaggctaggctattgaatgttcccaagaataaattatggcatacattgaaataagcgtgaatctttgcagtcatggaaaatttgaaaatttcaaaaaaaaattattgggggatggaagcttcactcttttttcgcgaaatcggtaccctgaaattaaaaaaaccccaaaatccaaccgaattctgcgctaccacccatgtcaattgcacagtggtggacaacgcagagcgcaccggtgtcggaaacatttccttgagcccctcaaaacgttcgaacgcagtctcctcccaact

SEQ ID NO: 7993 - DNA, 3262 bp, Heterodera glycines
gaaaaaggacgacaacgccaacggggaaatgcgaacgaatgaatgtgaaatgggggggggaggaaaccttttatgggttaaatcgctctcgagaatcggtgaatgaatggctgatcaattttctcccgggctggagcaaaatgctgcggcgcattcttgacaattaaaattgaacggcggcgccgccggcggcatttccattttgaaatttaacagtgattgaaccaaccaattaatgcgtgttgattcctttttttcaagaaattgatcaattatcaagcggcaaatgatgtactcctcgaaattgtcgatatttgatttacttttaaaattaacagtaattgatcaatttattcttttaccaattcttctcagttgtgatcaaactatgaacaatttgcttcaaaaatagattttgaattttctattttaacaaaaatgtcgtttaatgattttaattaaatttaagtgtaaaaatttgaaattagaattacatcattgaaaaaaaaacaattaatattacgtgatcaactttcttttgttatatagcaaaattgaattcaattgaaaattgtgagcattaatcatttctttgcgtaatataattttttgtcaattaaattttctgcaaattgcatttacatcttttttggagtcattttttacgatttccactgatttttaattgctaatcattgtcattaacagattttgttgcaaaaataaataatttcaatcccaaaaactaactcaattttcaattatttattttatttaaaataaaattttcatttatttacaattaaatatttgcattccaagcaatttccgtttaatagaatgaaaaatggatttcccaacaactatttgtcatccatccttcctttttttctaaattattcattcatcagccatttttgttgttgacgttcacattgctgttaaattacaaaaaatttaattgaatttatttattcaaaaaataatttcattttgcttaatggcacactttaaaagcaatttttccttatttggtccttttttccaagacttgcccttaattttaggttttatgtgattgatttcatgagatttctttattttctgtttatgaattttatgattccctctaaatcattaagaatgacttttttgaataaaattatcaaattttggtcattaattgtttgaaaaaaaatattttagccgcttttaaaccgctttgttgaacgcaattaaattttagatgcattaaaatttgaaaaaaaagtaaagggaaagcaaataaattgccgaaaaatgcttcctttccaatatatttaattagaataattcaaatttgaatttgccagatcacagctttgatcaattccattctgcgtttttatatttccaatcacttttcaatcagcgaaagcacaccaaaaacggattaaacactggcattgatcacagtgttcaataacaggttaagcatgaaaattcaattttttcaatcaatttccaatttagcagtatccgatcacaacaacgaacggtgatcacaaattcagctggtcggttagagtgatcagaattcttacaaattagcaacataagagttctaaattttacaaactctttcagatcagtttcaccctgtgactcaaaagcgcgacttcttcatccctttgatcagtgcagttatgaacctaattaaatcctttcaataatttaaattccagttttttgatgtccaattgtggctctgatcaacaaattgatcaacaaaatcgtccattgcacgatcagccgcaaagatacattgacgaggacatcagcttgacagttgaccaaaaatttgagcaagaagcaaaaaagccactaattgaacaggtggggcacttattacaaaaattaataaaaaatttaaaaaatatgtcctggatatcttcttggataaaagggttattcttgaaaacatatccaaattatgaaaattttttacttgttcttattaactttaattcataaaataaacaaattgaattaatttattaatttaatataaacttgggattttgtttttaattttaaaaaagtttttttgacatttaaatctcaatttttataagaaagtccaaactaagaatttaagattgtgcgaatttttgataattctaagtattcagaatgttatcaaaactttaattttgctttccatgtctttaaatttactttaattttttttttatataattaccgcatttctttaatcctttttgtccaaattattttttttttaattttgtataagcaaatctttttcgcgcatctactgttcttttatccattcattttgcagggtcagacaaattcttactcattaaaatattccatttatataaatagaattttaattctattacataattgtcaatttgcgcgacttatttttgattttaatttgcgctttttttggcgttctgctgccatccgtccgtcgttgaaggtcgcgctgccggcgcgttctttgttctttttatgtccatctttcgtaccctcctttttacacaacaaaacattaaaattttgcttgatttgggttctctgttcagcagctccgctgctcgtcaaaaaaaaaaatatttaatttaatttaaaaatattttaaaatgggttaatttttaaattcgtactaaaattttaaatttgcgcaatcactccctaatttgtaagccttcagatatgctgaacttttcttctcttttttcaacgcaaacatttttcattatcatcctaccatattccattacagtatatatcgtaaatatccaaaaagtgaaaaaccaaaaattctcctgtttcctaaaaaagagaaaacattattttccatccctaatttttctcaatcctatcattccacttcttacccacatttccttttctgtggtcaccgtaaatcctattaaaagaattttttctacaaaaatgggtgaaacccattttttcacgcccggacctccccatttttttgtcatcccaattttcccaatcccataaaatgttttttttttctgtttttgtgttccttcttccaccaacatcatcagcagcagtgggcggagggatgagcgagcactgcttcttcttcttcctcttctgctgctcatcccatcacccaccacactttgtgcgcatttaaccgaacggacggacgttttttcgtcttcgtcgattgacgacgacggattttcacttgccccacagtgggggggggggg

SEQ ID NO: 7994 - DNA, 3752 bp, Heterodera glycines
  unsure (1)..(3752): unsure at all n locations
gacgttttttcgtcttcgtcgattgtatgacgacggattttcactcggcccccgaggggggagagggcgggggggggggggggagctgagaaaaatttctactaattttatcctgctgtgggtcaggtcgatcgtcgtcgttttcgtcctccgtcgtccgaaaagtcactcatttgtcagccggcggttgatcttcgtcatcataatcattcattttgtcacttcttctccttctttttctgtgttgtgctacctaattttggtggatgcttctgcttaatctctctctctcttcttacttgggataaaatttaatacaatattttgtgctgtttaccattacaaatttttgggcgcaaaattcaaaatttgcaatttggaaaatactttaaaaatttgtttttactttttcatattttaatatttagcaaatgcttattaaaatagttttccctttgaatttgggtaataaaaattccaaaatttggcaaattctgcaaaatatttatgcgttccgtttttacccatgtatatttgggaaattcataaaaattttgagtttggcaaaaattggatttccatacaaaaccaatattctaggattttaatttaaagcagctaatttttggaaatttaaaaaactcttgattgaaatcttatgcaaaattcccaatcaaaaattgtttctcgcttttaaaagtaattttttcagatagttttttaaatttttgtagtcaatcagtttgacgaattggctcaattgatcaatgaaacaatacaataataattcataaagtaatcaaatggtcggttcattgaacaaccatttattttcaatttcttcattatcgatattactgatcgagaagccaaccgatcatttatttctctttctctctctcataagtatcaacacatattttgcatctccgatactccccgtctgaacattttttttaaaacagcaaaatctcgggcagataacaaaaacgattaaaaaatatctataataaaaaaaaatttaaaaattcaaaattcttgcgccgatcaaatctttaaagaaagaccattcacatattttttgtcgagccgagattttgtcttgtttcagatcgacacccctcctctaagcaagttataagcgactggaaaatggaaaactccatgaaattcaacggtccaagtaattaccatttccgacccattttagaaaaaccggtaattaatcggtagcggtaaatcaaaatcttaatttttttctcggcgtttactatcggcaccgagagcccaaatttccttagaatttgttatattttttatcaaaaatttaaaggctgttttcacaaaaaaattcacatagattaaaaatcctaaaattttgctgcagagttcgcgttacatcttatgtaaattatttttgtaagtgaaaatttcaaggcattctaaagacaaaaatattgttgtaaaaaccaacattttcttcaccttaaattatattattatatatcgtagaatatataattactgggtaattaatgttttaccgttaccgaaaaattgccgctcccgactccctcaaattacaattttgcttttgtgtatcaattcgttttatcattatcattagcactgactttaatcagtaattttcactcattttttgtaaacttccttatttagaaatatcttttttaaatattttttgtacataaaaatgaaaatgatgatgaggaaaaggaggatgaaggccccttcttgcctatttgtcatcgatagccattccttcacgtggcatcagcctccgctgctggcgaaggtacaaaaatctgtttattttctaaacaatttttacacaacaattctaactcacgtcgaattaaactaatttcacttttaaaaaaatagaagaacagtcttccaaagaaaaaaaaactaaaaattaaattttttaaatttttatattaaaatagagaaagctgagatctatcgaatggcactaagaatatttaaaaaatgcttttgaagaatgttaggaagcataaaatttatcaaagtttataaaaaggcaaacattttgtggcaatgtatttttttttaaagtcgtgtaactgtaataaagccaaaaaaccttgggatcattcaaaatagccctcagatttctcatttacctataaaatttcgaactttgttaccatataagcaatttctggtcataaattccgaaactcgaacacttataacctttaagagttcgacaaaattttgtttatgtatcaattttcacaaaaaaaagtctgaattttaaaattatttgtcctgaatttaaaaaaaaaaatttgcgaaccctgcagaagatgataacaaaattataagttaattagtgaagttttttcttaggctatttttcattttttaaataaatgtcaagcggtggtcagttctctggccaaggaaattcaaaggctcacgcttagctctacctactagctctatatgccggaacattttaagcccttatgaaaaaatctattaaaaatacctcttttcttctactgcttccacttcccccctcattaaaaatcatatccaattgcgcatcctcattattattaatattatcatcatcatcatctttatctccctccaaatccaccatcttttttcctcttccttgtcaccctctcctgctccgttttcatccttctttcgttagtcatcatccaaattttgggatgaattggattttggtaaaaggggggggggggggggggagcgcccggggggcaattgcgcccttttgaagaaatgacgcgaccgcccccgccctgtcggggtgggagacgcgtatgtacgggcacagcacacacaaaacgcattcaacaacaaatcatattgcgcagcggcagatgggggcgcggggatgtggcggcggcaaatttgagacgacacataacgccagaattatataacaaaaaaaataattggagacagtttgaatgttgtggtggggggatgaccactaaaagtagcgcagatgtcatctccaaacattttgacacagaaaatggcaccaaattttcaaaatgaaaatttttttagtccttcttttttgatcattatgggatttatgcggtaccaatgaatttaattggagaattttggcatccattttgaaaaaaataatgtgtatatattttgcatattttgtataggtatgttaatttggggattttcccaaaaattccaagaatgtcacctttacattaaaaaaaagaacttttcctgttggctaaaaaagtcggaaagttatttaaaaaaggcaaatcatttttggatttttatatttaaattttggattttaaaaatttaaaattaattaataagaaattttattctgtgtttgaagaatttaggtgtaggtgctttttggattaaaaaataaattaattatagttaaataattaatttttacattatgtatacgcattttgcatattttgaagacctctttcatcttcaattcattaggcaatatagaatttgccctagaaactcaataaaacttccaaattttgagtttaggngatgaaattttnaatttttnaaactttaatccttcgnnaatnttttttctttnaaaagaaattctcaaaaaattcaaaatactaaaagacntcaaaatantnacntacataatatcctacctagtgtagtaaaataaaacattttcggactaaaaatatgcttttcgt

SEQ ID NO: 7995 - DNA, 7198 bp, Heterodera glycines
  unsure (1)..(7198): unsure at all n locations
acgtattataggaccaaagtattcaagacatacattcgtcctcttttagaatatgcgcccgaaatttggaatccgacatacaaaaaagatataaataaattggaaagatgccaaaaatattttacaaaaattgctttatttaaatgtaggcttccgtatataccttacgaacaaagacttgatttattcaaacttcaaactttagaagaaaggagaaaaacaattgatttagttcaggcattcaaaatcatcaatggtctcactcatcttaaaaaagacatattcccccaattttctggtcacatcccttacaatcttagacgtaaagttgtgttaaaaccacaatacagtaaaacttcaaattcttttatcaacagaacggccttaatatggtctaaactcaacaaagatataacagatgctccatctgttgacagtttcaaaaaacgaataaataaatggattgagttaaacaaaaatttagtctgtaaaagagctccttggacttgatattactttactaaaatctaacgtgtaagtggtcaccccttcgttggatatttttatttcttctgaataataaaacctgcaatgaatgccgtgcgcaaaagtgccgaactgctcgtccgaatcacatcaaaagcaccgccgcatcgtgagtcaatctcggcacagaggcgcagaaagcccgtgccaggctcccacaattcaatggcttgcgccatggcctgaagccttgtagaaatttcattcccaattactttttcaacgcccacccatagcaaatcgttcaccgccactgtgaattgccgcttaacttcgttattagtctcaattccgaggccaattcgattcagcccatcggcgaatgtctgaaaagtgagtctttcgtgttttgtccatcttcgaatatcacttgaatgccgccttcccggactgatgcccccagggcatccattcggcacttcgcctccaacaaattttgccattgcgagcggacagtgtccatctctttgccggtcacacaatgggccaaataattgtggcgttggacggcgagaccgaaggccaaattggactccattttggcccaaagcttaaaaaatttatttattaaaatttaaattaaataattggcgaagagactgtccctcccgtcaaactaacttggtcccagtcctgctccaattcgtcgttaatttgttcattcgttcccaccacacattcgtcaagtgacagcaaaaactcttcgcgcatcatctacagaaagtaaaatcatttttactgattcttgtcaaatttttcaatgtttttctgtaaagacaccctttttatcttatggtacccgaataccgtaatttcccaaccttaaaatgcgtttcgttggcatcgtagaaaaagtgattggcgcccaattcctgcagaatttgacaaagtgaaggctcgtcgtccacattgtccatgatcagcgtgaaggaggtctgcaacaactcaaacattccaaattcagttttaaattggtttaattgcctgatacgcggcacaaaagtgtcggaacgcggcacttgccaacagttcgtccaacttttgtttggttgtgtcaaagcaacgcgcaaatggccacagggcgcgaaacggggcgtgccggtggagcagtcggagaaacatccgttgcagcacagtcaactgccagtgaatggatcaatgaatgattggacccgccaaccaatcaaatgccaattgccctttgatgccatgcttttcctcctcccccgcccctcccattcacctgcatgttctgcttgtgcagctgcatccaatgcgcccgtgccgcttgcatcggcacaaattgcgacaattcgtcgtcgacttccgtctgatcagcatctgactgaaccattaaccaaatcaaagacaaagtgttaatttgatcagtgccggaatggaattataaatgatttttatcactggtaaagattctttccttgccgtaaattaatcgcttttattttggcttttgaccacatgcctccgttccgccggtgtgccgtggcgtcgtgctgctgcgccgccgactaacagatgtcgcgccggacgatgcttcgatggcgccgataacggcgggagtcggaagcggtcggttgggccccgacgctggtaacgcgtcgtcctcctccgcttcgtacgcgcccatcggcggaagagtgacggaagagaaggacgagtcggtgaaggaacggagacgggcaaacgcaggcggtgcctgccgtaaaatgccaaaaaaatgaaaagaattctttttcttactttggcattccatcggtcgccactcgtctccgccgcccattggacgggcgaaatcgacgctgacggggtcgaattgttgtcaatcgaatgcgcggaggaggaactcccgacaatgttggcgttgcctatgtcccgatcgctgatcaacgcggtggacggcgtctcgcgacccgccgccgacgagcggggaaaaatttgctaaggagggaaaggagggcataaaattaataattttttcattgattttttccctttttgaataattttatttatttttatttgcaaagcaaatatcactttgcttataaatttctcacctctaactgatattgatggtacatttcctaattaattaattaattcatattaattgggcattttttgtccaagggaatgataaaaactctctcagacataaaatgctttcggtcaatgtgagaaaaaaattaattgcgccaaagagacggatttatttggcagtgccattcgcttctcatccgttccaaacacccggcacccaatggggtgggcggatgtccattagtggcggcgatgccgtaaattcgcgcaatggcaaaaagtaaaaaaaaaagagtgacacgggaaaacattttcaaaattaattaaaaacagaaacaaacgcaaaaacgaaagatgaaaaaattctttatataataaaaaattaattaataagcacataaataccaaaagacataaaaccgtaattacagtaaatacaaaaaaaaaagaaaaaggggcaattaaaaagaaacgaaatgacaaaagggaaagagggaaagggagaaaagaatgacccgtaattagaaggtgtctttgaatttgcggatttaagccaaaaaaaataataactaaattgtcggtgtcaccaattaacaaatttcatccctcggggcaaactctcggcgagcgaaaacggagatcagcagaagcgacttggacctgctgaaaagaaaataaaattaattaactaattattttgctaaacagctcctctctaaattagctgcagaatggggcttattgagtgggaaaaagtttattttttgtaagcattcttttagccggctctgcctttgttttattttaatcatttaaatcggtaatatctgaatgaatgcacttttgacccgtgcctgatcaaaaaccgatcagataaggctatttttgcgtgtcccacaacacctttctccaccttcgccagcaccggtggccgccgatgcatccgtctgctgctgctgccgttcggccggatttacttctcggactcgacttcgcttcctcggcttttccacgctaccgtatcccccagtctgtaccaccgtagcgtcggccctgttgctgtctaccgtatgctcatccgccgattgattgaccgatgacaccgatgttgaggaggaggaggaggaagaagaagcattgtctggaacaaacaccataaaatataagacccaaattgaaaatgatgattgaattgtcaaaaattaatttatttcaaaaaatactgtattttccactaaaactgtgggaaaacaaaaagaaaaacagaccaacgcccaccccattgcatgttatcactttatctttctgtatggtaatcaccatattttggggattcttttatactttcaccaattgtttctgtgccatggctacaatattggaaatgacaacctttctccattgatataattttaataaaaattaaatgtttaaaaatcatattcaaaataaaatttaaaaaaatatccatcatttctcggcatgctaattcattttaggagaaataatttaaaaataaataaatatatgtatttttttgttgcatagctgaaagccgcccctccattttaagcatttggttttttgtaaaaagaaaaaatcaattaaaattactcaaaaaatatatccaaatccgtcgcggtttcacgggggggggggggtcaaaatttggaacacggacccatcataaatttgctcatttgtcaaatgtccttgatcttcggaatggaaaaagggtcgaccgcgaagcgatgacccaaaaaacagaaaaagcaattagaacgctgaaaacggcgataattaagcgattataatgcgccaaatccctaaggctgtccccccggtgggtgcctatttaagcggaacgatttgtcagcaataatcagtttcaaaaggaagaaaaattcggatttaatcctttcgctctttcttttgtcaaatttaaatgatcagacttattttacctgctgtcgaaattacttttccaagatttgcttttaggattaaaaaaacacaaaatgaaccgtctgtctgtctgcaccctcctctgtctgctcattctctccgccaatgcacagtattactacaacagctattactatcccagctataattacggctatggtggctactattatcccaacaactacggttatggcagcaattacaatggctatgggaataattactatgggtacggtggctatggcaactactacggtaactacaacagaggctactccggctactcaggctatggtagagcgataaattaacgatttggatttaatttaatcacctattgggtgtttttatttttaataaagccaaaaagaatgggtctgtccacaatatttcccgttttacaggaagttccggtacttacatgcccggcatttattgctcccatgccaaagtgtgcggacggagatgagagaagaaaagcgggaaagagagaagccgaaagtgaagaagacaaataaaaataatcgatatttaattaaatatttgatatatatatatattttttaattaaattttgtcatttcatcacgattcattggttttaattgtaaatgaatttaaatatacgaaaaacagagaatttagctaaagaaaacttcagaaaaattaagaaaaaaaatgaaagaaaaataatgtgcaaataagaaaaataaattcaatcaaataaaagccaaagttaataattggctgataagataaaccagaacattttcgaagctcaggttcagactcaagcaaaaactcggatagagtatcaatcacactttgggtcggataaagccggatttcgggtaattaactctctttttccctggggtgcccttccctcgtgccgttcgcccacctaagcatgaccgcgtgttttgttcgctcccactgttgctgccgtcgctcgcccaccgcctctgctcgttttgttgtgctgcaagtgtttctggcactgccccgtgctctttctcagtgtgccgtgctctctgctgctcttttcgctgctctttcggcttttccctcgccgtgccgaccatttccatgtccaccattgggccgactttgttgctgcttttgttggcatccaataaaacattattctgcgcaaagtctcccaaagtgtgccgcctcaggcgatgctcattttcggcattttcttcttcgggatcgtccgaatcgcattggtggaccgggtcgccgacaccgtacgcaaacgatcggatgataatgggcagaaggaacagaccgtggaacagcccggtggccaccaccaacaccatcgttctgaacgatttgatcagattgtttttggatttctcattgataaaaaaataaaattttaaaagaggaattaacaaattcaatgttttttgtttttattttgtcagtctgattcaaaattctgatcaatagggtttggaatcatattataatcacaaaatattaaaagaaataatttaagaaaaatgccaaaatatttaagaaaacattgataaaagtaaaaatatttttgtaattttttattatgatcgatttttttatgtttatgaatgcgacaataaaacgaaatattttggctaaaaattattttttcttgcattctcatcaaaataaagatgcagaaaaaatatttaaatatataaaaattccaacccctaggactcaaactccacctgggcanacatgcgcacaacatgggacgggaccaaaagcatcacaatgatgccgagaaaggtggacactcccgcnctgaacgacgggccacccaattgcgcccagagaatcggaaatgcgctggtcagggtctcgacatctaagggagggcaatggcaattaggaggaaggcgattaattgttaattccgagagataagtgatgagcacctggaccggtacgtccgatagcccacgtgggtggcaaaatcgatgcaaagtccgatgctcatcagaatgttgaccaccgttgtcggatccaaatcggagccccatagggacaaatagccgcagacgccgatgtccatggacacctgacaaaatgatgatagtgagggagccaatgttagccgacagtaattagccaattttccacacactcactgaccagcataaaggacacccaaaagacgatggaagagtcggcgatgaacaaaacgcaaatgaaaatcatggcgagaatggcggtgcccagggaggacaactgagaaagacattagattcataaaaaataaaattaatctaatcgagagagaataaattaaataggcattcgattacttaaaaatccaccgaatttctaaaattaattttctaattccaaccgtcgtgtttttcaactcgagcatttggtcgctgaagaaattgttctcatcaaacacaagggcctcaagaatcgatgtaatttaagcaataaaagtgcccgatttggcacctgaaagtcggagtatcgagcggtgatattgcgccaaatgagcagcagcgaagtgcgcacattccaatccgggattttgaaggcggtggtgaagtaaaatttgtccaccaattccttgccctcctcaaaatggaacaattacaaatgatct

SEQ ID NO: 7996 - DNA, 2207 bp, Heterodera glycines
cgatttggttggagtgtcacgagaataactaaccaacgacattctcgaggggggggggggggacacaatgaatgaatggggaggaatgagtcatccatgtttaggcaatcaaaaaattttattttcattgttagcacccaccaaaatgcaacacacatacacataacatttgtatatgctacccttaccattgcaaaatccaaatattatttatggacataaatttttcaaagtcgaccaaattaaacattcttcgtgtcactctatagctcttaaacttttataatttaaattaggctcgaaagtttcggtttgtgctccctgtgaaaaaaaaaagcttttttctttcactaatggcatcatttgctctgaaaataattatcccttttttattgatttcatttatcaattggcgcataaaatgcaaacataattaaatgtacaagaaacacatgtgtattgatttgacttaatctgccgatttggtggggcatttgcaaagaattaaatttgtatgtgtgagatggaaatcaaaatcacaaattatttaatcacaaatttagatttttctaccaaaaatgccgtttttcttttaaagggtggcaattttaataatttgcctcaccttttttctgcggctttctttaaatcatatttttgactgtttattgaatgaaaccggtgttttaattggttttattacataattccaagtggttttctcattttattaattcgggtcaggcctaaatgctccattttgattaattaattaaccctctaaatgatccaattttagttgaggattaaataatctcaaaattccatcccatttttcataaacattttctaccataattaaattaattatttcactttttagtgccaatctcttaaatatttaaatacaccacattacacagcggcccaattttgggctccaagtacaattatgctggctttttcgtcttagtggtctgtgagttagtcaccaaaaggggggtcccaggttcaagtcctccctatgttgtgtgttaatttcaatttcttcttttaaagaagaaggcagaattattttttcattaataaaagttttcgtgtcaataaaaaatcatattcaaaaagagttggttacgtacaacatcgacaattttatgaaatttttttagcttataacttggtgaatactagagcaaataaaaccattttatgctcattttgaagggaaaattctagagaatattgttagttttatttgatttggccttaaattgcgcacttggctaaaaaagaattaaagtattgaaatgtttgccatgggaaaacattttttccatgtgggtaactttttttgaaattttgtatagacccatattttgtccccctctatcgaatcacagtttattttttagctgtctagtttttaactcgagatcggctcttctatttttacaagggaaaatcccaaaaaaattttaagttttgtaaagttttggcgttctgattactaaataaatagcatgcatacataacgggactgggtcgttttggcgccgacgaataagagccaacgtgagtctttagtataatatcttcctctctagatcggctgagcgaatgatctggagtgaattcggatgccctgcacgcactaaatgcacaccacaaaagccagttttgaactaaaagtaacaaattctattatttattgccagcttgaaattgtgtgtttttttagctttttattataaaaaaagttagataacttttggaaagtcaaatgcaacatattccattaaattcacaaaaaacttgctcatatttatcgaatagtcttttgataaactggtcctaaaatgcttgagtgatccaaaaattaattattgtgctgaattcgctaaaaataaattgttttcctgtattacattgtgtattaatgcctttttcagtcctcaatcatcttgccagcactttcgcacacatcagcaaagaacacgcagacaaacttcaaactttgcagaatgaatgcaaccgtttgaaggaagcgaacgaaaaacagaaggaggaaattggcgaactgcagaaacagctcgacgccattttccaaacagtgcttagccgcgcagttgatgaggaacaacgaggagggggagaaggaggatccgcctgaataattgtccatgtttggatttgttggattgttctgt

SEQ ID NO: 7997 - DNA, 2383 bp, Heterodera glycines
taacagttacataattaaataaacaaaataaaattgcaaacgatgtgttgtccgacataattataggcaggaaagcggggccagaggggggggtctgacctggaatttttttttcagacatgaatttaaatatgaaaaaacccaatggggattaggctctgacactgctgctcgactcgagaattctggggtttctcagtctcgagtccgaggaggacgctcggctctattgtagtttacagggccataaaaaaagaacgatcataaaattctgataattttaatgcaaccttaacttttataaaaaccatccaaattaaacattcttgattcatttgatagcctgaagagtcctctaatagcctgtaaaattccaaagaatttcgttcgttttcaaaaaagttgtgagcaggattattaacatttgttgggtaatacaatagatggtgggccccctttttgggaagttttttgttctaaaagtcgaaaaaacatctcggctttttaaaacaaaacaaaaaatctcttccaaaaagggggcctatttactatctatagtattactaatttttgtttttgttttgtcataatccatgcgctagtttttcagatgatgtttttccaattgtcatcctcagcaccaacatcatcttccgtcgatgggccacagcagttttttcaacatcaccaccaccaccaccaccaccaatttgtcccatcgatctcaccactgttcgacacctccggcaccggcatgttgggcacgttggcggcacccaccactgcctcaatcttcatgccgtccttgttcggcggctgcggcggggccgccgccggtgatggcaccatcaccgccgctggctcgctgatgcaaagtttgttgagcgcggcagtctgcagcggcgcattcccgttggtcggcacgactgttgcagcctcaccgctgactgctaccacctctcaacatcgaaaattgttcataggcgggctcagccatgagacgacggatgaacaggtgcaaaaacaaaatgaatgacggaaatgggctgagacagacggacaggtggttgggtgccattggcaccgcccgcaaaaacttacggggcgcgggtcccaggcgtttgttgtgtctctatgccaatgaatgtgccaatggcacacagtccatccatttcattaactattcggccaatcaaaatggattggtaaattgtatggttagggacccgtacttgaaaaaggagaggaatttgtagacctaaattttgtaaaaaaaataatttgttttttttactccatttcagttacgtgattactactccaaatggggcaaagtcattgactgcattgtgatcaggtagctgaaaaatgattggactggtctaatgagacacagctatcgaatatttcggatttttttaatttgttaaaaaaatgtgttgggtaccctttcgaaccggaaaactaactaaaaatctcaagggaacatttttgaaagtcacttcccaagattacttccagggaccctgtgacgaggcaatccagaggctttggctttgtaacatatgcaacaattggttagttttttaattgtattttgttgattttcaacgattttttggacacgaggcatggcacaatacaaaaacagaattttacttttcgaaagggcctaattgtaaaaaattttttcgttggttggtcgtcataaattccattgcttttccagagatggccgactccgcgatggcagaccgtccccacacaatagctggcaaggtttagatctgattttgatcagatcgaccgggaaataggatgggaaataaaaaattattttggtgcctctgcgaaggggggagggggtaaaaaaagatttgtttttttttgaaaatatatctctgttaaacccaccggtgggattaagtgcatgcgccaatttatataattttatgtatttttacatgagatgggtaattaaaaaccgaatataaatttataaaagacaccgaaccgagccccctccctatttgcaatttttttaatcccccatttttaggtggttgatccaaagcgtgcaattccgcgcgagcaaatgctgcaggcgaccagctgtccacccgcctttctcgacgttgagcccccctccgactgcaaattgtttctttcgggtactttttcaacaaaaaaaatttttttttttgaaaacattttcttattcaagagcaatttggagccaattctttcttttttatataacggataatattgaaattttgatgttcaaatgtttttcaaataccgtttgggtcatatggtttttttcattttatccactgtattgttttggggggggggggtcctttttgcccagtaattatga

SEQ ID NO: 7998 - DNA, 2776 bp, Heterodera glycines
tgtggacattcttcgacactatttgaaacgctttggcgagctggaacaggtggaaattgtcgggcacaccggccacgggttcatcgtgttcgagaagcgggcaagtgccgacaaatgcgtggcgcatggcaaacagcaaatgatcaacgggcgcaaggtcgacattgcgcgggtgagttgttcggaaggggttttggcgggggtcaccagggcaaaattcggacaaaaaaacggaaaatcggggagaggacggctggcgtacgactcacagggcgatatggtatcaggatttgtgtctgtctagggtaatggcacaaagccctggttaccattagagattgacattctgaagaaagcatgtatctggattcgatgttggacctggacctagatctcctggacaacaatccagttccaggaacaaacccagacctgggcgtccattctgttcttccctcccctccgacgggaagggggggggggattttttgctccttaaaacttgcgttgcttttttgcaaaaaaaaaattggccctcaatttttcatgccaagaaataaatccccctatttcagcagcagggtacagcagcacagcatcatcgtcatgtcaagccaaagtcaccaccattgaaatgttgaaccgccgtcttctccctcccccctccccaattcaatttaaatggttaaaactacatacatacatatatatacatataaataaaaataaaacattattattcttctaccatttgttgataaatgtttgttttttgcctcctcggttccatgttttgtcctcaaattgttttatttgtattttttttattgtgcacattactcgaaattgttatatgatgtgatcatggcggtattaaaataataagttcttcaaaaaattcattgttttccattttaataggccactttttttgtgaaaatgggttttcatctagagaactaaagcctgaattcttgagaaatttcattagagaatttgaaccggacctaatttgaggatactgatctggttcgattttcgtaatatataaggagtccgggaaaagtcaaggcattatccggtcctgttccgattctactaaaaccaagagaaaactcctattcctaaaataaacaaaaacaaaatggcgcatttttggcgtaatgttcaaatgaaaacctatcccttggctggtggcatattaatctttggactcctattttggaatactaaatatttttgtaatgtttagcttgattcactacccaaaatatatattttacaagaacttagcaaattctttctctcctactaaaagtatgcaacaagtgcacaccgaggacatttcagtcccatggggccaggcgccggacccgcttgaccaacagttcggcaagtggcgtctgtccgtgttccaggatgtgcaagagtcgtgggatgccagcaaactgtactttctgtacgacccggtggctgacgagtcgtgccaaacaacgtcagtcatccatcagccgctgtggcaaaatatattttggaaacagacaaaaagccgaatcggtgaaaaacggacataacgccgcattttcccatataacctctgacaaacaaaagtcggtattttgtccattttagtcgtgtcggggtgttttgtccgtttgatgctttatccatgcaccgtaaccattttttaaatttaattctttagtggcggcagaaaagcgatgacctgccttgccgtttttgacactaatcggaaatgctttgtcggtgaaatcccactccgagttcaaggtgaggagggtatttcaggaattttagacgacacaaacaaattgcggcaaacggaatttgaggcctcaaaatgggaaattgttatgacctttaaaatcgcgaaaattcggattccgagtgccgagagatttttaaaatgaatttggaaatctgcggaattccatttcatccacggaaatttcaaccaaaaaaaagacaaccgaacatttttgggtactttttcactttacgccacataaaatttttttttcgttattttttgtttttcttgtgttttcggagtcactgatcacgaatatgacattcatttcgaacaattacgaaacccggacccgaattcgaacaaaaagtcgaaaatcaaaattttcaaaattctcacttctgttctaaaaccgatgaaaacaagataaatttagtcgcagaccattaacgggtgtcattttagggatcagcatccctgaaaaccccctggagctttaattttaagccttaaagcaaaatcgacaaattattatttttttggctatttgatgcgcttgttttgaacattggacaatgtgtacctaaatgggaattgagcccaaaattagcgcacgacagggggaggaggaggaccatgtgaaggtgtgaatttgtttcggttttttgccattttccattctctcccccactctttttgtttcccataggttgcggtccgttgtcgtcccttaagccaacaggaacaccagcaaggacaccgggccattgtgcagacggatgagcacggaaaatgtgtcgctgtggcccacccggacaaccaaaatgttagaaaaaagtgcattttgtaagaaaaaattaaaaaaattccaaatctgacagcaaccccagaagtgctatttgttcgacgaactgttcggccccaacgcgactcaagcgaccgtttacaattcgttgtgccctgggagggtggaaaatgtgcttaggggttacaatggtatgttga

SEQ ID NO: 7999 - DNA, 2402 bp, Heterodera glycines
cgaaaatccacaaaattaggtattttttagtgaaaatctactaaaactagggtcaaaattatcaatttttcttcccccggcggcgcatatcggcactggacaatcagaaatataacacttgaacattttaagcgtattttgaataaattttgtaaataagaggctttttgacccaaaatgaggcttttttgcctgctaaactggggccctgcttttatagcccaaaatgttctctattatcctacaattcagaaacataagtcgcagatacataatttaaaacaaaaagtattagggcttccttttttatgtaagaaatatcgcgaaatatgtaaataaaatatgtattaaaaatactaaaatataggcaattatgaagaatgggggtcctatatttttcaaaaaaattttttaaaagttatctaaaacaactttttatgaggttttcgggagcgctgatcatgcatatgatatccatttcgacctattttgaaccccggacccgaactcgaacaaaagtcgaaaactaatttttcacaaaatccaactttattgtctaaaccgattcaaaatcagcacccccgaaaaccttaaccgatttttagggatacatttcaaaaaaaaatttttcacaagaaatttctacaaattctgaaaactatattaaaaaaactaaaaaatgtatgaaaattactaaatttgggttttttgaggcattcgaatttgtaaaaatatgtaaataaagtcaatacctttgttcccaaacacaaaaaagaagtgattttgctactaattaggttatggagaatcgaagaaaaaaatatggatttacataaaaaaaggaagctctagtaagtactaataatttgaacagccgtgagagaaggtgaaggagagataaggtcggggttcgggatttttcaatttttaccttatgcctaatagtcaaaattttttaaatattttttcggaaataatatttattaattccataataatatttgtattgtttttatatttttttatttcttttttatcagaaattttgtatagaattaatttttttttcttgaaattttaaaatttattacttttttgttttccaaaacatcttttttcacggcgctcttttctaaagacttttagggagaaagggtacggcgtccggcggtgccgataggcgccgctgggaaaaatttggtatatctgttaacagatttgtccaaaatatgctaaatttttgcgattttgagccaatttttttaattaggtttatgaatttttgggcacggtgatgacgataggcagcgccagacaaattttggaattaagctctattttctaagatttttccccaaaaaaattatgaatttcggtaaatttttgtttttcttcaatatgtattttgtcaaaatatgccaagattggtcgatttctatgagtatttaaaaaaacattttgtcagaaagaaaataattaaagaagaaaacgtcaaacggtatcgaactcacgacagaaagtaatgtcagtgtgatgcactaacctctacacaacattacaaatgcacaaaaatgagcaattttctttatttaataaaaatttggcaaaatggttaaaaaaaaattcaaatttcgtctaacttttttgcattttctcccacgaaaatgccattcttaggggtgtatatttaaccccgaccccgatcggggttaagggtcggggttcggggttgtcggggtatgaagcgtcggggtcggggttttccccgaaaatggccaaaaatgtcggggttcggggtcgggagcggggtcgggggcccaaccctaaattaaattataagtgcagagaaggaaactttgttaaaatttaacaaaatcaataaaaaaccggttaaatcgttgaaacctattgaattggttaacaaaaccaaaaccgagtgactgtttaaacgatgtcaaacctaaacctaaaaccataactaaatcgaaaccaaatatgtgagtttaccaaaacgatgactggaaaataacccgaaccgaaactgagttacataggtttaaaggaagtgaaccgaaaccgagtgactggtcccaaggaagcgaaacctgaaccgaaacccatcgagtgatttaactaattcgaaattgactagaatagacggaccgaaccgaaaccgaaaccaaaacggagtgacaactaaactaaaattgaatggctggtttatatgatccgaaacagagtgacattgtttagtaaaacaaaaccaaattactagtttttcaagcgaactgaaaacagagtaggtaaatgagtttgccaaactgaaaacaagtgactggtttaaatgatgctaaacctcaatcgaaatccattgaatgctataactaaatcgaaaccgaata

SEQ ID NO: 8000 - DNA, 3535 bp, Heterodera glycines
atctgaaacagagtgacatagatttactaaactgaaattgaagaatgttttaaactagcaaaaaccgggtaaagtgtttaccagactaaaatcgaatgactagtttaaactatgccaaacctaaaccagaacgaaattgtaaccgataaatgggtttaccacaccgagtgacttgaataaataaaccgaaacccgaaccgagtgacatacctaggtttacctgcagaccgaaagtgaatgactggaataaacgaaccgcaaaagtgttacaaaggttaactaaaccaaaacgaatgactggttttttataacaaaccgaaaccgagtaaatgggtttgccaaactgaaaccgagtgactggtttaaataatactaaacctcaaccgaaatccattgaatgctataactaaatcgaaaccgaataaataggtttaccaaacttaaactgaatgactggtttaaacaaacgaaacgaagtgatattctgtatgttaacgaagccgaaccgtcctattgaatagtaaccagtgtttgttttaaataggtcaaaaccgagtaaatggatttagcaaaccgaaagcaaagtgattatttatacacgaaatcaatagataaaattttcaacaattaataaattcttaaattaataatttagctatttttatttttagcttaagttcatcaacttagattttcccgatgctgacttttgtcatatatttatttaaaaagacaaaattggataatcggagatattcatggtcaaaaagtggtattatttaatgggatatttcattttaaatctgattaattttcggtcatcaactatcaatgcccatttggttggtccaacatttgtgacattgggaacagtaaaggcgagtcaattgctccaccgccacagcacactccgccaaggttcaaatccgaacgcttaaaattgaaagaatagttcgcattttgttttaagcatatttaaagttaggttgcttaatttttaaagattagttttagaagcattaatttatttgttaaaagatatttttaattttgttaatataattttttaaattttttatataaaaatatttttcatttttataattacaattaacgaattgatttataatatataataattagggctccaatttataggcactaaaaaccgctaaaataggtagtgtttaggctctaaaaagtctcaaatttaggtgtgtaaaatggaaatttattcaaatggtaaaaaaataagtcaaatcagtattgcgttgcattattttttttaaattcaaaaaattgtccaaaaaattttttaaagacgatttttgagaaaattttcattgcttaggcgatttattttcagaaatttttgaatctctgcttaggggtgtatttttaaattccaaaaaatcgattcttaggggtgtatttttttgtttttattgcatttttgttaacaaattttcggcaaaacgccaaaataggcaaaaataggctttttcaaaattttttaggctttttaggcgctaaaaataaaagcctagaaaataggcactaataactcgaaaagtagcttaacaacagcccaaaaaagcatgtttttcgtacgtttcaggccacggggagctcaggaaaaaatagccttttgcctaaaaattggagccctaataataatataactctattcaactgactttgcttcgaattgtgtgcccatcgaatgcgttgtgcaaaattcggccgttcgactggtcaccgatcagtgagccgtaaatgcccatttcgctcacaacatcctccaactcagccggctttgcttctcgcatcaaataattctttaaaataaaaataaactaataatgggtcgtttcataattatttttcaacctataaaaagtatgccaaattttaaaagtaaaaacaaattatttgtatttggtatcattcggtgcagaataccgaatttgaatcaaatgaagctaattttaactcaaatagttaaaatttaaaaaagttattgccaaagaaataataaaaccaaagattgacataatcaccgttttttaggatgcaaataattatgagataaactaataatagctttatttaacttaattttttttcttaaaattatttaacagattccgattttttaaaattattttcaatttaaaaatcacaaatttatatcttttgttcaccttgaccactaacggtttgattctctgttgaagaatgtatgctcctcggtcctctgtgctcatctgttgcagcatttcggccagctgatcgtcaaaaaagttgccaagtccggcctccatttgcgatttgagcacataattgccatgcgaacgaatagcatccttaaaatgaaaatttttttatttcaaaagatgaccaaatttttctcaaatttcgtatgctaatacagagaaaatctgggctatcaacgctaccaagaatgcaaatagattgcttttaagcattgtcatgccattttttgtcgaaaaaaggctgctaaaattgcggattttacgaaacgacccaacacgtaggtacggtacaaaaaaattaaattacgaaaattaaatgaagatttatttgtttttggcacatttcactacctcaatcacttctcgggtcgcctcgtcttcaacctcaaggccccacagtccggtgaatgtgctgcggatcagtgccacacgtttcggatcgttgggaaagaagcgttccaccatgccaggcttggccaacacctaaattatatttaaagatatatttaaacatttattaaatgatttgttaatttgacaattttaaattttttgtttgaatgggatgaaattagagtattttttgaaaaattaatttggctggacctgctgaattttcttggtgctgctcaggtggaagcgaatgtttggcgacaaaatggcatttgatcgctcgatcgttgtccgtgccgtccattcgtgctccgttgggtactcatgcggcacattgccatcagcaatgtgcaccaatgccacacgttttgtgccgtccaaatacaatgaaaagtcgccgctttcgtcaagcgaaattctaaaaataaataaagaaaatacttaaaaattatttaaaatattttaagtgtattaattcaaaaatatttttaattcaacatttttatgttgttttaaaaaatcatttaattggactggtaaattaattttgatgcaaactttacacttaatataaattttatattatcgtatttcctaaaatagatcctgagtctttattttgcaacccccctaaaattaataaaactggtcttcgaccttttcgatgcttcggtcagcgaaagcaccaacaccttcacaaaattgccttgttgtttgcctaacttttccacttcaaactgaatgaattgcagctgctcaaaatgcgtgatgttcggcgtgtccaaaaaaagaagcacagcttttgggtcaccgaacaatttcctttgaataaacaaacaattaacattttattgtttattaattga

SEQ ID NO: 8001 - DNA, 3080 bp, Heterodera glycines
tttcaaaagtgcatacagagcggttggcgccgagaagcggcgcccaagcgctcgtatttatttaacatgttttatcattataatacggtatcacatcgttgtcaaacattaaaaataaacaatttctctattgtatgcatttttcctataataatgcggttatatgacatttgcgcctatgcccacaaatcggtttcaattctaagctttgcaatcacaaatggcatacaatttgggtgcaccccacacgccgctagaaattttcaaaaagaaatttttttttttttagaaatttttcaaaaaacagtataaatttctgatcatttcaaaaattcacaaaaaaaagcatcgtgttaaatcgcattctttcagaactttactattaatgctgatttgtgattgggaaaactataagttttaaatcatttttgtgcataggtgcaaatgttggggcacgagtaataatgttcataaaaattgaataaaatattttccgttcgatcgcaaattaaaggaccaaaaaggaaagagacggaagacaaaaaagacaacaagcgaaaggagcatttgccaagaacaatggaattaattattgggacaaattgacattagtgaaaaagcagcagtctccccgtagtttaagaaagaatacatatggtattatgaagagggcccggcggatttttaggtgcagaaatcggaaattgaaccctaaaaagtgaaatgttgaaaacccacctaaaatgggtactaaaattgatgaactaaaattgatgaagaatgggaaaagcgttcaaaaaatagtcgtcaatttcggcaaaaatttcagtgtttttttttgttgagaaaatgggtgttaaagcgccgaaacaggcttcaagtatttccaaattgctctaatttaaaaaaatgggcgaagaatcgtatgaataatatacgtgcttttcttgtaaaatgctatcaccaataaatagttaaaacctaaaaatccgaggcctgcattaattatgaaaaaaggaagtgacccatcaacaaatgcacaaattttcattcccttcccccaacagccatagatggatgaacaaaaagtcatgaaatcaatcaaatgttgaacagttcgccttggcattccacacatcccgtgcagtgaatctgtgcttggttcgccgccatgcaagtggcttgtctgctgatcgcctaaattcaaagatggaaaatatgctcaccaaaccaatgcaaagacaaatataaaaaaaaatcaaaaactgtatctttcggcaagagcaccgaaaattacggtacaccccaaaacacagccgggaataaatgtaaaaaattttgaaacaaagtcagtaatttctccttaaatttgcttgtctgctgatcacctaaattcaaagatggaaaatgcaatcactgatcaccaaaaccaatgcaaagacgcgcaaattcaaagaatcaaaaactgatatctctcgccaagtgcaccaaaaataacggtgcattggtcaattaattcatataaaaatttaaaaaaattgaaaattgagtaatttttgtaatatttttttccggcagtaagtaaaactcactaatctttcttaaaaaattgaccctaagtcgcaaaatacctcgctccgttccaaaatgcgcattaagcgatcggccgacaattggtccatcggaggcggatggatttgttgtttttgttggtccgttggatttgcacaatccgagtgctcatcatttccctctgtgatggctgctgaattgcaaagtgttcagtttcgaataaaacgggtcaatgaaggcggaacaggacaaaactccgccgacgaaactctgtttaaaaattttttttaaaaaatttcaaaaaatattccagcgatttttcaaaattcattgaaaatgtattcaagaaaaaatttcctatgattacttcttgaaaatttccgttttgatatttttttccttggcggagtttttgggtgcatcgcaataaagggtcttacagcagttgtccacggacagttttgccgtcgctgttggcaatgttgccgcgttggcatcacttttttgcataatggccaacattgcgttgcgcaactcggtcaaaatggcctaaaaaatggtggcaaaaatgggagtcacaattaatttctcaaaaaatttgtttaacaatttccaatttgttcaagcagttcagaggaaatgctgtgaagaaaatgaaaccaagatataaaaatatttacctcaaaaaaaattagaaaatataaatttgcgaccccccctcgctgcggaccccctcccgccacctcttttacaccggcccccttctgtatgatcataaaattttgaaaaaagcgcataaaaattttatttttttgaattttcctattttttctaatttgcggaggggggactgctccaaaaacgtcaaaatttgcttttgaaaatttcacaaaattttgagacaaaccgtaagctgtgtgttctgctgctggagctgcagcagtgcggcatccttctcggcaatgcgctgctgaatttgggttcgctggaagcggtacaaagcgatgtattcgccgatgctttcattctcggactccaacgcggtcagccagtactccaaccgctcattggtgcgccggtacagcgcattttcacggcacagcgcttccatttgtgtggccaaattgttggtggtggtgccctccttcgcctcctccccctgttgctgatggccaagtgccgtcgtcctctcaatttgcgtcccattttcgccgttgtcgtatggctgttggcgttgttgttcaccaggtgggggaatggcatcagctaatggtgacgaggcgtccacggcgaaatggcgaactgttgatgcgtttgtttctgaacaaagagcatttattaagtgagaaaacaaaaaataaaaattagtaattgatatttggtgccgtagaaaaaaacgggaaatttgccaattttgagaccaagtttttgacaaaaaaaaaatttggtaaattggatccggtggtacggtaaggcgcgccgctgagacagaatttagacaactttag

SEQ ID NO: 8002 - DNA, 2525 bp, Heterodera glycines
gtccctgttttagaacagattttttttgcacaattcgatgatgatgatctccaactctgctcaccaattcgtcctcctcctcgttgttgttggcattcaataattgcttggttaggcgttcaaccgtggccattgcggtcgtccgttcgtcctccttggcggcgctctcgttgatcactgcaatcagtcggtcctgcaactccttcagttggctcttcagctcgacattctgcgcgactgcccgcgaaacggtggccttctcattttgcagttgcgcagcaagcagagaaacgtcctattgacgacattagtttaaaatataataggtattcaattaagaaatttttaatgattattttggtgcaccacaaaaaatggccggataaatagagccatggttttttggggtcccggcatttacatcctatgtccaaaatcggattcaaatgtgaattttttcaagctatgatagctctaattaatgattctttccaattttcagacaaatctctatcacttatttaatgctgtctatgcgatcagggattgaaaagactgattttgaacccaattttggacaaaggcgcaaatgtcgggacacgggctaaatgttgccgggaccaaaagacgctaatggaagacctaacgcactggaaaaaaggaattcattaaaatattcgcagaatttttatagaaaattcattttaagattaggcagcatgtgaattttgttgtttttttgcgaccaatttaagtctaggcgacattttacggcgatattttgtcatattccgcgaatatttaccaaatttacaatttcccgccccccccttacttcgtttattgttgattggatgttctgcaactgttcaagttgggcaattcgagactgagcttcggccaacgactgttgcagctggtcaagactgtgttcctgtgccagaaaaactttaagaaaacaaaaacactcagtttaaatgccgaactgctacaactacaatttatcattcagaattcgaggatttcaaccccgggcaaaaagcgtttaaaaattgtaaattccatttcaaaaaaaaaaacgaataaaaatttgaatcaccccttcccaaaatgtttggcccatattttgtcaaaaaattgccagaaattctcaccttttcttgcaccagctgttcactttcgcacaatttgctcgccaatttttcattttcccccgttaattcctttacgcttttcataagtccgttcatttcgctcaaatgctcagtttccggtagcaaattttgttgtccatccgcagaatttgtcaaattggcattttcatttctgttgttgttgttggacggtggcggtgaattgtcattcaaaagaagtttttgttgcaaaatgcgaaggcgttcctccaacacattgttgaacgactccaattgggcattctgtgccttcacactgtccaactaaatcactcgatttttaatataaatatttgaaattaataataaattgacctgacaaatatttttaaatttaagaataaatttgaatatttatttttggtgccctacgtttatttcctgtaaaatttacagcgatttttgtgaaatttttgaatacacttaataattataatgtatatttttgacaaaaaaaaacaaaaattcgttttgtttcaagaatttttttttaattttttcagatttcttgaaaaatttctatgtttgagaattaaaaaaaaaactttaggttgggaaacgagctgagcccatttatgttcacattttgtacctgttcgacaagtcttttcgcgttggcatttgccagtgaattttcaatttgttgctgttcctggaccaactgcagctgtttttgcaactcgagcaccttattcctgtgccatttcaaatcgtcatcacgcttttgttggatttcttaaaattttcaaatggaattcttgaaaagtttaaatgaaaattactggaattttttttgtgtcattatgccccccttaaaaaaaattatttaaaaaatgttgaaatgcttttagcgatttatttctaagattttttgaatattttttcggagtgtaacgatacgggggaactgatccgggtggggggacgagctgatcctccttggataagctgaaacccaatgaccaaaaagccaaaatccgattatttttttctatctggcggcaaccctggcacatgccttgttgattttgtgagctttcaccaccaccggaactctgttgatgggcaacattttgctggccaatggcatcggcacacttttcgaattccgttgtgttgttggccgtttgtctggtcaattgtttgatgtaaatgtctcgcattgtcagttcgcttcgttgctgttcaatggactgctccaactgcgccttcatcgcgtacagactttttattcgaccctaaaaaattaaaatggtataaataataaaaaatccaataaaatggaaacaaaggggaacaagatgatcgatggatgccaacgaacttgaaaaa

SEQ ID NO: 8003 - DNA, 1510 bp, Heterodera glycines
  unsure (1)..(1510): unsure at all n locations
gaattttggaaaaaaaattcatacanttctggaaaatttctttaggaaaaagatttgacggacagaaagaaacactaaatttgtaactgaatgcaaaagcaaaaatcgagtatcccaaaaagtactgcattccaagggaaaatggttttgataattggtcatttttggaaaattttcctatttacggagaagggattgttggtaaaaatttcaccttgataagtcaatgggaagtaggcgaaatgacaaaaaaaattaaagaaatgtacaaaaaaaggaaacaatgagataatataatatactcaaggctatgtttttctctgccattgaaatgaatccctttaatgaatttgtactttcgtaaattgtgaacattttccgctttttgcctttgctcatccaacttattttaaattcttcctaattctatagaattttcagtgctttttctcattgttttgtctaaaaaggcattttgcaggcaaaagcgaatgcccgagcacttctctacttgaagtacaagcaaactccggacagtgtgaaccctttcccggattactgattgtgcgtgaggatggcatttggactgaccaatgccggacaatgaatgacttcgctaggaaattgtaatgtattgtaatgccgttatgtttcgatgtttatgtgctacggttaaaaataaacaaattcgtgttgttttcactccagttttgtcagtttggctaaattggcgacttttgcctggggacaaacgcccgtcgcagcttctgagcctggaccaatcgttcggcttcgcattggagtttgtgttcgattcggtagccgattttcatctgttccacgcaaaagtcgcccaaggcaatgagtgcgtctcgcaattcgacgcttttccctccgttttccattatcacttcgaccaatgcttggctgaacgactgaaagtagtgccattttagtccattgcttttctcccaattctctggccttccaataagcgcatttgtaagtgacgcccgtgtaactgacgtgccttccgcccaattgctgtcaattaacgggacatgctcaatcggtggttttgcttatgcctttttgcctggagatgtttgctgagagtggtggcatttgtcagatggcccatcaaatggacgagggtcggctcaaaagtctgaaaaacgaatggcaaattcgaaggaagaatgggcgatggaaatgccaattcgaacattggccaattccgtgaacaaagggtgcgttcggagttcaccagcggacaaatccctcagaaagaacaaagtcaaattgcgcgggtcgagttgaaagattcggagcaaaattcgaatctgccgatggatttatcgtcggattgtccgccgcttcaaatcccttcccaaagtgccaaccgcaatttcagtcccttcgttatccgtcgctttcagcgtcgctttccacgccctcctcaccaatccgatttgatgcgggttcaatccccgctgatgttaaacatcgg

SEQ ID NO: 8004 - DNA, 3674 bp, Heterodera glycines
acggcacaatttgtgccgaggaccgaattaatgtacgaattgctgctcgaactgctggagggcgagtgcattccgctgaacaaacaaaaaacagtgtgaagtgtcctccgtttcgctacctctgctccaaactttggctccgattgtgccttaaccatcgttgatcatttgtccgttttcgcctccctttgtctgtcttttgtccacctggtcatttggtgctgctgctgccgtgccaactttgtcgtgccgttcttcgcttttccctgtcctttttcttccgttcgttcttcgccgatgcttcccttcttctcctgctgctgttcaatgtgtgctgttctgttgactcttcgtggtgattttgacccgaatgattcgttccttttcatcgccaacattcgtttcggcatttcttgccccgctgagttggcgttgcccatttttgtgcttttcgctttgtctaatttgggaggggggcaatgccaaaggcaattggcacaactttttggattttcaaataaagaaaattgagagagaaaggggcaaagcattggcaaaagccatcgcatgactctctcccgcagaaggaaacttcggccgactttttgggccgtcgtttccttttcttctcaaaagcccattcattctcatcgcctcccctttttcacattgaccaatcccttgggattttccatcttcccattttttggaagcgaacattttaagggaaaagtgaatgcgtcactctctgcggcattgaatttttaaatttgagagattttgtggaggggggggggagggggatttagggtaatttgctaatttgaccaccctaataatataaagttttgtttgtcgtccaatttatttgtccttttatcttttccgctaattaattcagcccataatccttcggtctttccctttttaccgaaccgaaaaagtttcacatttttatttgttttaacgtttttgaatttattatttaattatcatgaaaatggaaaatttacacatgtgaaaatgagaatatttgaagacaaacagaaaaattaaggcagaaaatgggagcaaaaagaataaatgtacaaaagtgagggagggaaacggtagggggaggaggagtactgtaggaaggggaaaagaaggacccgttgattatggatgagatgggcgaaggggcggaatgggtgccggggaagtgatcagccgatcgatcgatcgattgatcagctaacaaataaaagaaaattcaaatttagcaaaataaaaacgaaacaaaattaaatgaaatgtttgcccggcaccacaaaaatgaactaacggatgacaataagaagagattcaacaaaagtcgatctcctcgtaaatggccgattccctcggcctttgtcggcccaattcattcgccgttgtccgcggcggtgcccttcgttctcccatcgctgacagtgccctttcttccaagtgccgtcgactttgtggtccgattctgaaggtcggctcgcacacataccgcgcgggttcggagttggcactttccgacgacgcgaagagagagcggtggtcgaaaacattctttggttgtgaaattgtcgaaatggaagagacggtgggggaagaagcggaaaaggcggcactgagggagaagagaaaggcgaacagaaagaacagcagcagggcgatgggcacggaaacggaggggaaagcggcggggggacgagaggacgaacagctgcaaaaggaagtgccattggctgcgatggctgtgcctttgtccgtttacttttgtccttttgacacttcctctgctcccatccttctcaagtcctccttcgttggcacttttcccgtttcgttttcatccattttttcctggcaattcgctccccaaaatcccttccgacaaacgcagtgaaatccgtccgccattttttggcaagagcctccgttttggcattgcgttgttcggcattcgtcgacctcttctttttccccacataaaatccctcgccatccgtgcggacaacgacagacgaagccgaaggaactgttcgggtcgacaaggcaagaagcacctgagggatttaagaattaaacattcgatgaacaaagacagaccattttggcacgaattgacgcgacaattctccaaaggttggtcacatatttggccagtccatccgttgggacagagacaaagaaacggaggaacttggcgatgacggaacgaaatgggagaggacgaaaagggggacgacgagggagggggggacgagtcggcacaggaacccccattttgacagggcaaatcggcacaaccggaactcacacggacctaaatgaaagaaaggaaaatggattagaattggaattgcctttgagaacctggcaaaatttgccgaaaaatccccggggacaatcgcaacgaaagccaaccaccgaattggacattaattgctgaacagtggaaagggaaggatcgtttcggataggggaggcgtgagatcaaaccggcacacaaaggcttccgtttcggcacggtctttccccacagccggtcagtctcttctcgcagttccgccccccaaacccaggcgggcattcgcaagtgtaagagccctccgggctgttaaggcaagtcgctccattttggcacggcgtgtggcgggcacagaactccaaatctggcaaattattgatggttgcgagggatctgatcaatcgatcggcttacctttctcacagaattggcctccctttccctcagggcacgcgcaacccccgggcaattgacagaagcccttacaacgaccatttgtgacacactgaagggacagagtcacccaatgataaccaatgccaaataccttctcacaatgggcaccgttgaaccccgggggacaaaggcaaaaaatgccatcggaggaacatttgccaccgttaagacagaaacagggagaagaagaggacgaagggacggaggaggacgagtcgacgcggggcactgatgggggacggatgagtgaggccgaatcggaaaacggactcactttggaaacggtcgcaattcggccctgcccatcctttggcacatcgcttccgtccgtcctccggcgcacattcaaaatggccgatgcgcctctcccattcgttcaattcgcaatgaaattcgcaattgggaccaaaaaaattggcacttaaatggagaattggagcaaatgaatcggaaatgggagaagggattcgcatttgagaccagcggggatttagggcattacagaaacggaccaaaattcagcgatcagcgaaatgccatttaaagaaaagtgccattggcaaatgccaaaaaatcactcatcagaggaccaacaccaacggattactcacccacagcccatccgatagcgaatgtccaacgagaagtttctgcttgagaagggttcgcatgcaccaaaaaattgccaagaaaaaaggccaatggaacgacggacattctcagaacagcggaaaagcactgaaaaaggcaatattaggcaaaagcgaataaagacaaaatgaggaagcatccctcaattcgttcccggcaatttaatttcgtcggattttacgcccaatcggtcgggccctccctttgttcgcctttttattgccccaattgggcctttctttat

SEQ ID NO: 8005 - DNA, 1051 bp, Heterodera glycines
aaagtgcggaagagacagaagagaaacgcagaggaaaagagagggggggaagccacccgaacagcagcaaagtgatgggataatcacttaattgggcataatcccatcgcataatccgccgcccctccgccgcttggagacaatcactcccttcccccccccaaacttttaccctctttgtcgccattttcctctgctgatgacatatttttgcgaagtcgtaaaactttgatgttaaatttaaaatgttgctaaaataaaaataaaataaaaacttttaaaataaattttcgaaaaaagaaagaaccttcgaaaaatgtgcgaattccaaagatagagctttttcttcggcggatgtgaagagaatttgcgcatggcccaattggcattcatttgacgaattgaatggacgagaagaaaggcaaaagtcgagttggatgggatcggagaggggggacgaggaggaaagggcgactcgaaagtgaagaagggcaaaagcatcgcctggggggacgagccaatggaggagcagtagcaggacgggaaggaggggcatggcaacaaagcactgatcaatcacggaaggggcagatcagttaaatggatgaccaatcgataaaacaggctgatcaattgatgaaagtgacccaatgataaaaagggaagagaatcaatcatagaatcatggataataatggcacatttaaacggttggcgagaaacatttgtctaacatttgcgaattggcgggtcatttggtcattcgttcggtggtcgcctcgcctaatgagcaaatagcaattgcacgggggcggtctttgagaatggttttggggttcacaagcaaatacaaagaaaggcgatcctttgcattgacgggacattttctaattgaattggcgggcatttaaattttggagaatttctctaaatttgcccttggcctcctgtaaacactcactcacttcgctaagtcagtcatttgaacatttaaaagggcgggggacaccgacccaaacaaaagacaaaaacggagggggaaaaggggggg

SEQ ID NO: 8006 - DNA, 1208 bp, Heterodera glycines
gcgactcgctgtgcttgcccactgcatttcaactagctggtaatttttatttgtccgacctaatccagaaaaaatcactatctctttttttggaatattttacgtgtcaaagggtgtgcattaagcgactcgctgtgcttgcccactgcatttcaaatagctggtaatttttatttctccggcctaatccagaaaaaatcactatctctttttttggaatattttacgtgtcaaagggtgtgcatttaagcgactcgctgtgcttgcccactgcatttcaaatagctggtaatttttatttctccggcctaatccagaaaaaatcactatctctttttttggaatattttacgtgtcaaagggtgtgcatttaagcgactcgctgtgcttgcccactgcatttcaaatagctggtaatttttatttctccggcctaatccagaaaaaatcactatctctttttttggaatattttacgtgtcaaagggtgtgcatttaagcgactcgctgtgcttgcccactgcatttcaaatagctggtaatttttatttctccggcctaatccagaaaaaatcactatctctttttttggaatattttacgtgtcaaagggtgtgcatttaagcgactcgctgtgcttgcccactgcatttcaaatagctggtaatttttatttctccggcctaatccagaaaaaatcactatctctttttttggaatattttacgtgtcaaagggtgtgcatttaagcgactcgctgtgcttgcccactgcatttcaaatagctggtaatttttatttctccggcctaatccagaaaaaatcactatctctttttttggaatattttacgtgtcaaagggtgtgcatttaagcgactcgctgtgcttgcccactgcatttcaaatagctggtaatttttatttctccggcctaatccagaaaaaatcactatctctttttttggaatattttacgtgtcaaagggtgtgcatttaagcgactcgctgtgcttgcccactgcatttcaaatagctggtaatttttatttctccggcctaatccagaaaaaatcactatctctttttttggaatattttacgtgtcaaagggtgtgcatttaagcgactcgctgtgcttgcccactgcatttcaaatagctgggaatttttatttctccggcctaatccagaaaaatcactatctct

SEQ ID NO: 8007 - DNA, 2650 bp, Heterodera glycines
  unsure (1)..(2650): unsure at all n locations
aaaaataattgatttatttaaaattttatttaaaaataaatacaaaacatttacttaaaactttttcatattccggcgaattcccgtggaatttcatcatcaaaatgattgtattcaatacaatctaaaaatatattttatttaataaaaataaaatttatttctttataaaaaaagaagctttgagttgtcaaaaaaaattaaaattatataatataaaaaatgaatctcttctgcattctccaacccatcgatctcttctttttctacacatacttgtttttttcctccgtattattattccacatcgaaattttttttaattttaaacttttagttttttcttactgaccatggccatgataaaatattcaaatggtgttgacgtgacgagacgccaaattcggtacttcatcgaatttttgtcctccggcatgaacaacgaacggggacgggcattcaacgcgaaatcaatgcattgcttctgaatttttatacatcaattgttgaatatttattgcacataaatatgaaaaatatatacataaattttttcaaattagggtaaaatttctcaaatttcttcaaattcgttaaatttaggctaaaaatcttgaaaataagctaaatatggtatgaaaagccatattagaagaaaaaataaaaagtaaatcaaaaatttattaattataaaaaataataaataaaagatagaaaatgttgttccattttttgatatattttggcataaatttccaattaaaaaaaaaaaaaaattgtttttgaatttcggtctttataggtctctaaagaccttaactcctaaaaaaaacttaaggtaggggggaagcataacccggaagtgtcctaatttttgtacatatattgtaaaagaagaatttttggaaacaccaaaaattagggttataatatttttgaatttgctttgcctggtttttgtccaggtcaccctcggacagttcagcttcgccctgttcttggaaagtgatgatgatcaaggcgacaaaaatgttgacgaagaagaacgggaacacgatgaaaaacatcacataaaacagtgccacctccacacgataatacggcgatgggccttaaaaagagtgaaaatgggaatttgtgattggttgtcggttagtctgatcacttccatgattggctctgatcactccgttctctttctcgaagataattttcaagcttgtttacacatttttaattgcattttggtcaatttcgttttgtaattttttgagaaaaaagttttcttttgttatcgttaaaaacagatatcatgctctcataatcattgaccctgaaaacctctggaaacatgtttttcgggtcgtattaaaaagaaaaatttcgtcaaaaaacgaggttcgagataaacattgaaaaaccgaatttcctaaatttgtgtgttaaattattcaaaatattaaaattgaataaaaatgcctttataagcttaaattgataaaaaaaaatatcagaaatttcaaccatacggccatgattttcgcgtttcaatccaaaaaacaaattgggatggtgctgggtcgttacttaaaaaccatcattatgaaaaattttgtcgaaaaattatttataattttgctcgaaagcaaccaaatttttaattcttgatatcatttgatagcactaaatgttctctatcagtctgcaaaatttcaaaaaatttcgttaagtttcaaaaaagttatagctcggggaactcaaaaaacgtgattttcgaacatttttggccataactttttttaaacttaataaaattttttgaaattttacaggctcataaagaacatttagatctatcgaatgatagcaaggattaaaaatttggtctttttagagcaaagttataagcaaaaattttaattatgatggttttttaagtaacgcccattatgatggtttttaagtaatgacatagcaccattgggataataaaaacaatgagataacgaaaacttttcgggttaaaaatgttctttttaccattgtgataatggttcctgaattcaacagatacaggtcatttttcggcaacctgtatcccccacccctcgaaaaaatctttgaaaacattaatgaatcatttattgaatcccccaccttggtcctcatacgtagtgtccatcgaattctgccgaatgcctggccaacctgttgaattttaaatctacttttatccatcatacatagttaagtgttttacaatatttagttgggctgctctcgagattctcggcccctgttctctagtcgagaaatttatctgtgatgttattttgggtcttgatctctttcagcatcaattctaagatttcaattttctgtctcggtttccccaagttactggaaaataatttttgactctcgagcatcttaacgctccctaataattagtcaattaatttttacacataaaaattgcaattttccacgcncaccttcgcttgttgtgaccacaaacagtgtcagcatgggcgttgaattgtgttggtcgtagtataacggacgtaaacgccattctcgttgctcaacacgagggaaataactcttanaaataattaaagtaattanataattatttttgaaaatcaca

SEQ ID NO: 8008 - DNA, 1399 bp, Heterodera glycines
  unsure (1)..(1399): unsure at all n locations
cttgaaacaaaaaatagacgaggagtatgttgaacacattcttaataataatgaatttaaaggattaatggctgtttttttaataacaataccttcaatgaattgaccacacagtcaaaaaccgcctaaaatggggaaatntaaaaattaaaaattaatttaaaaaattaaatttaaaattaatntaaaaattccccaggggctacttttagctttggaatacgtttgatggtcttcaacggtctcaacacgcgcaatactctcaacgatttgattgtactcaaatttttgccggttgccccggcggtgccgctaaaataattttaaaatttaattaaaaaaaaattgtatttaaaaaatttacgaaaatgcgaagccaacaagtgcacacgccaccacaacaccgtccaaaacattccaaaaatcacgacagtatgagcctcgatgcaaaatgacaccctgatcgatcagctaaagaacaaaaaaatatatacatttataaatatttgccggatttcctgaaaaaaaacaaataaaaatagcttttgtacttaattagaatttcagaaaataaaattaagttaattagctaaaatttttgttaccattgccaagattttttttaaaaaagtcacattttacattgaaaacccatcaaaggaagtcaaaaaaaataccaagtttttcagtttttaaaaaaaatttcgtgaaaatgatgcggtgggaaaattaaaaaatcacctctctccacctttttaatgtatttttcatccgatttttggcaaaatttcccgtccgcctactttttttaagtggaatatacatttgtacaatattcaaattggcaataaaatttaataaaattgttaaaaattatttcgtgccttcaacaacatttcacaggcgaaaacaccggtgaagcaatagtcgaagtattgcagaattttgttgcgcggattgtcgtcatcgacggggtcttcggcagctaacgaaatggaagaggcacagatcacagccatgacaacctttgaaaaaaaaatattttgatttttgtaatgattttattttaaattaaaatctaataaatattgtaaaaacaaaataattcaatttaggcggggttccaaaacaatattcaaatggatgatataaaaaacttttttctttttgacaaaactctggaaaattcacgcaattaaaaaaaaatctttgaggggatatcaaaaaggaaaatcgaaattttcatcaaaattttgcatatgttttaaaacactaccatttcaaaatatttggtggccaccacactgtgcacccaacacggaaattgggtttgcggtgccaaatgaacatggacgaatatggcacaatggggctttgggccaccaaatggactctcctc

SEQ ID NO: 8009 - DNA, 1906 bp, Heterodera glycines
acatgacgaaatatgcacaatggcttgggccaccaaatggactctcctcctcgtcacactcttcttctaatcagggacaaaaagaatatagaaatttgggtgcattattatgtccagctccagtatcagtttcctctccacattccccgaaaatctttttaattcgtcataaatttgaaaaaaaaaactataaaattaagatttttcgggaggaaacgatatgcgagggggggggagcggaaggcagagacgagctgctccttaacaatatttttttttgttgttgataaaattaccgtccaattccctggtaaattccccatccggaccagcctccaaatcatgttcatcataatcttaattattttaatttgaaaaaatcgatgagctcatcattcattatttattacccaatgtttccgactcgtcctcaaacattccattggctttttcgtctgcctataacaataggtaaaaatagaataacattaaaaagaatttctataaaattatcgccagccgaaccgtcgcaggacattttttgggccataacttttttctttttcaaccaaattaaacattcttggtattgttcaaaagcacttgataaattctattaatctgtaaaatatgaacatttttgtcatgtaaaaaaaaccagggcaaaaaattttagaaacagagaatttcttttttgagattttggcaaaggattttgacaggtctaataataaacatataagagcgattgcttaattcggtttaacaatgaaaaaagttttgggtcaaaaaaatcgtccggcgaattttttgggttcatcgaaatattcgacctcatctgcagcagttaactcttgcgcattggctaaattatccaccgcaatggccaagaacacgttgagcaaagtgtcttaacgttattatttttttttaaatatttttatattaatgcaaaaatttttaattatttgcaaaatgatcacatttcgattttcgaactgaacggattttggaaataattcgacatattaaattttctttacccaatattttggaccaaaattctcatgattaaccaatttttggttatataataatattaaaaataaaattaaaataagtttttacaattgccgaacagcacgagcacaataaagtacacacagtaaaccattccgccaccgtacacaccgccctgggattcgatggccaagtacatcacctcattccagtcttcaccggtcaaaatctacacaaaaattttgtaatgccaaaaaatccaggaggtccagggaaaagcctggatttcccggatttattatttcactggaccaagattttatttcaagctatcaaaatgcaaaattcggtagaaaatacccattctgacaaattttatttaagaattatgtaataattttaaaaatatttcacttggaatacggtaatcaaagcgattgggaaagtgtcaaaatgagtgtacggatgcatgttctggaaaaaaatattataaaaattattatattttatttaatatttttatttttttaaataaatattatgatattttatattagaaagattttataaatttaaaattcaaatattaaataatttatatattttttttacttgaaaattgaattttccaccaaacaattgcatgccgagcagtgcgaaaataacaatgaacaaaaacaacagaaacagcagtgaaatgatggaacgcattgaatgaagcagtgatcggaccaaatttcgcaaacttaaaaatgctcaaattaattaatttaattaaaaatatataaaaaataatttaaaaaatgtaattggggaaaggggaggcgacgggatggttaatttattttaccaaaattttaaaataaaatttaagcatataaaagca

SEQ ID NO: 8010 - DNA, 1394 bp, Heterodera glycines
gataattttaaattaattggacacgcctttctttggcaaattcaccagagagtacaccaagcaccaaattcagcataaaaaatgagccaagcacaatgagagggataaagtaagcccaattgtaagtgctgcccaatgagtcattcgtctgataatttaatgaaaaaaaaatattaaaattatatttaaaaaaatagatctcgaaagaatcacgcacataatacatgattgttgtccaaccctccatggtaatgcattggaacaccgtgatcatggcaaatgcaatgttgtcaaaggaagttatgccgtagtttggtccaatccattgggctaagcaaatggcacccggctaaacaaaagggaatttcttactaaagcccggaattttgaaaaagtcggattggaatcaagtcgggaaaggattattttgagatcgaaattcaggttttaaaaatttttagggcttcggaattccgcttttcgattttaaaatttttttttgagacgtcggaatttcattcctaacgccatcataccacgtcgcagttgtaggcaccagttgaagacgatttattcgagctaaaattttattaaattttaaatttgttataaaaaaaaaataataataaagcaccaagggaatggcttttcagagaaattcacaatttcgccgaaagaattgtagcaggcggcatgaaaaatgccagaataaaattccttaaaagtaaacataataaataaaaaaatattttttttcattttttaacaagttaaagaaataaagtagggacgagagactgtgggttttggtgagaacagcagataggcttgagtaagacgagggataggcttaaaaatgactgacgcactgaccaatccgatgatggcaaaaatgacaattgcaaacagaaccaacagcccaatttgaagcagtggtgccatcgcacacagaatggatttgagcacaacttgtagacctgagatttgaattttaatgaatatattttatttccaattaaaaccagggctggagacgtaactggattttaaataattagcgaaatacatatccttaattatgggattccaaaatgccctatttatgaattactaatccgtaaacatttattttttcatttatgtccaaatccaaaaaaaaaaacttgttagcatttgaaagttcttagacattagtcatcattttttgacgaaaaatagcaagcactgaaaattttaaaaataacattgggataatttttttacgaatttttggccaaaaaaaattcaaatccccccccccctctgaaaactttttttcctggctttgggccggcctgtcaaatctaaacaatttaattttctcaaataaaaaacgccactcggaatgccgctga

SEQ ID NO: 8011 - DNA, 1071 bp, Heterodera glycines
  unsure (1)..(1071): unsure at all n locations
cccctttagatacgatttttcttgcaccaaagaacactacaatttctcattttatatagtaattaataattataataaatatatgtgaagcatgcttaattttaagtataaatataaacttattacctaatttgctttttgatggtattttgaaatgtacactacagatacaggtacacagatacattactttatcaacatgtaaaaatctttaaaaaacccaaattattaaacgattgataaacattatgccaatttatcaaaattcaatgaaatttaacagattatggcggttttcccaaatagcttcgaaaatcctcaaaatttcacaaaaagccacaaaaatcctcaaatcctcattccaataaaaaaatattcattgatctatcaataaaccacaaaatgaggataaatcctcatatctggcagctgattttatttcacttattgcactcaaaaaagttaaacaatgttctattgcttcaatgataatttatttaaatgctgactttatagatttaatttctttaatgtctactaatcacttttcaattgatctgaattggaaaacatttccagcatatccctgttgaataggattgcttatttgaattttataattacaaaacatattttgctacatgtgttttcttttttaaagataattttaataatttttagcgtttgacaatacgctttttaatctgtaattgcttgtctttggattggttattaaaaggtcagtatctaaggaacattttaaaaagttttttaatatttaaataattattttattattttctataatcctaactgttagaattattgagaaatttgtctttaaaaccgtacttttttatctataatgataatattttttcaaatttattcatctgaaagaatgggtttttatgattggaccaattataattattgattaattttttcttttattggttcaattattctattacttacgcgctatttttgctctcttcatttctatttattggtttattgtcagtaaagaanaagagtccacaaaagggaaaaatccgcttacattgagga

SEQ ID NO: 8012 - DNA, 3555 bp, Heterodera glycines
  unsure (1)..(3555): unsure at all n locations
tttttccggtnctatttacagggaatgaaatagttntagtnttatttttaaatgatnntaatgagtttatttcaatgagctttttatcgagttggttccaaattttagttacccgcnccgcaaaaggtataaattttttgcctaatttatatttcgagttaagtctataaaagggaatgttaaagcgttcagaaggtttgaatatttcaaagggattaagatctgttcggccataaattattttatgagccatgaacagatcagacagctttcgcctgctttcaagtgttggtagttgaaggtattctaatctattttggtatggaatgggtggaaggctacatttaaaaagaactcttttggtgaaatatttttgacatttttcaatttttttaatattttttagaagagatggattccaaacctcaggagcatattccaataacggtctaacataagttttgtacaaaataatccaaatcctagaagattttgatttaataacccgaaataaagaacgcatacgtaaatatgcgttctttgttatttgtgtgacatgattggaaaattgcaatttattatcaatatttatgcctaaatccctaattgtatccgcaacatttattatatttccatcaattttatatatttctttggggtttttattccccaaatgaagtacaaaagtttttttaattgagattctgatttgccatttatttgcccattcggataaattatgcaatgctttatgcataatttctgtgtcagctctcgctttataacaaatatacaatttaacatcatcagcatataatttaattctcacttctgatggcaaagcatcaggaagatcgttaatatagatcaaaaataataaagggcccaggacagatccctgggggacgccagaaccaactttttactggaggataaatcatccccaattttaacacgaaaagtcctattactcaaaaagtcctttatccacatcaaaagtttgccccttataccaattttttccaatttgtatgaaagtaattcatggggcactgagtcaaatgctttttgaaagtcaatataaatacagtcaacattttttccatttataattgcctcataccaatcttccacaactgttatctggagatttctttacgtaaaaaaaagttattacaaaatttgttcattttttcaataaaatctgttaacaaatcagaagcaattttcaaaatttttcccggctgcgcctatcggcaccatcggaccgaccttgcctatgaaaatttttttggaaaaagcgcacagcaaaaaagtggtttaaatagcaataaaaacattcgacaaataataaagaatttgattttttaaagtataagcttttaacccggacccggttgttgcccaaatacgcggaccgtgcaatcatacaaaatacttgaatatttcaaattttgaatagttaatttaaattaaaatttataatttattatatctcataaaattcaattccctaaattcaatagaaatttttaatgcatttaatcttaaatttaaaaaaaatttatataacttatatttcatacataataattctctatttttcactgaaattaagtgacatcttaaactggtaataattaattttacttttatatatatatatatataatttgcaaaaagaatcttctattatttgtgttaaccatgaccgctaaccatgaccgctattattatatggcgtcgactacaaaatttgctattttgccattttgtatttgacttatcaataatattttcgactcaatggttgttttaaagtattagtaataaaatattcataaaatattatactaaaataatgtttattctttttcttacgagaataagaatctgcaatttaaaatttattttatccatttcgtgcaaatgtcttcttattgaaacaattttttttttactttaaatttcgccaattttcaaaattccctttatttgatttagcactaaaaatcggttgccgatgaaccatagctttttaaaaattcttaattaaagattttttgaaatcattttatagcattaagagtttatagacatgtctttttttggtcttgtaaattgcagagcccaaatatttttttgtgaaatagtctaattctgttgtcaaattcctttgcattaggcggaatgacatatttgaaccaagggatgtcagatgtgtcctgaacaagttgatgatacggcttcattcatcttatgcttttttatacatattttccattaagttagtatttgtaatttattggctttaatagaataaaaacattttaaaagatattaaggtttgttttccttcgagtgatattttaatatttcattattttatttatatttcatatatctcactattacatttatatttattagcttttatttttttttattcaagtgactcgccaagcagtgtattaatctcatgcccgatgcaagctttttttgatatttcaatttattaatttatttttcgtgcttacagtttctcttttaaataatgatttttttttaaatttatagctttaatttattccaatgtttaattttatattatcatattgattgctttaaagcagtaaaagaagtacgtaggcgtaattcgattttactagctagaataccgtaatatattctaagtattatgaatttaataaaaaatttcatcacatttgttatttatttattaaagaatatgcatacttcaatttaaactgaattgaaccgaaattgttacacataatggtttctataagggactactacctgcatattggtcatcatcataataaaaattttcaatcacaaaataattttatataaaaattgatttattaatgaaaattttcatgcagtacttttttatatttaattttctaaatttttgtttttttataatgaggttcgtatttacatcacattttattgttttcatgtttattttattttctaactcaatttcaatttttttaacttttagtctaatatttttatatctcgtttcattttactaaaaaaattaagcgtaataattttattatagttttttttaatattttttgatttaaagaatggaactggacttttttcaggaatcattattagctttttttacataaaatttaaatttcttataaaaatattcatattaagttcatatttttttataattaataaaaaaaataataattctttaatttgtttaaaaaatggtttaactttagttaaaaaatgccgaaataggtcaactgaaattcgttaagttattttttgatagcaaaatcgttgagattgagccgacatttgacaaagttacgacaaaaaacactttgtaccaaaacttttttccacctgtgtatattgatgaataaaataattaattaaaaaaaattgacaatgattttaaaatgagtattatactacattatattcaaataatacaataaatcttaaacgaattgttcttttaagaagttaataaaattgctttttacattgtat

SEQ ID NO: 8013 - DNA, 1914 bp, Heterodera glycines
  unsure (1)..(1914): unsure at all n locations
ataattaatttaatntatntaattattattntaagttnttctcatagagataataaatggtgattacaaatggtttaaaaataagtgattatcatgtggtataaatcataaatttgaagcaaatagatctttttataacgtactattagtattatttattttacatcatcttgtatgcttcaattaatttgttgatttaattattgacatcatttaatacattatttatctgttattatatttataattaatttaaattgacaatttttcactattttcaaatttattaatttttttttttgcgattttacttcttcatcaattttttgttttaccaaatatcattaaactttttaagaatgttttttatttatttattgattgagaacaaaatccaattcaattctgtagatttaagtgttgataatttgtttttgtatgtatgatacatcattcaaactttgcgtaatcattttttaatgcacaaattcgaattgcaaatttttagttattctagaataaagtttttgtctattttagagattccgacatagttttatcgctattgctgtacttatttttcatttattccctttcagcctaatcttccatttccaataacatacaaattagccactttcaattccctcgcccttcttttcttgtctcgcaccaaaattttgagattgaacttatcgtcaagaagccttaaatattatttattttatcttttgttgttttttaaatcatcgacctttgtgttcgacatatttgagattgaagctatcttcattcaccattaaaccctatttataatttatttattttttgttgatttttaaaatatttcagcttttaaaaatttaaagagccgattacttttaaaactgatgaaagttttcatattttcgttttattaatagtgcttttttcggtatcttcttgctccaaactttcggttgttacggcatggcacatctcaatatatttcttttaatcaaaagatgtatattttttgcttgaaatatctttattttatttattttaaatcattttaatttatataaaatgccatatatttgtattatattcctttttatttgttatccattatattatattcctttttattttttataagtccacaagataaatgccattcacgaaaagcttaaaaattgccgtttataaacgaattgtgtttagtaaattaaaataattcgcatgaattctctattttgaaatgaataaagcttcttcatttttgaacccaatgaaacttatttaaaattatctattattatctattttaattcttgcaatttgtttaattatatgtttaagttcttttatcaattatttttatataacgatttaatttttttgctttaaaattattgaagaaacagcgttatataggtaatctttgtaagtgcttaataaaataattatatagatatatgaatcaaacatttaaaataccaaatgtggtaaatctgctccacgttgactcacacagagaaggcattgctcggagaaagttaatttacgaatttttgctgctcaaaataagttcgaaggttcaataaatactttgaatttttaaagggtaagaaatattattaaaaatttggattaaagaaatcttgatgattttaaaatatgaatttataattaacggacatttttaatgaaatatttaagggtaaaaataacaatttattttttaaagataatttatcatattgtttttttacttattcgctcgttctcttcagacatttgcaagaattattcacgtcctcaattatataatattttttaaatttttattcttaaagaatactgtattttattatcttttgagttcctaataattaattgctcatgatcgcttcatcaaatatgacatga

SEQ ID NO: 8014 - DNA, 5347 bp, Heterodera glycines
cttttcatctaccaaattcttcccttacaaataaatacacctttttaattaattaaatccaaaaccatttttcttaaactaaaaacaccttcttaaaatacacataaaacaattttatcccttactttaaaacttctatgacccatttcgatatgcatattttgtatatctgtatatattcacgtctttttgtgattattttatgatattggagctctttttaaaaaactaccattaaaactagcaccttaattatattggaccttttgactcataaggacagaaattttcataaatcaattagaaaaatatttggcattttaataataatataatcataaatctttataaaaattggaaattacgacaaaatataagatcaaaaagaaattttctattttttagttgttttcttagaatttataaatttttagcgttttccctttagataggcatatcttagctattttcgagagttgtagcttaaatttaaaggacttgaagaaattttgagaaattaacctcaatttggtaaaatttatgtgcgcatttcttcggttttatgagcacagaattaaaagccgtcaaatgagattatggggcgaattttaaggcaaaaattttaaggaatgtcagattaattcgagaaatccggatttaaatagcgcgggaaaggcaattcattctcaaaattttcaatctaatttcatattgaaatcattcaaaaactatgcaccttttgaggtaattaaacaaattatatatgaaataacagctcaaaaagcgaaaaacataattttggtaattattgagttttatttgacaaattcgattggctttttaatttcgagaattgtgaaaagttaaacaatgaatctccaaagagctaattgggatctgcccgggaaatattttaaaaaattattgacttgtcatttcttgcctttcactctgagatttccatgaggacaacaagcaaaagcatgtggcacaacacaactcaaaagaaggaacgacacaaagttgtggaagcagcagcagatgacaaatgaggagttcattaagaaaagtaatgggcaaatcagtgaaataatgaaattaaatgacataatttaatctcccatttataaaagaactaatttatcccataaatggacattttttgaattttgtttgcacaataaattaatgaaatttattaatggcgatttctgtttgttcaaagcaactcgcgtgatgccgaacagctgcaaataccaaaattttgaaccctttggaaaggaattagctgatttagaaatttaccgaaaaattggccatcatcatcagatcatcacacaccgaaattaactgattttaaatttgcaaatgaatttcacgttgactaattgcttataaaaagaaaattagtcactcagcaccgccagcttaaaaactcggtcggtagcggacacgaaagcttcggagatggcacaggcaattggcacgacaacgccaactatttttgtagtgttgaatgttcaactatttttgtaacggatactgatcatccaagttttcagcttcagcagatcatttggctgacttttgagttgtaatgcctgttttttttgcctatttcggctattttgttcttaatgccaattttggctttttttcaaaaatgcagtaaagacaaaaaagcaccgcatcccctcctcccccgagataaaaaaagtaaaaattcattttttatcttttcgaaaaatatgtatttattttatgcagaaacaatatataaattttaaaatgcgtgtaaaataaagtaaattaaatgtatatacaattaaaaacaaaagcaaaaattaattttgtaagttttctcttctctgttaaattaggcaatttgtgtagcgaacaaatccgaaacatttttgtactcaaagacaggtccgaaatccgcttcaatcacatcaccaagcgtattaacttgtacaaatggaagcaattcgttgtcaaaaacgaataaatttgaggtgtctaaaaatagtcttcatctgcttaatttcatgataaattaatatttctcactcaatttttgtccatttttggtgtaaatgatttccatcgatgttaaattggcgccgcatccgattgtgtcgccctctgcaaaggagggatatccgcccaagccagtggcactgtgtccgaaaatgaagccattgtttgaatatttgtaaaaggtgtcgtcggattttgtccaaattccaatcgaaatggtactgtaaatgcctaatgatatcaaattcaaatcagcatcggcttccaataccaaaggccgactttcagctttttaaatttgtccacaatttcttagattcctactctcctctctacatattagaaaggaattttttagaatgaaagtaaatttataaaaaattcaattttcctcggaattttaataaaattttcatttcctctggaacaaagcaaacactgaaaagccccaatccataggatgtggtcaacctcaaccagcctttgcatatctttaaaaatccaacatcaatacttacctgatgtttctgttattctttatgattttggtttcataatagacaatggccaaatttttatccttttttataattcaatttctgatcagattgtcggttttactcactttagttgtcctttaaagaatttattgttaagcaaacaaaaaatattaattaaatcccataaaattaaattcatttattcataatctaattgtaaaacatttttttaaatgggattttggacccccaaatttggcatttgaaagtcttccgttgcttctttttattgatggtttgccgatttctccttgattttggaggtcattattattattattatttttctgcccatttgcatatccgttttccatctattggctgagaacaaatgacctttacaagcaaataaatcgttcatttattcacattaaatgccggctcatcacagaagagcataactttttcaacttttcgatttcctgacgaattaattaacttttataaaaaaccgtcccataaaaaataattttatttgctatttaaatgctatttttattatatattcatttctatgaaatatattattaatttacttccatatcattttattaataatattcgaggcaggcgcagagtttgatccaacatttttttttggggggggggggaacagttttccaggcgcaacgaacctaaaccaaaaaaaaatttatcccgaagatggatgatccttccttttcttaaatattcttttgactttcatctcgaaaaacttctgaaaactccaggttaggtaggcttcgtgcttcttacgatttccactgattctggcgcttggcggcagcgaaaatcctaacaaataatcattaatttttaagatttgtgcaaatccaaaagcaaaagaaatgaatttttggcattttgcaattgttttgcttcatttatgtatgcaaatgttgtcagaacccactgctgaagtgcaggagaatggtatgttttttttgttcaatttttaattatatttttcagtgaaaaatattcgcgtcgaaattaatgatttacgcgagaacatttcacgacttttcaccaaatttgtaagtttttctaaaatatgccaaattagcagtcaaattacagacaaaaattgaattggaacagaaacaaattgaagaagcattgaatgaccaattattggttactcaagaacaaaaatcggcagttgtgagtcgccgacaaacttttaaataaaaacattttgatttaaaagtaatatttaattataaataaatgatgatgacatattgcgtatggcttattaagaaaccaaaaataaattttttagaacgaaacacgagaaacggagcaattgaagacattggaatttaaagttagatttgaagaaaatatttattattattattattattttttactttaagccgaaaaaccaatggagtgtcaacaaatctgatagcgaattgttcattttcaagcccaaacacttgaaagccattcatcgtggaaaagaaataggtaaaagaaattaattatttatttattttttattactatggcacataatataaaaatatactaatgctaataatgtaactttttcattgcttaggctaaaattgcacaaattctttgtataataaaactaaaaatagaagattctttgatactttaacattgagaaagttttttgaaaatttttgcataatttgttgccttttcaattaattaagtcattttgccttaaactttttttaaatttcattaaacactttttaacaaattcattccaccttttatgccttttgatttggcatttttaagcggcatattttaagggcggcgccgggaattaattgcggaatctgtgcttctcccatattttgaagttgtgtattatgagacgaaaattataagaaagcaactaaatattgaaggaagctcgtaagtaatcgaaggaatcaaataacaattttatttaattttaatcgttttaaaataaatttaaaattttaatgatttataaaaacttttaagatcgatcggaattggactttttggaaaaagcctttacatgtatggggacaatggcttcatttttgggcacaatgtgaatggcttctggggatatccctcgtttgaagagggcgacacaatcggatgtggggccaatttaacatcgatggaaatcatttacaccaaaaatgggcagaaattgagtgagtaaaaataaaataaacttagtgaaaaaattcagagaatatcgtgaaaaattggaaagaaaaatgatgactctattcatttcttaactttcacgtttacaagcaaataaaagtttaaaaaaatgaattttaaaactccactggggatagaaaatcttatctcaatggccataaaacttgaccaaaacactaattaatttataaacaaaattgtgcaaaataaagcattgtaaatcatttttatgaatttcgttttaaaagaaatcaagctatttaaaacacaattgtcacattaactcttatttatttgatttccaagtttaattttttgagttaatttaaaaaatagaaacacaccattacataataattattttttaggcattttttattcattaaatttatttattttttcatttttaagatccgcgaatttgattttaccggtctctattttaaactcataaaatatatttattacatgacttctacagtgttttaaatcagagactaagtggcgctgcaagatttttaattttcttttttttatttaaacagtattgtttt

SEQ ID NO: 8015 - DNA, 1082 bp, Heterodera glycines
taaatcagagactaagtggcgctgcaagatttttaaatcctcttttttttattctacacagtatcgtttttttgtttgattgctcatttttgtagatacttcaaatttgttcgtacctgactctgatctgctccctgttgtcttcctgtatctcgcaggagacataatcgaggcgaactttggcacgagatttgcttataatttcaacgccagcgaatcttttcttgatgattgatattcggcaattaaaattaattatttccatgtgggcggggggggggggcgtaaaatggctgcatttagtccaatgtttttttaatcgcggtaaattcggccacggttttagtcttaacgtttttaaaagttagaatttcttaaatcgtaccctgaggctggaaacagcttgttaaaatgcacataaaacaattttgtgccttggtttgaaacttctatgacccatttcgatatgcatattttgtatatctgtatatattcacgtctttttgtgattatttttatgatattggagctctttttaaaaaacgaccattaaaactagcaccttaattatattggaccttttgactcataaggacagaaattttcataaatcaattagaaaaatatttggcattttaataataatataattataaatctttataaaaattggcaattacgacaaaatataagatcaaaaagaaattttctatttttagttgttttcttagaatttataaatttttagcgttttccctttagataggcatatcttagctattttcgagagttgtagcttaaatttaaaggacttgaagaaattttgagaaattaacctcaatttggtaaaatttatgtgcgcatttcttcggttttatgagcacagaattaaaagccgtcaaatgagattatggggcgaattttaaggcaaaaattttaaggaatgtcagattaattcgagaaatccggatttaaatagcgcgggaaaggcaattcattctcaagattttcaatctaatttcatattgaaatcattcaaaataaagcaccttttgaggtaattaaacaaattatatatgaaa

SEQ ID NO: 8016 - DNA, 7098 bp, Heterodera glycines
  unsure (1)..(7098): unsure at all n locations
ataaagttacatatttagatatttttattataatgcaaaaaattggcaagatattctttctctacttcaaaatcatttttggaataatgttcataattaagctatttagtcagtcgagattgaaatggctaatacttttatttcaatcattgcccgattccatcacaatgcagaagcgattgaaatagtagaagatctcgtatttgatgtaaatgcatatagaaagtctaaatgtagtatgtggaacgaatttacaagcactctcttttactttgttattgttagtgaaattcacataggttagcacgctggggccaacatcattaaagatcaatctctgttacaccatcagcaataagcatgtgtatttaatgccagaataaattttgcatggcgataagatggattttatgataattacttcttaccaaattttatgcagccagttcaatattctttttattcaagaaagcatccacatctataccataagactgaatgtgccaagggttttttaatacggttcactcgaagagaacttttcatatggatctaacacatacgcaatcaaaatcatatctgaattggcataggtggttggggagaggggggggggagaattgaggattgatcagaacgatcccgaacgaaccaaccaaaacgaactacgcttggtttgatcagagcaattccagacttatcgggaaactgaaattgatcatgttgatcacaaacggaccaacttaaacggactacgattaggttgaaaaatgagggtcattaatcactgcttcatcgctcaataatggggctgatcagatcaatcccaatcgatgagttccaactttttttgtgtgttttcttcagctgctgtaaatgtgcaaatgcttctttcagtgttctgtatgctgatcagccgacgactttcgatgttgacttgcccatgatttgctcctatttgacctattggtggcaacatggcctcgagggcccttcgcgctcactcgtcctaattacccaagtgaccgccgagcacattaaccgtttgttctgctccttgctgaccatgatgaaggaccacgtgggccgtgaaaatgccccgtggctgtgccgtgcccatttctcagccgtgccgctgattcaatacgtaacttgcgacccggtcagggaacaaatgctgccggtggcggaacacttacgccaaatggccgagaaggcatttgccgacgaggagcgcatgagaacgcatccggacgaggcggacgacgcaacagttgcggaggtgggtgccatgccaatgaggcgacacacgccgaaagtttaaaagggcggcaaaaaaggagctaaaatggggacaaaagcatcaaaaggggtaaaagaaagaacttttcttaaggacaatgcgcgactcgtccgcgacgtttacgcgttctttccaattttgatgaaattcaccgatttgcaccgcgccaaatggttgaaaatgccctcttgggagagtgacggcatttacgagaatgtggcggtgattttccgcatttggtcgcttagccagcacttcaagcgggaggagttgaattacatggctcagtttgaggacggagagggcactttgagcgcaatgggcgcggaaatgaaaacgggcaaagcggcaattgcggagcggaaaaagcgccgcagggagggacaggtcggaaagatgggcgagtggggagagaggacggggcaattggcaatgtgcagggggcacgggagggaggagacgagacggcggagtgaaaattcgggaattttggagggtcgaatggtccatagtcaaggaagaagtcgggaatggggaagcaccccaggaagaggaagaagtcgggaatggagaagggaggagagagtcgggaatggggaaggggacacgaagaagttgatcaataacctatcccaaatgaacccatctctctctgctgatcacaggtccgacgtgataaacacgcgaatagcattgtgatcgcctgtctgaagcggcttttgcctgtgggactaaacgttttcgggggccgagagttggacattgtccagcaaagcaaagagcgctttttggccaaagagaatgaggaaaaagtgtgcaaattcatccgatcgcggctcaccgtccccgtggtaattaattcatccgctaaacactaaacacccaatcaaaatgactgattaatcttttcggttttcaattagcgcaccgatccgacggataaaaacgcgtggcaattgagtctctaccggaagatcggtaaatcgcaaatgcgaggcaaagaggagatgagtcaggaagcggtggtggacaaaatcgccaacatggccaaagtggtggccattttgcacacggtgagagggcaaaataaaataaaaaagggtgtggggagaagggagggacggacaattggccaatggcacgcgacaattggtcaatcggcggggtttgctttgcttccatttgtggccactttctccgtcgtccgactttttctcttcgttgtttttcccatttgttgctgtgctattttcactcacttttttctcttcccttttcatttaggctttctttatcttttggcattttccaaaaattttttccattttttggcaaagtaattaaattcaaaatttgcctgagggcatttccgctctctgccctccctttgccttgcaattttctgtgtctgtctgtgtttgtctaacactctgtcctttcatttcccttcagaccgaacacccccaggcatataaaccgtctgagtggaaaaagatggtcagcagccaacggaagcgagcagtagtcgcgtgtttccggatgatccccgtgtacagtatccccaggtacgcactgctaatacagtacactcggcacgccatttccgcactaaccaaacacagcacatgcacagtttgaactttgtttctgccgtgtgcttattgacagtaattaacgttatgccaagggaaggatacggtattacagtaggaatagtttttttcgaaaagcgatcgatcggcggtcattccaccgaatgtctgtctttgagcactaatcggccctctcccaaaggtaacaagccgactggagaaggaagaccgatggaagaaagtactaacactgcagcgaaagcgcatggccatttcactgatcaccgcgagtcatttgtacaggctggaaaagtatgtgaggagcacagagtgctgatctgatccgatcatttggtgctgtgcttttccgatttgctgttcaaaatcaacaaaaaacgcaaaaggcttcccatttaaggcatcgtggcatcaactattttttgcccgtgttcagtcaacattggctgaacgatgaagacattgacgaggatcggcttgtctccgacatttgcgtaaatttatttttgagaagcaaaatttggactctcactaaagaacgatgccattggagacgctgttgtggagcaacaaaattcaactcaaattgtccgcgtggtggaggacgaaagtggggggctgaagatcgaagaagggccaaacgcagggcaccaggaaaagtacaattagcaagcacataatgatgatgatcataatgaggatgagcagggtgtcataatggggtagtaaaatgggacaaacccattccatcgaactgtgcgaagagtgaaagggtatgtgtctgtatgggcaaagaaaagccctgttttcagggactaataaaaaaacgctttctaccgaaaataggctgaaaggaattgcttctcagcgtttgttctctcctcaaggccctaaaacccaaacaaaaatactgatcattttattaccattggtctatgattactgtgatctgaccatttctgattgacctttgcctttgacagaattgtgccggacgcacttcgccagctgatcctttgcttccaaagggcggccaccagcgaagagagtggccaatcgaacagcacgacggaggacaagtggggcagggcaaaggccaaaaggggtacaaaagccgctgatcggacagattgttcattcgctacgcggacgtaatgtgccgatcagtgcacattgggcaggacggagacgaaggcggcgcaatggacgacgaaaatgaggtggaccaagcggagaaggaggaaatggcacagacactgcgggcggaacagggcgtattggcaaaccgaggagcagcgataatgtgagaggacaaacggaattttgggaagaggggggggggggtaattagtgggagaaaaaaacagaggaaccgttgcagggtgttgatgtatttgagtgcggcaagcggagagccgaccgaaatggtggcacaaacacttcagctgggcatccatctgctgaacggaggcaacaaaaccattcagaaggtccttgccattcattttggctttttcttccgctgattttcacttttccttttcttagtcaatgctcaattatttgcaactgaaaaaggacgtgcgcttcttcacctccctctccggactgatgaacaaatgcagcgtgctcaacttagaaatgttcgagcgacagatcaaagcggaagggttgngaatgggcgcggcattggcagcggggtaattagcctaatgaatgattaatgaacgaaccttggaaagtgccgagcctttgccaactccgtttttagggagcatcagaatctgaacgacgcgccgttcacctgctcactgttccgctttatgcaattgacttgcgaaggacacaatttggactttcaaaattatttggtcattaaagcaaaatgccattgtcgaaatgccattttagcgtacccaacctggccacaccaccagcgtcaatttgatcaattcaacggtcgattatttgcttcgtttgcaggaatctgtgatggacttttactggcattattcctccaaggaagtgagtggtaaatggcgggaaaaaggcatgagaattgatcgctggaagattttgtgtgattgatcagttagtatgagagattgatcagtaaagaacactggtcaggaaggacttatacaatcaaaaattaattttgtgcaacaactgattaatcagtaaaggcattccattgaataataagttgagttatgtgagactgatcaatgacgaatgattaaaagagactttctcacttggcatttgtcagatgatcgatgagaacggcaaagaatactttctgcgtgccatccaagtgtgcagccaagtgttcaacactttgaccgaaagcatccaggcatttatttgttttttgatttgtttatttcatcactttccctgaagggcccctgcgtcggcaaccaaatgactttggccaattcccgcctttgggatgccatcaacggctttttctttctgtttgctcacatgatggagaagctgtacaagaacagcacgcagttggaactgctcagagagtttctgaaccttcagaaggacatggtggtgctgatgctttcaatgttggaaggtgaccaatggcaccgatgattaagccataatcttggcaaatgttaaggcaatgtgctaaacggaccgatcggaaagcaaatggtggacgcattggtggagagtcagcagtgcgtggagatgatcctcaagttttcggatatgttcctcaaactgaaggtccatccgccgaatgggccactactttcggcacatttaacgtttttggcattcctttgaaggatttgaccacttcgcaagcattccaagactttgacaccaatcgcgacggatggatttcgccgaaggaattccaacgggcgatggaagcgcagaaaatgtactcggtggaggagatcacctacctgatgatgtgcacggacgtgaacaatgacggcaaaatcgactacatggagttcacggaacgatttcacaacccagcgagagacatcggtaggggagggaatggccagggaataggccaacgcggcacttaaaaagggccaatttggcattccattgtcttccagggtttaacttagccgttctgctgaccaacctcaaggagcacatcaccaacgacccccggctcgaaaagatcgtcgagaaggctggctcactgttggactattttgacccctttttgggccgaattgaaataatggggtgagcgatggcgaaaggaataataactctctcggcaaactccgaccaatgaagttttgggacggagttggccggactgagtggggggggggggattcactgctctgatcaatcgcactcattgtcagatcctcgaaaaaggtggagaagatttacttcgagatccaagagagttggttggaacagtggggcaagcagcaaatccgcgactcgaagaacgcttttctgttcaatgtgctgcaggacgacggtggcgaccagggcaagctggaggcgttcatcaatttttgtgaagacacaatttttgaggtattgcaaaatatgctttctgctggcataagcaatgcgataaataatcattggcattttatgccatttttcaaatgccaaatgttcgtcaatcattggcattttatgatgttattccatttcgatcgtccattttgaccatttgtccacctttgcgctttcctctggcagatgcaacacgcggctgagatcagttcgggcgattcgaccagcgagtcgaaagtcgagcgtgcgatgcgccaaagggactatttcctgcagcaaacgtacgccggcgagcaaatctccaaaacgcttcgggcggggtacaaatgcgggatggacgcggcggcggcactgcgcccggaaaacatacaaaaggaactgaaaagggcggcaaagaaattcagcaggtaaagcaaaattggaagcgcaattaattacccataattaattgggtgtgaaaaacaaagcattgaaagtcgacgaatgttttgcctttcgttgggtccgtcccgcgccattccgttaatccgcgtccattcccgcttctcagcatgagttgggctgagctgttcaccgcgttggcattgctttgcttccgcgccggtcgtgccttcttcttcttccacctgtttttgctttcgaccgcttttcgtt

SEQ ID NO: 8017 - DNA, 6352 bp, Heterodera glycines
  unsure (1)..(6352): unsure at all n locations
gaaaagttactcccgatcgaagtaaagctgatgtgttccatctcaggggtctcctggataagaaacacccgaggtttggctggttttcgcncanagtttccaggcgaattattgtatagacaataaattccccagggattgcagcctatgatttcatagactgtcttggacttttcctgagcataccaacgataaaaaaaggcatgcactgccgcttaagaggcatttattgccccaaaaggctgtgctgtccaggcaaaatgaattgcctggaaaattgttggcatcttttagctcaggaatggaagtattgtggcgaacttcgctaccatactttccttcacaggagcccatcttagggcaccttttaccggccaatacattaattgcgtatgaacgttgccaggctttagtgaagctttggcattccaaagctaaagccttaagcacaacgtttattgagccaaggataacaccttcatctgttttcagaagaagtgtgtttgtttggccaactggcagcaacgtcagcattgctgagttttcgacaatgcatctcatgcttgtcgcatttttaatgcatttttccgatttggccatgactgctatggtctctgctccagtcaaatcctggagagagttagccataaggacaacaaacgccattgttctgtaaacacggcgtgatgtccaattttgagaagctgttgcccttggcctcctctctttcggaagccgatttgggccagctaagtaaattattggcctgataaattgaattatcagccaaatgaccatataaaatcctgaaaacaggacttttaatatggaaaaggccataaagctaatgcttatgagtgataagcaaagtccccctgctaacattgatgaaatcaatgggtaacaggttggattcgctaactgttcaatgcaaaaatagcattcgatgagttcgcactcatcaactgctggacataacatgtcctttttgaacatgtgtttcgaatccatccaaaaatgaccttcacattggaagtcatttaggaggatttcctttggtagctcgtaagtgagctgctttacattctcatgaatgtaacagttctctgcacagcagagctcaactttattgatttcttttggaatctttgctttaacgcctttgttaaagcaaagaagtttgcattcattgcagtgattggttggataagcatttgtttctgttccccccttaacgggaagagggaacaaacatgctaaaattacagtaaacgccattatttgcaaaatatggcgcgctgtacaaaattgagggattgcccctctttgccttccttcttgaaagcaaggcgtgctctgatcctcaaaacaaagtaatgatactttgagttggatcattagccaagcaatggttttacgcccaatagaaagggcttttaaaattgagagaaccatcaggcttatgctgatgtaaaaacaaagcgtcaatgctatgattgattgctctgttcgattaggaagagtttcttcccatttattgtccattcgattaatacgaatggaaaaaactgaatggctcacaacgccattcttttttatgcaacagccacagattttcttatctgtgggagttactttcggtgtcttctgctcaccgaaatgagagtcagattggtatgaaatctgactcggttgatcgaaaagaactgacttttcgatcattttttggtggtcgtgctttggcatgaccatggcacgacaaaaaaatgaatgtgatttatttgtcacatttttcaacccactggttgagctgcagtcgaaagcaatactttcagacggtttatcctctactctagaggatacgcctgagtaaagggttttagaacgaggaaactctcctctttgtttggaggactgtttcttctgaacagtccttccttcccttatctgttgcggagtgctcccaattggagcatctccatgataacagatcatatagtggtgctttccaccacacttcaagcatctctttggagattggcattgttgtgccttatgatctttcataaggcaattaaaacattttcgctgttttgcgagccgccttctgcgtgctcctggtgtggaatattggggacatcgacttggaggatgtcccatagcacaacaaagggaacaagtttgtcttgtccctgtccctatttttctttgagaaaattggggacttgtcaatgtcagaaatgatctgtttacttggggagacatcatccccacagaatcatttctgttgtcgggtctctcgtgaccctggataaactgattgggaggggactctgtccccatcccatggaaattattcctctgcacttgcggaggaatattccattgtttttctcctccataacacaccataaagtggtgtctttcaccacattgactgcacctgcggggtgaggtgcagttcagagaattatgccccataatgaggcaattaatacacctgtcttggtccgcgaggcgcttccttcgagcccccggagtggtgtatttcgtgcaccgactcggtgcatgcccctttgcttcacaaagggagcataagcgatttgaccccctatctgaaataggggtttgagatttgttaatggccgagaaggaacgattcggttgaggagacatcctcctcaccggttcgtttcgttccattggcctccactgccattcttgccggaacggctgggagaaacggaacggtgttcctctcccttggttagctcttcccccatttgaatgtgggggaaaattccggggtttttcctcacctcgaaaaacctgagtacatctctgtacttcttctttcacttcaacgattgaagtgatagctcttcggagctctgtgcaattaaaggcacctcctgccctcatttccttctccaccacttgggtgagaaggtgataaggcagtttggacttaatagtggaggccatgaacttattttgttcattttctccatagtccaacaactgatggcaaatccgttcaatggactctgagaattgtctcagagactgaacggattctgctggtttgggaaggtggagtaactccgcttggagggactccaccatcgttttttcatccccaaaccgctttttcagaatttcaactacccttggataattttcatctgacggtgggtataagtcaattgctctcctagcaactgacttctctgggaggcatcccagcaaataaatgtgcttcttgaagtcttcaatttgaagactttcaacggaagtctcaaatagcttccaaaacaaaggccattctcggggttcccccgagaatttgggcaatgttatcggcggaagcgtcacatcatgacgctgatgcacaagttgtggctgctgcacaacttgtgctggttggtttggctggggaattgcatcccccagctctgagaggcctaaagccccttcaatagtgtcgacaagccctcgggcttggtcaacccaatgcatgaaagccttcccttcaggcttaaagtctctgtaattttgctcttcatcttgaagagcttgtcccttcactctcagaaaaatggcttcccattttccattgtatttctccaaaagagaaattgttttgcagagattttgtctctccgcgattagatctgcacggacactttggtccgccagctctttgcccaagttttcttgggctgtctcaatgtacatcttgagacgcaccaccattggtgcaatggagatgcgcaagagctcactcattgctcttacgcttaatgaaaacacaataaacccctttgggttgtgtgtttgatccaagcgctcaggccgcgctttggattggtttggttggagggtaggcttacgactggaagtcgacccctacggggctccaattttgtgggcaaaaggccacaaaaatttgcacttcccggcagaaggggaagcagactctcacggcagaaggggggagtcttttaagcaaagcgaatttctgtccaaaagacagaaattcactgaatgtccaaagggacaaattaaaggaggaaattcctctcctttactgaagggacaatttgaaaggaggaaaatgtttctcctttccttttgtaagccttttctttgacccaacgggggtcaacggcttaatggtctgtatgaaagggctcctgagcgtcccttttacagatagagaaaagactaagactctttcttaatctttattcaattcaattgcacaattacaatttaatgcaaatgcttggacagaaaactgtcacgactgacttaatcaaaaagtgatcagagtgaagaaaatggagaatgggccgggcttttataccctcacaatcgatgggggcggggccaggcacgtgaagaaatgtgcacaagcaaagggaaaaaattccctcaaaaatgatgactcatagcgaaaatatggagaaaagaaaagatgagtcataattaaaggagcgagcgaagggagaaaattgatcgacgaaaaggatcaaaaataaaagaaatttcaaagaaatttgtgtcgctttggcgacatactccgggcctcaaggatggcgacatctgttgccgtctctttgccaaaattcttttcatcatcggtttggaagtcgacgagccaccctcggaggacgattctccagtcgtccatctggtaactggtggtcacgtagaggagggtgaggttcctccaaaactgctggcgctctccaagcaactccgattctggttcggatgttgaccagttcgatcggataaatgtcgacaagcatcccttgctcgcgagggctaaaccctacatattcttgtatgcacggttttactgggtctacttgaagacccaaccgtacaaaatgatcgaaaagtgttatgcccggagagatgaagagaccctccggaccataacaggtgaatccatcaaaatggatctcggcaattctgccaaaatgttcgccaagtagcgtggctccttcgcgaagttctccgcgaaggcgggcttcgacagcacggcgctcccgtgctgtttcataccaatgcggtccataagaccgctcaatccatgagctcaatgactcaatttggcgaggaataggaggttcctgccagcgaggaactctctcctcctcttcaaatcgtggatcgccaagtccgtaaaggcgatcattgaagacctcggcattttcgggtatgaccacccggcgagccgagaaataaggcccttctcgtatgggaataggcattccgtggaaggatgatttgaaagtggtggttgggtggcaaatccgccacccttttataccaccattcaatggaagagatgaatcattcccctgaacgaggggtgactcacaaaattttttgactgccgagaggataggacgtgattcaacaccacatccgaaggatcctcccccggccaagtacagtattgccaatactgtaggcacattactgtacccctttctcgttatagaccaggaaataaatttccaaagtctatagaaaggagaaagtttaatgaaaattgttaggcaaacaatgcctacacaaataatcattatgaagatgagtgatgattggaggccaatcaaagaccaaagggtcgccttccaatcaaaattccagttaggccaactggattgactgtttatcactctttcggagtgatttggattgtagttttctatttgttcgggcgggacataatgtaatgtcccgctgagaacaaaagaagtgtttccagccaaacattttgtttggcattttgtgtcaattctggctttgtcaaaagccaagattgtttggtaaatggatgcattggaatcacattttgttgaaaaatgtgtaccatcatcgcatttaatttcggcaagagaattgccaaaattagtcgagcacacataacggaattgtgctcccgttgaacatctgtaacagccagatatgttcaacggcaaaatggtgcaaaggctttggtgaagttccaaagccatttgaagaccttcgatttgaaggtttaattggacaggactgaatcctgtcaaggcaattacttttctcccagtatttctgagttggtaatttttgatgtttaatggaagtctcctctctggactttccattaacttttcaaggttatgtgaacggcaattgcagttcactaaacctgatgaatggtcaggtatgcaatcagtgcatgcctgaactccaagactgcaattgaaatcaattgcttcttgccgatttttacagttgaagtcaattgtaaagggctctcgggtcagagccatattgctcccgtcaaaaa

SEQ ID NO: 8018 - DNA, 3316 bp, Heterodera glycines
cccaccataagggttgtcatagagtggagaaatgtccaaatttaccatatagaaaattaatcctgttacttttttgtgttaaacgctatttgtacctcttctaatcactgttgtacctcttctgatcactgttgtacctcttctgatcactgttgtacctcttctaatccctgtaaggccaacaaaaattgaaaaacgggcgcgaagcgcccgtatgagttcaacaaatttaaaaaacgggcgcgaagcgcccgtcgtgagcctcgatgtggactaaaaacccataataattttttaaaaattcaaaaaaaaatcaccaaccaattcgatcaatttgaatcgcttcacagtctaggtagcgaagctcccaaagcgcgaagcgctttttcccagctaaatagccgacggttcacgcacccgctagttttgtcttaaatgcgattactgtaaaattgggttgtgaggttttcggcggaaaattttgttttatttcctgtaattttttttttggcaagaagaatttaattttttgaattttttcaatatataatactttaaaacctgacaaattttgtgcaaaaaaaaagcaatagcgaatgatacgaactaagactttccaattttttcttcttcggagaaattaatgacgattttttgtcgaaaaaataccccaaaaaattgcggtggataaaatgaaaaatttctgtttttttcctgcaaaacaattcaaatttttttttttaaattcttgattttgtatcatcatttgatagaaattttttttaaaaaagtaaaaaaatggatgaaatatgcatttaaaatttttttattatggatttttagagagaaaaacatgtaaaacttatccaaaaaacttaattttggtcatttaaatgattattggaaaatttttaaacgcaaaattttttacaaaaaacaaaaaattaaattttgacatcaatttttgaaaaaattttcaattcttagggtttatattctgaaaaattttcgggtcttttcttagagtttcattttcccgatttcttacatttttaatggaatttttcggaaaaaaatgccaaaacaaggcatgaaaattcaaaaatgccaaaaaagtcggtctctagtcattaaatgtgtccctctctgatcagggaaacggttcgtgatcaattgtgtggagaggggcgattcggaaaatgagcacaccgacttcttgaacctttgcaccacatgctgggcaagttttggcttattttttggcaaatcttaaaattaaataatattaaatctcaaatattttcatgtaaaaaaaatcagccttacctttgattcaggaatgtttttttttgattttccgagtctcggtaaattctcgagttgtacctggccaattaattatggatttattatcgagaattattggtcccgagtgtgtgtgtgtataggagcctagtctattcagagaattccgaactcaaattttaaattctcatttcaaaaaaagaaaatgatcataataaatcttcatatatccgaacactggtcttagttctcgagtttattctcgaaactcggcaccgattcttgacaattcattcattcattcatcatcattcatttcttgaaaaatgttgttaaacttaataaattttttgaagacatggcgacaactgcccgaggattactttcctcgactgatcaatgaattggttggtttttaaaaatttaattggcatcaaaaaaggtcatcaatttgccaacaaagccttttctctttataaaggtgtgccaggagaacgacttctgtttatccggtcagtttaacatcatccattcgtagaagatttgatcagaacgattgatcactttctgatcagtgacgtcacagagaataattactgaaaaaattaagagttctaatctcaatttttaaattattcttaattttgaaaagaaaaaattccagctttgaccgtttttttggtcaatttgtctgactgatcaatgagtaacaaacagactgatcaacgacccaatttaccagagacgttgccatacttttttatacaccgattcaattttagactccgtcaaaaaagtagtaattaattttattatttgattttttatgccaaaaaagtaacaagtggacggttttcagaaaatttttcgaagctttttgccaatcaaaatcgtgctaaaattttttctttctcaatcaatcaatatgcaaaatttaaagaaaatcagtaagaaattttgtttagaaatagcacgtcaaaatgagggggttgtttctctcacaatctccacggaaaaccgacaaaatcggcaaagtcttaaaattttccaccatcttcatataatttttaattattttttttaaatttttgcgattccaatcagtcgtgatcaagcatccattttccacttctttcgatcaatgttccaaatatataatccaatttttcaaggatggggcgtctgtaatcagcggtaccgtaattttgatgtgttgcaacgagtgactgtgaacgggcaggacgagtggaggccaaccacaatttccgcggctagctgctgcgattgcaaggcaatttttttattttttaaaatgccattgttggcgcggaatgccaaaactgcaacacttttgtttaccgattttttttttgtataaaataataaattccttatttgttttaggttaaagccggcagtcaagcgcacagtttggtcagtttaaaatggagaaattggcgggtcaaatccataaaaaaaatacaaaaacgaagtacactggtgatgctcaagcatctcgatctcggtcaatgtttacccgtgatgagaaaaaaagtcggaagtactcgagaagggaaactgccgcaaattttttcgatcgggacgggattcaggacgagaaaaagctcgagattcggaagagaaatggcgccgaaaatttttgagtatccaattcgggatttgggattgggagcagcttattcccctctccccacgtgtcgtttcgcccccggcggatatcgtattgttcccgcctacctcctccgaaattttttttttttactttcttagaggtttttttctgggaaaatttttttcagaaaaacatgtcttttttaatttttggaccttgggggtggtaacattgtacttattgagatttgggtgacactctggtctcaacttgggacttgagcctccaaaaaatatcagtttcatgcatcaaaattttttttgaaagactcgttctcgaaagtcgagaaattttcgaaactctccccatgttttatgc

SEQ ID NO: 8019 - DNA, 4346 bp, Heterodera glycines
cccccccccttttaggttgttggaggaaagagctaaaaaacgcgccggaaaattgcgccccatctgctctgatggtccagccaattgtgctgaattctagtcattcaaatccctttaatttttcacttttttctttaatttttttttatatttaaatggcgtttgtttcccaccaatgccaatttcaaatttcaccaccaccacaccaaccaattcatattattattatttgtctgtctgtctctcatgttatgcttttcctctctctctacccattaatcggactgatcagttgatttattttgatgattcataatcattttcctttttatcataatggggtttataaaatgtatgcaacaacaaaaaatgcaaaaaacagaaaaaaacaaaaaatgttggccaatctgaaatgaataatttgaacgagaaaatcaaacaaagcattggcattctgccgaaaaacaaatattgagttgcgactcggatggtaatggttagggcttctttttaggcacgaaaaatcgcgaaataggcaccccaaaaggcataaaaaattcgcaaaataggcattaaataggcacaaaaatagtaaaataaaattttttattaacgctttttaggtagtaaaacacataaaaatttaaatttttcaattgtaaatgtaaatattttaaagattttttttcgaataaagacattttaagaaaaaatattaaattttgaagatcaatttttggaaaaaatttcaattttattgcatttttgttaatgattttttcaaaatcctgaaaataggcacattaaacacaaaaacccccgaaataggcaaaaaaaaaacatttaaaaaagtcatcgttgattccccaaaccaagcggaaaaccgttttttgtgcttttctgagcgcatcaagtgcgcataaatttttggcagttgcctaaaaaacgaagccccatagttattatttgtccggactaataactcgaaaagtaatttaacaacaaccaaaataatcacatgtttttcgtgcattttcaggccatagggatctcagaaaaataggtaaaaactaaaaaatggagccctaattataatgcattttacaaaaagctgtatataaataaataataaaaagtcaattaataaataaatgtgaaaggacaaaacggacgcaataaattggaggaaacaaaacgagaaggaggggagggggtaattgatgaacagaaattcaatttggcaaaggcggaggacgactaaaagggagggatttaggagggagtgccacagaaggaaatggggggggggggagagtgaccggtgctgagtcattataaaaaactaccaaaaaggcgttattaaaaattggatgttcggcacagatccgaccaatttcagtccgaaacaggcactcacgcgaagacgtaccccacgcgaaaatggccacacgaaaacggcatggccagcactcgccctgcttctgtaatgccaggataccgcagggaaattttgaaaatttaggggtgtctgtaatcagcggtaccgtaattttgacgtgttgcaacgagtgactgtgaacgggcaggacgagtggagtccaacaacaatttccacggcgtactgctgcgattgcaaagcaatttcttttttgttttttgaactgccgttttcggcacggaatgccaaaggctcagaacatcgtgcgcctgtgaaccaaaaattgaagattttgggaacatcccagctgaacggcaaacgctgagagtgtggcccaaacactcaagtgcttgagaacgataatgaaacaatgggatattatggtattgaagataaccatcattatcctgtcaagaacatttgagaatttttattaggtatttaggtttcattgaattattttatttttttaagtgtccaaaaactattaataataaataagatatttatgttattctaatgaaattaaatttattgaagatcactcttaaattcaatttaaattacaataatatttgaatgcgccaacaaataagggtgttggataatccgactgatgataggaatcaacatttttaaataataacattattatttagatattaaatgagtaagagatttggataattctactgaaggtgccatcagaaagtgaatgtgtttttattgcgtcattttttaatataaaataataaatggaccttaaataaatagggaaattttctctctttatccaatatatccattaatcgcccggtctccaattatcgctccagtctccatttatcccccaggggattaaattgaattttattttttgaaagaattatttatttttgaattttaataaaaaataattaattctaaaatgaaactcgtttaaatgtttaataaatagggctataaattatatgcactatccctaaaaatatgccccaaaaccctgaaaaatgcataaatatgcacaaaaatatgccttaaaaaatgaaaaaaatgttttaaacctcaaaaaatgccaaattgtgtaaaaaaaaaatacagaattgactttaaaaacatcaagagaataggttaaggagtcgaataaaaaattttgatttcaaaatttgtatatgcaatttagaaagcatacgtgcttattatgtgcttctttttgaaaataaaaaattcaaaagagctgtgtttgtttttgagccgcttttctaattaaatagatatttttcaaaagttggaaaataattttttatgcaaataaaagcaacaaaaaagatagttgaaagaattgtgtggctttggggagggggtaaaatttgtacaattgaaaagaaagataggtagccaaaagtggaaagattttctgtttggttatagcaaatgatcaaaagcaacgggaaatggataggttggttcatttgagatgctcggttctcgaaataagaaatttctcggaattcttggtttaggaggggtctgtcgccaaagcgactgagaaaatggaagaaaattgaggaagagaaatttaattgatttaaattggataattttaaatattgtgattaattttattatttaatttgtgatctttgaaattgtgattttgtccctccattgaacattttgtacatttttagcattagtcactctttttgttgttgatcgctctgtccaaattgctccacctacgctttttctttctatttaaacacgcacatttctcactcctcacatcttatacagacatcttattcattttatattatatttattaaataaacttctttcttatttgggaattattttcccccttattccaccccgccctctctccctcgcgccttcccatttttgcccccatctcgccgtccgagccaacaagtggtgccgctaacaaacaaagatgtcttcagctcgatgccggatggctttggggcccgcgctgttccgacttcggcaacatgtcactacggccgaaaatttgctggacgagcccatgatcaatgccgagacgaccgaaaaccttgaacaggaacgggggcacatcacccgtatcctgtcaaggatggaggtcgagctggacgcgtggggtgccatcatgaacggactgcaaggccctgcgagagaggcggaggaagcgtttttcactgcctttattcgagatgaccggcacttgacggagtggttggaagatgcgcgagaaatgctggctcacatagcagcagaactcgcagatgagcccaaccagccaatcgcggcgggaggacagcaaccagctgttgctgtgaatccacccgtgccagccgtgccattcgtcaacaatgccgcatttctcggcggtgccaatgttcaacagccagctgctgttgccaaccatgccaatcagccaccattggtgccaattaatgcccaaatcgtgccaaacttgccggctgttgctgcgcctgcgcctttagccactgctcggctgccgcagctcagtcttcctgttttttcgggcgaaccaatggaatggcccgcgttttggcagagtttcgagagtgccgtcgaccgtgccgcccttgagcccgtcgacaagctcaactatctccacggttgcttacgcggaaaggctgctcgtgccgtaaccgcctaccgtggaggggacaattatgcccatgccgttgccgcactcaggcgactcttcggagatccacggaaaattgccgaagcacttcagtccgaactgatcaatctccggcctgtggacgatagcgttggatcactgcaacacttactcgagactttggagcgtgtgtgccgccaactttgaacataggcatgccggatgacagcccattcatgtaccaaatca

SEQ ID NO: 8020 - DNA, 3112 bp, Heterodera glycines
attttacttacggctttgcacccttttttgagcaaaaaaaaaaattttttgaaaaaacaaatctgaattaaaaaacaattaaaattttactgccgtgtttgtttgagcccactcagttgcatttctaattcagcttcagcttccgcgagctgctgcttcttgtctgccaacatttttttgctttcgcttttatcaaggcggcgatgaccaccgtcgtggtaactttgttgttggacatttcttggtgagtccatatcaaagttgggttcatcattttccaccttttcctcaacatcatcactatcttcatcatccaatccatttcctcccatacaattaggactttttgttgacccattacggcgcacaaccgcttcatagtgctgcctttgttgtcgccgcttttcctctgcttctttcacagaattagagcgcagaaatttgtatgactcatccaaaataggtaagccatgtacattttcggcaacatcaaagggaccgcttgatgtgccagcaacaggggacgatgacaaatcaacattttttacttctgctggtggtgaactcttacgccgatgcggcaacggtggacgtaaacgatgcgatgctgagaatgatgatgatgatgacaatgatgatgaggatgaatgtgatggtggtggtggtccgtatgaaaattctcctcgccgagataaatttcgttttaataaattgatcggatcaccatcgtcatctttatgccgacgcgatcgccttgtgcgactattttgtttgtgcagcttttttgtcttgttaacgtcaactttgagttcggcaatatttcctggaaaaaaataaattacaaagatcggaataatgaagaaaacgaaaaactatgccaagtattaggaggatgattttttaaattttttaacaagatatttttctaaattttcaaaaattctcaaaatatgtaaaaaattaaaatatttaacgaaaaattgttaaattttggattttttgaggtatttaataaaaattgcttaaaaaatcctcaaaaattgcaaaatatgtaagaaaaattgtgaaagagtccgaattatgtataaaatatgtacatatgtaacagggatgacacggaattccgatttccgacattttttgggtcggaattccgatttccgaaaaaattttggtcgtcggaattccgacttccgatttctgaaatttttgatgaaaagtcggaaattttcggaaattttttttttaattttttcaaaaattagaagtaatttttctacaatttctgttaataaattgaactgaaattttcaatttttttcccggcggcgcctttcggcaccgccgcgccttaaaaatccttaattttcttgaaaaattgctcaaacgctaaatttgatcattttttgacaaagtctcttaacaaatcgtattaaaaaattacaaaatttttcccggcggcgcctatcggcactgccggacgccctgccctcccccccatattccccaaaattctttggaaaaacgcgccacaaaaaaacaatgtaaaatgacatgaaaagatttttatgaaaaccagaatacttttttcaagcgaatataccaaatacatttttgaaatcaccttttactttttaagaattaaaaattagcctattatttagaaaatttttattatattttgtgttttttgaaaattttccgatttccgacgttttttggggttggaattctgattttcgaaaatttttagggcctcggaatgccatccctgatatgtaacgtgctggatcgtttcgtaaaaactgccaacatgggcgttttgtaaaactgccaaattcacagaatttttgagaaaattcagtcataacttttcttaaataaaacctaaaaataatcttactatcttacgatagctcttggcttgctctataagcatgaaaaatttcagaatatttcattaagtttccagaaagttatgaccaaacatattcaaaaaatagacataactttctgaaaaatattaataataaaatatttacaaaaaaaaattaaagaaaaataataattttttttttgtttacgaattttcaaaggtctttaaaccctatttttcgccaatacgattgggataccacccaatgcagccggagggtaatttttgatataattaaattacataaaaattcattcacttatagactttcccagttgctccgatgttgtttcatccgagaacattttgtgctggaacgccttaatcaactccgagcccttgacacaatccatggcctttttccgctcctccctgctccgcgcgttcaacatttcccatttgttctcttccgtttccgcttccatctttgcctggtggcttttcgtatctctacaacaaaaaaacggacaattaaacaacctgaggcagagacggtcccatggattttggcatagatggggcagggacggtctcatggagttcggcatggatggggaaggaatggtcccatggatttcggcacaaagcctttaatttttaatgattttactaaaaagaattcaaaaaacaaataatttctcccctaaaaataaagcgagtgaaggattcggaaatgaaatttttgcgggacgtaattaattacgcgagactcattcatataaaatcgcaaaaatttgctggattaagaactttttagtccagcaaaatttaaaaaattatggccttaggggcttgtggatctcgaaaatctgactaaaaattgtgaccttaaggacttcgggatctcaaaaaatctgaccaaaaaaatggccttaagggcttgggtctcgcatatgaaaaattgtggccttcggcatcatgcaaaatcccgcacataatccattcccgcaccggactatagttggcacaatttgtgccaaaatgttttctcgctgaccgtttgtgattgcgaaattcgttcactatttctttgataaaattttttcttggctttttgtccaactctttccaatcatctttgtcttcatcaaattttgaatgcattttagggtcgaattcgaaagttaacccatggaaagcctaaaaatgagaattatttcatttaagaacattaat

SEQ ID NO: 8021 - DNA, 3054 bp, Heterodera glycines
  unsure (1)..(3054): unsure at all n locations
tcatgcattctgttctttactgaaaagtatttgagtgaataaanaattaatgtaatttttttttcaaaatgacaatttataaaatctgaatttaaattttgaaaaaatctctcgaacaaataattttttagactttttggaatggattccgagttgttgttcccgaattttggggtcgtaagccgggtttcgcttcatccaggatatcccagaaattatgacaatttttttgtgccgaaaaacattttggcgaattttgccagcccagggtcggtcgcggagttgggtccgataattagcaataaaatttggccataaacccttgggccaaacatgaccaccaccagcccagcaggcactcagcaagcagtttacattgttcaagggtgtgcacacgtagttgcggatctcctccccctccatttgtttggccaccgcggcccagttgcggaattggacttcaaatgccgtcttgctgcaaaggtcgcgcgccaaacgatcaaaaaccgcgtccacaagcagcacatggatgatcaggtggatgcgctcgtgattgtccgaatttgttagcccatgttcgtataatttgtgccctgaaatgaaataatgaccgatcaaagagcgtggagacggaattttaaaatgaattaaggaatgggcgccgccggctaatggaacaaattaaatttttttttaaatgccaaaaaagaaaggctgaaattaatggccgtaatattggtagaagaattctaaaatgagtaactataatagaggaccctaattaaaaaaggtaaaaaatgggcaaaaaaaaaaatctaaatcagtgaaaacccctaaaaattttttcacattttgttgttttttttagaattttctatgaactaaaaaatagaacaatatttgagcagaattttaactgcagccataagcttcaaacaaagttaaaaagcctttgtcatgaaatttttggtgttacaaattctcccctccccacaaaaatgtattaaactattagtagtattccaattggtattcattttcattgcacacagtaatattctattaacatacagtagtatggtgtaattcgctgtgttccgtatccaaaaaatgtatttatatatgtgttccttcattttacatacagtaacactacactcattcatatacagtaatatgctgtctgtaactcactgtgttccggcgggtccggatttttgtactgttttgccacccaaatgctcatttggttacggtcccattcgtacagtttcttcttctcccaatcgtacaacaatttgcccactataccatttttgcgctctacggcattgaaaatgtgattgccaaatgaaaactcagcgcccttttcggtcttatcgaaaatgtcacttaatttgggattaatttcttccattgaaaattttttttttaaatgggttttggattaatttatttcaattaagcagtaataggcatatgaattcaaaattgatcggaaatctataataatttttgattaaaatatttttttaatttcaaaaacgccaaaaacagcaaactgttgagaaataaaataattaatataatataattaattatccatccaaaacaaataaaatttctcgttttagcttatagaaaagaattatagttagtaaagtttgtttatttgggtcaaatttaattaaaaaattcaaaattaaaaaaatattataattagggctaatatttttaggctctaaaaagccaaaatagctaggctttaggctctaaaaaacccccgtttagctaaaaatgaataactcgaaaagtagcttaacaacccacaaaaaaaaacttgtttttcgtggcgctttaggctatttaacactggaaaaaataagctaaaacctaaaaatattggcactaattatgcataattatgacagctcaaaaaattttaaaaagaaaataattaggttttttaaaaaattaaatttatgtgttttttcttatttttaaattcttacgttttaattttgcgttttattttcttaaattctttcttttttcgttcccattcaatctttgcctttttgttgtcgttgcatccatcatcataatgatattggtggtaggctttatcatatttttctttcgcctctttctgctcattctttttttttgaaatttggcaattattttaattaattacaaactaatttttctttaataaaatattaatttattggccttttttaaagcaaatcacaattgaatttggatgatttgttgttaatctttttcaaatttcaaattttaattttttcttttaattctaataattataatgttcttaagtaaaattctttaactttttttttttgtacatatatcaaatgtaatgaaattttttgaaaaattttaatgttttctttcatggcgtgttttttccactttttttgtgccgactattttggctttttaaaacacaatctatttttcaaatttattatctgcaaatcgcgtagcttacaaaaaataaatttgcgactctgaaaacttgaaaatttatgaacttgaaatattggggagggggtaaactttaaaacgaatttgcaattttaattttttattaaaagttaatttttcttgattttgttaatttcacatttaattaattattttactttaaacaaagtgagtgtttgctgtttgtaaatggccagcttcagtacctccttcagtttttttactgtttctggcttttcggtgctgagtatttcaagtgcaagactgacttgctgctgcgttatcttcaatttacacaaatttttaaaaatagaaattttttttataaaattaaatttttcattggcataaataagttacgcttttttgtacatttaaaatatcaacaaaaattctgtaaaaactgctcttaagctaccgtagtttctctaattatcccccatgggggattatttttaatctcctcagaaagggggtgggggataattggagaatgggggattaatggagattgggggataattagagaaaatacggtat

SEQ ID NO: 8022 - DNA, 1532 bp, Heterodera glycines
  unsure (1)..(1532): unsure at all n locations
gcagtgcccagggtaaaacaaaaacgaatttgatggttctgcccacttctttgggcggccaattnaaataataatctctatgaattatttctcccttttggggctcggcaatctttgcactttgattgtcaatcgcggcactctgcgccgaggctcttttcttgtctcgggtttttgttggtgtcgtgtgcggacgatgaacgacgaatttggcacttcggtggacagtgccggcccgagcatgccggtccaaatttcaggtgcgaaaacccgaaaaacaaaaggaaaatcaaaaatgggagggaattatggcattttttgattgtttttctcaacattcttaaggttggcgtgaccttttgccaccgccgggcgaattggcgttggaagtgcaaacgcagcaaatggcggagagagtggtggccattcgaacggataaaaaaaatgagacggaatcactgagggctatggtgggaattgtgggggagggcaaatgggaaaggaaaaagcatggggacggggggggggaccccgggttctgcaaaaactgcaacgttcggccatttctcagaatgtttccaaaattggatggaaaaaggggatgagagtgcatttggccaacaacaaaataatcgaattaataagtgtttaggaggcagtcgaagggaaacgctcggagctcagacaacgctatgagacagcgcgcaaagagaaaattgccaaaggccaattggaattatccgtgtaagaggagggggcgggggatgatggtcctcaaaatagggaaagtgtgggcataaagcgagggttggaactgcttggttcagttcataccaaatcaacgacgaactgaggaaggaccaaaagacacgggcgaagccgccgcgactttcactcattctcaaatgcgacgttgagggcacccttcaggtgcatacggagggaacgagacaatttaaatgccatagtatgatggttattaattttgaaacttcaaccacaagaggggtaaagccccccccccccccaaattcactgggaaaagcattcgcacgaatccgaaagagtcgggtatccactaacagagagatgcgttcttttcttttgaggcaatccaaacagtgctcgactcgtacagtgccaatgaccaagtgcagttggacatcgtttccacgggggttgggccgttgaatgaatctgaattggagttggccgctgaaacgaaggcgcatattttctgcttcaacaacaacgcatctcaacgactgtcaatgatggccaaagacttgaaagttccgctccaccaattcaacgtcatctacagtttggtcgcccatctaaaggtggtccataatatattttcaaaaattatcatttgttttaatttttcggggaggggggaagagtcggaacaggacaaaacacagcctagtcgagacataacacagccgggaataaatttttaaaaaatttcaagcttagaaattttttcccggctgtgttatgtctcggctgtgttttggggtgtaccg

SEQ ID NO: 8023 - DNA, 1385 bp, Heterodera glycines
ggtcagtaaggggtgacagtaggaggacaaaaacatctcggtacaatgaagacgaccatgtggaagtgtttgaggatgtgcggccgatgcaagagctcaattggactccgcccggcttctgatcggccgtcgcctttcgctctttcgttttttatcgtattttaaatttgaataaattcaacacaaacattaatacaaaaaaattgtaatttacgttttcattctttgtgtcccttcgtttcgttccttttccctctttctttgtgtacttttttgtacggattgaagaggggcgaaattggggtgggaagctgtggcggagcggcaggcgacagataccgcaagggaagtgcgccgggagcgaatggcgtggggggcggtgacgccgcgagcgcgttaacaacgtcgacggaagttgaaaacaatgctggggacggaaggaagggcgataaatggggcaaatggcacggatgagacggcggtgggacggggggacatggcgggggaagggcggacggcactaaattaaacggaaagcggtgagtgaaagtagcggaattacggagcggaagggccggcacgggcgacggcgccaacggttcgatgggcaatggctcagggggcactgcctgaggggaaacgagaaaaagttcctgcagcagtggccgaagctgcgacggcaatgatctcagagggaattcggcaagcgctgccggggctaagcatttagaaaatgggacggggaatttcacttttggtcattttacccggcggcggtacgggcgacgaaattggaagaggcgccggaagggcgagtggtgggggaggggcactgaacatgccgggttggaagtacggcaacgacggcggaggaggggccaatggcaccgccggcggtagcacagccgtttcaaaagcttgagccaagtcaaacacctcaacggaaaattattgctgacttaaacaagcaaattcgctaacaattggccgtgccggaggcaaatttggaggtggaagcgccgattggaaaactgaaatttgtggatagcgggtaaaaatgcaattttttgccacctgctggcggctgtgccgcaacttcagctggaattgctggcggcactattgccaccgccggaggctcaatgtcaaccgcagggggcggagactaaaagggtaaaaaagggaatgaaacaacggaattgctgaaccaatggagtagccgctgagggcaaaagagtacgacacggggtgaaagtgcaaaaaatggcgggaattggcaccaaattatggggggacagtggcggaggaggcggaggaaggacggtaagttcagcgaacagcggcggaagaagcagcgaaatggcaaacggaaaaagagagcgcct

SEQ ID NO: 8024 - DNA, 4264 bp, Heterodera glycines
tagggaaaaagaaacgccgtgagaaattacattggcaattccatggccatttctgtgcccgacgatgaaaaggtcgttgaacggagctaagaagaacagtgaagatgggaattagcaacgtgaagcaacgcttagtgaacgtcttgcgaacgacggaaaggcttaaatacgcccgaggggacgaacgtgcgctttgtctctgctgccattgtggcaaatcccagcaaaaacgagttggggtggcagtgacgagacggagaagaagacggacaacgccaccggacggagacaatggccgaaggatgggattaaatgacggactggcggacattgtgcggacggggcattgtcttatggtcggattttggggaaaccgatcccttcgctggagaaagcgttgccccctccccccccccccccgcttcagctgatcattccacgtttccgtgcactttattatcacattagccgagtctctctcattgccagcggaagaaacaaatttttgctgacattttgaacaaatttcaaactcaaattaatattattctcagaaaaagcaatttcatttagtcattaacctaatgaatggaatttaatttaattatgaagtcatttagttaccctccttttattcaatggctttttgcgcattttcaatttcaaagtgttgacaatgactccgactcaaagttcatgtcagcaattggcaatttgtcagaaaaacactttgacgtcacttagagcaaaaaggcgacaactaatggacggggaaagcggcggaaggcgtaggggagggaaaactaaggggaaagaaacttggcaaagggggaagcggacgtggcacacaaaaaaagggggaggatggcaccgtggtgagctatttgacctcattcaattttaattgtgattgattgagcgatgaaaaagggacgagcgattgaaatgttaaatttgacggtggcaccgtggacaatcttttgccaatttgatggaaggaagtccttttcaaaatatttggaatttcaaataaccattttctctccactttttgctctttgggacattccgctataaatgtgccgttcttacaaatggcggcgcggcaccgcgcaacgatccaaccccactccccccccccttaagcttcatcgaaaagcggatggatgtctttgacggcttaatccccctccccacccgtcagtttccacgctaacccatgtcagccttaagctgtgcccaatgttttcgttccattgaccgatcgctggattcatttatattattattatttacattgccccaccatttaccaaaaagagaagaatggcataactctgtaaatcgttatttaatcccaatcgaacatttgtcatttttggcatttgggccaattaattataaaagggttggttgaacaattagacaattcaaaggaacaaataactcccatcagcccttcccccccccctttgtcccatttctgtcagcgacagaaggtacggtggacgaattcgattctgtgctcggacaaaggctttaaggtgttcaaatctttcgttcgtctttagtgtcggatttggcacaattaaagtctttccccaagcataattttaaaaataagccattagtcagtcagtgatcagttccgagttaaaccaaaactaaagggctaacaatttagtaggtttcacctccccccccctccttttcaatgaaaatctcattatgacaacttttccggtggttgtctctgctcataacatccgttaacatatttagtaagggacaattgggcacagaaaaaatacattagacaggaaaaaagtgtcaaaaatgttctctttattttcaaatttgattaaaacaccaaagatacattttctatgttacaggaaatggggtgaaaagggaggagaaattccgagggcaaaaggtgacatgaaaatgtggcgaaagatggtcggcgattacttttttgggatttttgtgcttttgaacggataaaacaatgaatggactttaaggcataaatcgctcggcttccaaagacaacaaaacaaataacaacaaccaccaccatcagcggagaatatttatgttgtgatcggaaacaggggagaaaaaacaaatgaggaaatacgccgaattggatgaattctcagagactgaaacagacgagcaaatttggatggcgatgacgagaaatgagtgaacgggcggagaatgaatgggtcggaacggtccgatggaaaaatgcaattggtaaaacaccggcgaattccgaaccattcaaagggcaaaggctccacccgcacgaaaaagacaaaaaatgtgagagttgtcacaatccaaaaagggggaggcgagggcaaacatcggctgctgtgctgcgtcaatctctgcaagaggaggaggaacccgcggaggcgtaactgccccttccgttcaacgacgtgtcgaagccaaccccgtcgacccgtgcccgcatgttcgggtccaaccgattgaagtacggatggcgcagcgcctcgctcaaagttatgcgggacgccggctcgtattcaagcatactccggattaaggagaacaattgctgatgctcttcactggttgaaatcatatatctctggaggagggaaagggtcaattaacggcggaaggcacggacaaaataatctcacggaaagcggtttgcagtggtcccgaacgtattggccggctgttgtgtggtcgtgccagtcgaggcggccatggaaaaaatactttgttctaaaacaatggcaattttatggcatttaatcagacgatggcactcaaaaaacattaacaaataagtccagctctcaaaactgacttgcttttccgccccattctgtaagggatgccatccaaaatgcgctgcatcatcgccaaatgctcgcggttgtcgtgcgtttggaacaacgtcatcccggagtacaattcgaacattatgcagccgattgaccaaacatcgcacggttgagcccagccaagttctgaaatgtaaaaaatgcatgatgggaattaaaaactgttgacatgcgaaattctgacctaaaatcacttcgggcgcccggtagtgccgcgtggagacaatggtcgaatgatgctcgtggtcgaaggtggcggagccaaggtcgatcagccgaacagaggcgtccttaaatgcccattttccaattttaatttgttttccaaatccattcgaccttaataacccgaaattgctttttccgcttggcttcctccccgccgttgaccacgtcagactcactgttgacgaacaaaatgttttcgggcttcaggtccgtgtgagtcaatttgttgtcgtggagaaatttgactgcgtggatcagctaaaaagagaaagggaccaaatttatgataaaaatgaaaattggaaactaataaattattttattccattggccgacaaccattaccaccgtcattacctgataagcgatataccgcgcctggtccattgggtaaggctggtaattgttcaatttctttaaaggggtaaaaaaaatagcaagaaaaaaggacaaacggaattttttttttgtcggttaaagggaataaaaggcgcaccataaagtcgaagacactcagtccgagcagttcgaacaccaaacacatgtgtccactgaaagcggtgctttgttttctgtgcttttccccaaacccaaaacccactgatagtcgaaactgtccaacaattggatgaccaaattgcgtccgtccgggtccttgtccttcaacttcctcagaacgttaatttccagtcgagcggcctctctgtatttggacacgtttttgatgattttcagcgcccgttgcggcccctttgggttgtttaagtctttcacttggacgactttgccgaaggttccctcgccgagagtcttcacgatttcaactgaaaatggcaattgtttttaaattttgtaacgaaaaatttccaatcttaataaattttgtgagaaaacggacgggaaaaacaaatacgaccacctatagtcttacatttgttgtcaattctgtccccatttgagtagatcaaatgtccatctttgtcgtcctgaatcggcagccgatgtgctggcgatgcgcttacaaccacaccgcattcgccctgaatttccgagtggtggtgctggttgtgtgtgcgatggtgacgtgcgcctccattagcatagaactgaaaattgaaaaaaacaataacatttaatggcga

SEQ ID NO: 8025 - DNA, 2414 bp, Heterodera glycines
tgcattcattaaattataggacctaatggctaaacaaataaacttgacactctctttcatttatataaaatatttttcttattttaaatttaaattctgaattataattaattacatatttaaaatttataaatactatttttcatgaatatgattttgaaaaaatttatcaattttttttccttataatttcacagacctctggtcaactcaatagactctgagcaagcgtctataattgtatgtatttgtattcgtcgccataaaaccctaaaaaaaataaagtgtttttttggatttttattatgaccaataatcttaacaattgccctggctttgaaattccattaaataaaattcgctagattttttttttgttttttttcaaattgaaaaatctttaaaaaaataataaatgacgtgccaacgggtggaagccggtgtgcaaatgggaacgaccactttcgttggccaacagcaccaaccgacggtccaatgccatgtcaatgcccaggaagccattgccagcaaaagcgacacggttttctgggttaaaaatatggaaaattgagggggaagggcaccaaaatgccattttcatcgcttgttttgcacaatgccaacctcgccaatatgtgccgtcctcggcttgtccatttaccaacggatgggaaatgcctttcctaaaattttttggggaaattaaaaaataaaaccaaacctaaaaaattggttgaaaattttagttaggcctctatttttcaaccccctcggaggggtaggggttttggaaaaatttaacccattttttagaccaaaaatgcgaattaaaaaaatttgagtttttgttcgaattcgggtccaatgtagggagttggtcgaaacggacgccagattcgtgatcagcgaccacaaagcccttggaaacaaattttatgatttttgaaaacaaaattttttgtttttcaaaaaagatgggttaccatcggcagtattatccatccatatcaacgacgtcatttacaaaacaaaaaaatccagcggtttttttaaacgaaaaaatctaggggattttttttcgaaatttcaaaaaaaaatggaaaatccgcgggggactgagacgggacctgatcatatggtcggccacacagtgctcaatggccggttgtttgttgctgtaaatgttggggcctggccatccaaacagaaatgtgtagaggagcagcaccgaaatgacacagccgacaagtgccaaccgtcgggaactctgccgaggcctaaaaaatttttggaaaattcggcaaaattttggcattctttacgaatttttggggcaaaatgcttacattttttgtacactcatatgtagaaacaaaattcttttgaacaaatgctacaatatttgttccaattcaatttgtgtgtataaaatttgaaaaaaaaaattctacaataaaacgtggccgaataaaaatgccaattttatgttcaaaatctaacaaaatgtgccgagataggtccagaattaagctgagccgacgcaacaaccatcgcttggccgtcatccaagtaaacatgaaattgttggacagtttacaattgttgtacaaaattcaatttactgtaattgttgtttgacgccgaaaaattttatttttaaaaaatcgggaaaaatttcacgaaaaatttagtgtcaaaaatataagaatttctgatgaagcggaaatttcatagaaaatttacttgggtttcttaaaaattgaaccttacaaaaacgaaaattaaaaaccatgaaatttaaaaatgaaacattatgccagaatgaacaaatttaaaaaaaaaaattaaaattatttcgtaagaaaaatctgctgattcacaagtctagccttaaaaaacaggaggaactgtaagattttccatttcaattagcatttagctaatttattcccatcttcatgctaatttgaacacggatttacaccaaattctgtcctgaaatccgttgaaaaactttgttttccccaatttaaaataaaaaacacttaaaaactttagctcaaatttcttagagaagagtgcgttctcttaatttttcaacaaaatttatgtgctccgacaacaacgaattgctgaaggacccttccgccgcccacaaattgacgcttttgttggccaaccgccaccgttgtcataaaagcagaaaaactttggccgattttttacgaaaaaaatttcattttcataaccgtcgtgtgaaaaactgtgccaccaatttgacgacgacgacaaaattttttaccgatattagaaagggttgttacacgaaaagcattgaaagaggaggaggaataagctaacaaaagtcgaggacaaagtgccgaaagtcgagacaaacgaacaaaaaaaagtga

SEQ ID NO: 8026 - DNA, 2205 bp, Heterodera glycines
aaattccaaactttctcgggctgaatgatccaaaaatgggactgtacatccggaaaaatggagtattttaatccaattagtcagtccgtcattaatttttcatgcattcgtaaattttaaaaaatctaacaaattccaatttttccgttacaggtggtggtggcggttcggtgtgtggccgtgaacggttggagttgctcagcgaaatggacgagttggaaagtgtgcactcgtcgatgaccggcggcggagcggacattggcggctgcggtgattccggtgccattttcatcaatataattgcatatttcacacctaattagttaattaattaattttgatcgaggctttttttaaatacccaaaactttcagatggcgaaaacattgagttcgccatgatcgattcgtttgctgaccaagtggagaatgcgcaggacaaacggtttttgttattgcaaaaaaaaaaaaatccctttatttaaccgtttttcattcaatgatcagagggctcaattttcgtcatcacttactatttaagatccggaatttccacaaaaaaaacggaccaaaatgtttcggaaactactttatacaaaatcattgttcctgtcccgggttctatagaccgcaaattacaattttacggacccaatttgcgagaataggattcaaattttgcccgaaattcggtaaattcttggaacattgaccgatccatttttttaaatttgtttttcacaaattcagaattgccacacggacaaaggcgttggacaaccttttgttggtgctgcacaaacattggattccggacagtgtgtaagtttttttttgatgatgaaaactccgccaaaatttgcagaaaattcgaaaaaaaaaaattttttttttcagtgacaaatggcgttgtgccattgcggaaattgtggagaaaaatttgaaacggacgtcggaggagacgattcgcgcctgttcattggccgcactgatcagtgtccaattgggtgtgtgttgtgccttttttttacacaaaaatgccaatagccaacccaagaaataatttgggtacatccaaaaacgtggcaaaaaaaaaaatttaaaatttaattattttttttgaaagcctaaatataatttaaaaaaatttttttgtgtctttttcttaatgtaatttttttcgaattaggccaggcataactaaaaaacttgcaaatttaaaacaaattgtggcgagattatgtcccagagacgttacggcgtcgacactttgtcactgttccctaaaatttaaaattttactctaaaattctacaaactttaaatttttcgtcaaaatttttatcttattgttcgtgcctgatcctacatctttttcttggccacaggtgttgatcttgagaacgagctgtgtgccattgtggaggcgatgtgccaaatgtgcgcggatggaaccgccgccgaagcggtgcgtgccgcgtgtgcccaagccgttggcatttgcgtctatttgagcattgaggtgggtggatgcacgaggattttcaaatttaaaatcattccttccccctgaaaaattaacaaaattttaaatttttttgcgatttatttttaaaaaaatcaaactaggtatcatataagtataaaattcttaattgaaattttctaaaaagatagatttcttttctttttttgcgctggaatttttcacacgaattcgaaaaataaaattttttttttttaaatttctcaacgacagagtcgtggccaccgtttcgctgcgttgcaaacgctcaaaaatgtttggcttggcatgcgaccgaccggcaccgacggcacttcgctgttctcatccgcaattgcctcatgggcactgctgttggaaagagtgagtcatcgtccaaattaacgaattaaaaattatggaaaatccgtaattaccggtggtaaaatttcaaaaaaaaattggtaaaaatccaatttatttttgcttaaacattcctcgctacaaattgcaattacaaaatctaattaattaattgctataattactagggttggtcgggaccgggaccaaaacacggacaactgagtatggaagttcccggtttttcaacccgaaaagtgccggtcccggttttgcccaaaattcccggtcccgacctactctattaatactatgcccttaattatgccactaattaat

SEQ ID NO: 8027 - DNA, 1091 bp, Heterodera glycines
  unsure (1)..(1091): unsure at all n locations
tatttatgtataccattggacagaattgagtcgctttgtatttgtcaattttttattttagcgatttggttgacgaaaaaaaacgaaaaattttatcgggcctcaaaaaactaanattatagattttttttttatgccgtatcaatcaatcacttgcagaaaccatgccgaactcgtcgacgtgttggccgacttggcgctcgactcgtccaagcagcgcgccaagcgggacaagaaactgcaacgaatgacattccgtcagctgaacgacgtgctgttgaccaactccaacgccacctcctcctccacggccgccaccgtacggttcaacaaacagcgcgaggcgctggcactggacggatgccatgccaaactgttgtacgacgcgttgtgccaactgttacgggtcggtggagtggcggggcatgggaatttgcgcatgaattccggggcgcatgaaaattttttcatgaaacgactccttggcttgttgttcgcccccctcgaaaaattaattttgtaaaatttaacaaaaaaaaaaaaatcgttttggggcaaaatgcgcgtgttgtgtgtcaacacgaatttttctagcgattttttcaaattttctgatgaattacaactatttggtaagttttttctaaaaaaaaattccaaaattaccgaaattttaggttttcttaaaattttcctattaatttttaaattttaaaacttggcacacaacttgcttcccaattgtgtggaacattcatttttctgttgtttttttgtacagagtgacctgaaccggcacttaaccaccaacgaggtggtgcgcgaactgttcgacttgggccccgtgctgaatgaggaggaacaggcacaaaagatgtccaaggcgcagaagttggagcgggtcagtcagcttattacaatatgtagcattaattgatcagcgaacaccttactgatcggcaatttgatcaattgaatatctaatcagagttcgaattcgaacaaaaagatgatttttatttttttcaanaaatattcatttttctctgataaaaaactttgaattcttttaaaaacaatttattttggtg

SEQ ID NO: 8028 - DNA, 1511 bp, Heterodera glycines
aaaattttgatgaaatattcggcaacgaatggaacaaaaatgaacgacaagataaaatgataaaatttgaacaaaatgaccaaaacgagcaaaatgaaaacacatcaggagttgatcaaatgggtgaagaaatgggaaatggtccaaatgatcaacaaaaaagagaaactgtcaaaaaatttgatgcaattaaagaaaaattaaaagaaaaaggaaaatttgaatggaaaaaccaaagcaaaactgagagaaaaattgcgaaattattaggcacaaaccgaaattcaatacaaaaatggaaaaatgaattaaatttaaagaaaaacaacaaaaagaaaaaacaattttatgagcagaaaaagcgcaaattcattgaacaatttggtgaatttaaagaattatatgcccaagggaaacagaaagaatttgtgaaggaattgggcatttctaaagacacatttcgaaagtggaaaaaagaattggcaccaaaatatcataaaagtaaaaataagagatttttaaaaattttattattttatttttgtttaagcacaacataacaatgttgacaaattgaaaaagatgaagcaatattacgaaattaaagaatcaaatcctcaaattagtgaccgaaaaattacagagaaattgggaattacatgtcggactttgttaacgtggaaaaagaaatttgcctcattttcgaccatttgattttgcgggtgataatcggctcaaattttttttaaaaacaaaaaaaaaaattttaatgcgttaatgaacaaccctaaagcattttttgatacaataaatatggtatttccttgttttgtgacccgcctttcttcaaaattatttaacttcttatggtttgttcgaatttcagtacaaaaaattgaaataaatgaaaaaatcaagggctcataaactcataaataccaaaaatttatacatttttattcgatcgcttttttcaattcatgcatcgtcgaacagtgttctcgaacatgaaattggttctattctcgagcaattatgagcagtgaatcacgtagaaccccaaaattagtccattgtcaagtgacggtgtccaatttatttctataaattttaatccgtatagagaggtggaaaaatggccgaaatatgaatgcaatatggcaaaatattataaaaaaaacgggaccaaccaaaatcccaaggaaaaagaaatcacatggaatttgaagcaattaaagaaaaattgaggaaaaattggataaatcgccatgaaaaaataaatataaattaattactagggatgcgattttatgcacaaaaaatcgtgaaataggcacctaaaaagacagaaaaaaaaatcgcaaaataggcattaaataggaacaaaaaccctctaatatgcacaaaaataggcaaacaaaattttttattaacgctttttaggcagcgaagcacgtaaaaagttaatttaaaaaaatttaattttgctaacagttcaatcattttaaagt

SEQ ID NO: 8029 - DNA, 4218 bp, Heterodera glycines
accgtattttctctaattatatgcccgggtatattatttttcaaccccctcagaaagggggagataattggagacgggtagattaatggagacgggcatataattagagaaaatacggtaatcaaataatccatccaatttttggtcccacaaattcattcattcatcctttgctcattgtcattacgggagtcggggtcgttttggcgcccacgttttggcgccagggtcgttttggcgccgacgttttggcgcccacgttttggcgccaaaatgtggagaaagggcgaaattgtatatttttttgttttttcttggagtggggcaaagtctataaaaggagcaccttcctagtagatttagtatttttttcttttcattcttcaaataacgcatttttgttttttcttgtataggaaatgataaatcgtcaaattgatacaaaaaggcagaagcctaaaattacctatgaaggccagctttacaccttcgataaatcaagtgcggacggaacgagaaaattttggagatgcgaatacaagaactagagtagagcgggaccgggaattttgggcaaaaccgggaccgggacttgccgggacctgagaagccgggaccgggacctcgatttttcttcgggaccgtgaaccgggaccaaccgagaaatttaaaaaattcaaattttaatttatttcaagaaaaataatacaaaattaatttttttttaatttaataaaatccaaaagttaaagctaaattaaattaaagaaaattttcaaatcaaaatttcttcaattatttcaagcaattaatcatttgggctaaatggtcgaatattatttgaaatttaaatttacttatcacaccactttttccggcgcgctttttccagaaaacttttggggaaaaaggtggtccggcggtgccgttaggcgccgccgggggaaattttgaaaatttgagtgagatttgttaacagattttcaacaaaaatggcttcttttttgggattattaggctcaatttgtacggattttcatttaaaaaataataaaatatatatatcaattaaaatatatgaggaatgatattttcttgattggaaaaccaatgagtatacagaaaaaaatcagatattttattacatatttaagggtgctgagtagagaccggaaatttcaaatttgcggatcccgctgcgtgattggtgttgtgtcttttgcttgaccacaacacttagaaagaataatctttaataaataaaataagtccacaaatagataaataaaatagaacaataaattgatgacagaaaataaatgcgaaatgaatgagagatggcaaaatgacatggactgaccaagaataactgtgtgttcggctatttatgaggatgaacacaggtaagagacacatgaatagtgtgagggagagacatgacaaagcgagagtgtaatggtagagaaatagagaaatgactgaaagggaaatgagcgaaggcaattattgattgactacccaacatctccccttttaagatcagaccccgatagacataatcatatctggcttttgaggcatccgggttcaaaatcttcggtgcctttctttcgcgtgttgatcgtctcagtgttggtggcgattgtgctctctccagtggttcgtttagttcgtccgcaaatcgtacacgacgtggcgatctgggttgaacttcttccggttgatcgtttggcggttgttgctgtgggtgttcgtcgggcaactgttcatggtgttctttgtatgggatgggataaatttttctcatttgattggaataccgtgtgactacggcattcaacttcggagcctgaactttccaaactacaccattgcctgactcgatcatgcccttcaaccaagtttttgtgccatgttggtagttgatgaactgcacttggtcaccaatgccgaactttcgttcatgtgtgccgtggtgctgattgaattgtttgatcatccgctgcttgtacttgtcgttgcctttttcctgcttgtcaacttggggtttaacaagggaaagaattgtccgaaccggacgacccaaaaacaattcagcgggcgttcgcccgttcaaacttgcgttcggcgtgcttcggtaggccaaaagcgaattttgcacccaatttacgtcgtctcgggcgcacttcttcatttggcgcttcaatgtgtcgacgaatcgttcggcacgtccgttgctctgcggatggaatggcggtgaaaatgtctgtttgatgcaatggtttctgcaaaattgggaaatttcatttgatttgaatggcggaccgttgtccgtgacgatttccttaggaaaaccataccgcgagaacaaccaaacaaacttttcgatgagcatgctggcggtcgtcgtggtcattttgatcacctctggccatttgctgtaggagtcaaccacaacaaggtatttgtttccgtcagcacaaggaccagcgaaatccatgtgcagtctttcgtagacttcggttgatgatggccaaggatgaagcagtacttttgatggcgctttggctgctgaacgacattcctcacagtttattacccacctttcaatgtccatgtctatttttggccaatagacaaattgtttcgccaggctcttcattctgaccatgccgggatgggtgaaatgaagtgccttcaaaatgcgaaaacggagtgcggatgggattatgacgcgatcgcccatgagcaggcagccgttgacttcactgattcgcagtcggtgcgtataaaatgctgccatggtcgattcgtttgctgtttttggccatccattcctgcaatgttcaatgacctttttcatttcttcgtcacgtttaatgtgttctgcgatttcgtcggccgtgactggcagttgatcaattgttgtttggaacatgtagtcgactgctgcggcacaaaactcaatgttatcgtcctcggaattgtccaaattttgtgccatctgtgcagaagcaataactttgtcctcctcttgaagtgtgtcgcgatgctgtttgatcagtcgcgagaggacatcggcctggccaaaatttttcgtcgagatgtaccttatgctgaaatcataatttgacagaattaatgcccagcgttggagcctagacgctgtgtaaatggggatcccgtttttggacccaaaaatgctgattaacggcttatggtccgttaaaaggctaaattttcgcccatacaacatgcgatgaaacttctgtacggcgaagatgatggacagcgcctccttctcaatttgggagtagttgcgctcggctggcgtcaatgatcgggacgcatgttcgacgactttttcgctgccatcggcgaatgtgtgactgatcgtagcgcctagtcctttgttgctggcgtccgctgcgacgacgattggcttggccgggtcgtaactcgtgagcagcaaatctgaagtgatgattttctttgccccttcaaatgcctgctgttgatccggtccccagcgccattgaacatccttcttaagcagttcgtccagcggtgcacggatctcgcgcatttggctgacaaaacgggaataataattaattgcgccgagaaaagagcgtaatgtttgctcatccgttggtgctggcatctcgttgatcatccgcgatcggtcggggtctggtcgaatgccttccgctgagatgatgtgacccaggaacttcagttcggtgcagagaaatttacacttctcgaatttgactcgcaatccccattcctgcaaacgactgaaaaatttgtaaagggtttgctgatgctgatccatggagtttgttgccacgatgaagtcgtccaggtagacgaaaactccatgaatgcctgtgactaactcgtccattaatttctgaataatggacggggcagatttgaccccaaatggcaacctctgattaatttttggtcaaaacatttaaaaaagcgaaagatttcaattttcgttttttttatctgggatataatattatatttaaatttaattgtaggagagaatgtcatcgaagtatgaaatgcccgtgaaataattattcttttagaatgaaaatattaaaaattgtctacaaatacatatgtctctgtctaataatttccccaatataaattcatatttatttcacggggaaatgttagttttttcgtaaattgatt

SEQ ID NO: 8030 - DNA, 5711 bp, Heterodera glycines
  unsure (1)..(5711): unsure at all n locations
caaaatgcacncgctaaaataaaaaattcacaatagaactcgatcctcctctatccaatggtatatcgtttataggcattttccgactgacagctcggaatgttcccttgtaagccgtttcggtttcgggatttggggcgacttatccacaaaacaactgattcgaactgtaaaagggagggctgaaaactgtgcaaagtgtgggcgaactgagcactgtcagcgtcaccggaagattgtcattggcagacgtacagccgagtcggaagatgcaaatcggcgcgcttaaccttccggattttagcggtgttcagacgcccagtgacttgggtattttactttcaataaccctttgcatttgctttttatcaattcccactttggagagagcaatttggacgagactttgtcaattggcaccacaaactctgctgaacattttctcatcgacggactactaaatgttggcgaggacgaaatggtggccggcgaagaggtggtggaagcggaggaggcggtggaaagtgtgcaggacattgcgatgctgcggaggaggggcaggacgttggcccgtcaagtgaatgtgctcgacattctcgtggaagacctgaacatttgcgcttctgttgtagacgttcgctcttccgtcttgggattcgcttcggagtgcgccatcggcttcttttttccttctcataattccctttttagtctctatttcggtgaaagactgggcgtaaaatgtggcgaagtgtacgacgaaaggggcgccacttttgagccgaaacagcccatgctgcagttgaacagaagcgacggaccaacgggagaatgcgaatcgaagtcggacgaggaaaggctcagactagagatacgatcagagccgaaacaaaccgcgataaaagtgcagtttgggatggaataactgaacacagcaatccatgggatggtaatgatgaaaagttacagttaaatgtgcatggcgtggacatttgcgtcagtgacgaggtggtctcccaactggcgccgttcattgaaaaccccgcagaaaatgcacaccctccagcacttgagctgtccgtacagaagtgccggattgaaattaaagtaaatatttgtggggtttaagaagttatattaaaataaaaaaacttggacaacaggacccgaagaagaaattcccaattcggattggatttgatgaactcaaattcgaagacggaccagtaagcagcaaacaaacaagtgcttcctagtgattgaacctggcatatccgcgttttgttcctccatctcggggatttatttggccttttgattcttttttattgtggatgatcgaatgttgaacgcttttgctgaccatttgtttgaaactagttcctgtctttctctccacagttcattagaaatgcgttcgttgtttgttatttacgggatcgtttttctttcttttttctaacatatcgtgctcaatttaagtctctgttgatgtcatattgtactgtgttacaacaccaatgaaaaatgatcaatgaaatattttcggtaacgaaaaaaaacttatttttataattttagaatctatttgtttccttaattttattaaattcatattatttatttcaataaaacacgtgttaattccgttcgtctgttaacattcttctcgtgactttctcttcagtctgtgtttgcctttctccgccttcgaattggcttagaaacgaattcctttgctgtgcgattgtcttcgaaattctctctcaaaatttaattcgttttattttcttcctgcgtttcgctttaccttcgtaattcatcacaaatttcccgcaaagttcgctcagtctgtgaagctccgcgagatgtattcgcagcacaattgccgcgtcgaatatcacttcgtccaccatttcgctcttttgggtttccccggggctttcatcagctttttcacctttttctccaacggttcgacgcctccagcaagcgaacgatcatctcgaacgggggttcaacggcactcgttaaccattcgttggcatttgcctcgctcgacatcgcccgtactcgaaaaggccgggctcttcccaaaattcggggctaagtgcccgctcggcatttgaggaacaaaagcttaattaagcgtaaggaaaaagtgtattatggccacatgtcaatgggctgagaaaggatggacggcacaccttaacaatggcgaagtgtggatgtcctctgatcatttcgatgatttggtcgaatgtctttgacacatcaaatggttgtgaaaatgccataaaatacaaattatgggaagaaatgggcaaagcaaagaaacgcgaaattagacgatcaaaagcacctcaaaacgcttcaactgataaggaaaatggggggggggaatgaaaggaaaggaaaaatgagacggacggacggacctttggggtgtcaaaaaagggggggggggggaaataaaccataaataatgcgattgttcgtctgagcttcattagttaataatttaaatgcgataactacaatatgtatgtatgtacagtttgttagccaaacgcagcaaaaataatccaccaaatcacctaaaaaggcaaacggcactatgaacagcatttttctccttctgaaaggccttttccctttaaaatggcatttccccgtctttttcaatcttacaatttattacacctttcctctcttcctccctcttccgctcattttctaatctcaacaaaatctctccccttcccttctcccgcctttttcatcaaatgccgccaacccaaagaattaattaattggttttatacacaaaagataatttattaatagaaatcctttcatctcacaatataattaagcgctgatcagctattttttgtctttctgctcaaaccgatcggctgaataaatattttgcgaatttttcctccgcttggcttttttcccaagccttccttttgaagaagcgaatggccgcgcgttttcgcctgccgcagctaaggcctaaagggaaaaggcttaaaagtgaagggttaggaagagtcgaacatgagggaggctgacagcagcagcagcaacacttacagcagcagggacaaacgcagggcaactgaacggagggggggggggcggagatggacagcaggaagaagcgggagaataattattgctcgaaatcctcaattcttgaatttttgtgaaattcgagcctcccccataacagagtgatcggtggtcaagttaattttatgacggagataataaccgatgaattaaatattggtgtgcccacctttatgcaaattggcccctgaaattgtaaaaataatttaattgtttttctgataccatttacaatttttactcactttgtgacaacaacagcacgtgcaacagcagggacagcagcagcacttgctaattggggcaaatacaactcatattttcgactttttgttttattttttgattttaggttcgaactcgtgtcttacgaaaatggcttaattacggccctaagatatcgaaaactctttcataaaaattggcggaggggggggggggggggaatttgctcaaatggtttcccacgcacttgcagcaacaacagcagcccgcttcgaccattcccttctccccaattttgtcaaaaagcatcagaaggaggagaggggaaaatatcgctgaacagagaaagaaacgagccatttttggagaaattaattgggaaagcaaaatgcgaatttagggacaaatgaacgaaattcagtggaaggacggactaataagtgacgatgatcagaggggaggaggggaagtgatcggaggggcccatcgaaagggggggggggacaatgcgattggatggacaacgaacgactcggacaattcactcgccgccgaccgacagattctcccccctccccccgaattgccaatcactccaattaatggccaacaacgacagaagaaatgacaacacaaaaatttattaaacaatgttttgtccacgggaatcacccacatttccgagcagtacgtcatcagcagacaaaaaaaacaattaatcataattaataaaattgcatggagccaagacaggaattcgagattaggtcccgaattttgagtctagctgggtcaatcagcaagaaattgcgaacatgaaaacatgtaataaaacatcattttcaaaaacgttttgcaaacagaaggggacttctcccattttacttttttcgttcattcccaatcagaaaaaatgacatttttggcttttctttttcaaatttttattcaaatttgaaatttttcttggaacttctaatcaggctcgattttactacaaaaatatacatttgtactaactatattatcatatatgcacagaataatatttttatttttgccttcgtttaaaatcccttggcctgtatttccattaacaaataaacgcgcaaattttcgtcctcaacgttttgatttaatgcatctccgaccattttcttctgctgtttttccactccgtcgtgcaaaggcaaactctgaaaaagtgaaaaaggaggaaattgagagaaaacgaaagtaaagaacaaaggggggaaggagcaccttcacataatccatcacttcgtcagcaaattgaatccaaacgccttaattatccaattaattacaaaggtgaaagtgatcggtttcagatcagaaacataacaaaaagagcatttcatgaagagaaaacccaacaaattcaaagtgtttttggtatgtttctgcgcaaagctaaaaaaaatcgtacagtttgaacagcccgaaccacagcaaaggtcacgagacggaggagtgggaaattgctttatctgaatgaacaataagtgtctatacgcttaaagcaaaggtttgaattcgaaaatgccctgcagcagagacagtggggaaaaccaacggatgaaacgaacactttttttgttgcttttcggcccttttttctcaagtgcaatttttaagtgccatgtttggacgatttttagaacaaaaataatttttaacatgctttttcaaaaaaatttgggatacattggtggtatccggtggttctgatagggccgcagaggaaatatttgggatttttaattaattttgctaacaatacataagtaaatgtggtacgaagtacgtgtcaaaaagaatcatattttttaatttttttttatgaaattatttattagcatgctttaaggattacattatttttcaacaatttctaacccgaacacgaaaaaacatttctaagaataaaatcagtttttttaagaatttttgtcaaaagattggcaatgagaccactgattttttgaagttcgaattgggttttttgtgtttggaattgttgaaaaccatgtcagtccctgtcagcatgcttttgcctccgtttaacccgtgccgacgtcgtctccgttgccgccccgccgccgtcggtgaggccaattcctttgactgattcgggcgcagcgattggctgtccgatgggcccaatcactgacgacttttgaacattcgttgcacaatcacttgctgaaaagagagccccaaaaggcgtaactttgggcaatggtgcagttttgtggtttctgcgtaaataaattaaaaatgtaagaagcattttttctaggataaaaaaatgcgctgat

SEQ ID NO: 8031 - DNA, 1111 bp, Heterodera glycines
aaaagaaaagtcaatttaaggcagacacatatcgcaattagaaccggctcttcaagtcttatgcgcagaattctcgctagaataaactccaaaggacgtccattaacctgaatgtgtaattgagaactcagcatgggagaatgtataaatgtagaaaagctgtaacaaattcttgactcgtttctcactagtcaacaaacagtcaataaattagtctttactaccccacaaaataattcacatctaactgaagacgcccacaaaatacggatcaatggcaactcgtaccaaaaaaacagcctaagagcttcaaactaaaacatacaatctctacatcaacaaaaaatctaaatcattgccctttttcccgataataaaattactcgttgggacgacggtgtgcatttgggaggagagggaaaggcgacaatgattgtctgaaagccttttgaacagaattcgaaaggacggattggagaagaagcattgccaaacccagcgcatttctcacatctgcggattgacaagcaaaatttaaaaaaagaaaaaactaaactcattttcaataggcatttaaaacctcaaatttaggggtataaaatgacaaaatttattcaaaaacacggcgagtcaattttgggctccaagtacaactaagttggttttttcgtcttagtggtctgtgagttagtcaaaaaatggggggtcacaggtagagaccggaaatttcaaatttgcggatcccgctgcgggactggaactcaaaattttttgcgggacgggatcccgcgggattaatcccgcaaatcccgcatttaaaatttgcgggatcccgtgcggaattgcgggattttggaaaattcgaaaaaatttcaattaaattcaaaaaatttccaaaaatcaaaaaatgctgaaaaataaatttttaggggctgacgggatgcattaaaaggggctgatgggtcgactaagatttttcgattggatccgacggtaaaaagttgatcggaaatcaaattattaacggttcataaatttgactatttttttcttttcaaaaccacttttttacggtgcaatttttcaaaaaactaggaacaggggtccggcg

SEQ ID NO: 8032 - DNA, 1057 bp, Heterodera glycines
cttctgcttaattttaatctttcaaatatgtattagttttctactctgaagaatactttcttaaaaaaattaatttttaaaaatttataaattggttttagcaaacgatgatatttagtgttcgtctggagcagaaagtgcataatttattcttttttcccatatttttcggattcattttaaatttttgtttcattttatcgtttccattaggctcttgcttttaaatttttcaaatgtttcaccattttattttttatttcttcaactattattaattataaaattgttaaaagacttgctgcttggttaaatttttaacggtatttttctctgattattattaatatgtcaatacaattatgaattaaaactttatattattttaattattgcaatttaaacctaatatattatacttaaatatttctttcctaagtttatattaatgtcatattatatcataataaaatttaataaataaacctaaattttgttaaattacaattaaaattttactatattaataatttatacaaaattttgttgaatacgatattattaatatactttgtatagatcacttttaatcaatgttattttttaaatttttgaaatttgttcaaaaaatttaagtatttttaaaatttttttaaaccatttttcaaaaaactttttttttaattttcttatataaaaattaattaaaatcccgatgcatacaaaatttggaactttgcgaagggattccagtaatgcaaacccggtgatttttttgcgtttcaatcgctttttctcggcgcgctctttctaataaacttttggggaacaaggtggagagaaggctggcggtgccgataggcggcgccgggaaaattttgaaaatttgagtgcaacttgctaaaaattttgtctaaaaatgacctattttgttatttagaatcattttctaaagaaaattaaaggttttggtcggatacgactgggaaaaaattggaatttaattgaattttttttgagaaattatcaattttccataaatctcttgcttttttat

SEQ ID NO: 8033 - DNA, 5692 bp, Heterodera glycines
  unsure (1)..(5692): unsure at all n locations
caaattgcagcggtcgcgaatcgcggatcgaggaaaaaaatgtcgcgaatcgcggatcacgcatcgcaatcgcggtcgcgtcncagcgctggtgcgcaattgcagcccattctctgccaaactccgcaggaggaaacaccgaaaatcaatggaattgcttcgcttggggacgccaccccaaaaaacgaagccaaaaaatattcttttctaaaaaaatactctcacaacgaaaaaatgtagatttaacacactgttttcgcgacggtctacacctgactgcttaacggttccccctgaactgctaggcccagctgactaaattcggcaccaatccctcagacgcctagttttttaagggtaattttaatagagttttcgcattgtcatatctttatgaacaatagtttatgcctttttaattttcttctttatttgaatacatttttttaattttgaacgattgttttttaaattttagcattttgcttttttgtcctttttattatttacaagtcttttgttaatatattacttaaactaatgcatttttataatcttctcaatttcgtttctttttatgttctacaacctttaacttttccatttattcatgtaaatggagtaaaacttgttgatatttattagaattcgccttgttcgattttttgcctttaatttttattatgcgtttttttctttcgatgttttatctccgtcatttcattgtatcacattttcacggtctttgtgttttttttttcaagttcctctcactccgtttttcggagaatcctctacagataccacataatcctctagattttttttgattatctttttcatcattttgttaatttttgatcattattctccaatataggtggtgctttatgataaaatgaggtagtctattatttttacagatacactatcacaaaatttttcataatctttattgtgttggattatgttttatgtatatcattgcatttttcattattttatttttattagggtgggaaataagtcctgtcatagcattttattttgttttataattttttatgatttttatcagcttcccaaaatgcaattttttcgtagttttttgaatgaatcttaattccgagacctagcaataggaaaaaacaattatgaataccgtacctattgaattagtaccaccgggggttctatttttcaacccccctcgaaaggggggttatattacagagggaggttctaattcagaggggggttttttcaacgctcatttttcaaaaacccaccaaaaaatggctacttattttgtaaacatttcgccaaaaaattgattttttttgtaatttcatttgttttattcattctccatatttttcatcttttacgaatgacggacgagagaaacccttctgcatcgttaaaaaaggtagttcaaaattataggttttaggtacctacctgttcataacttgttcattatacaattaatttcaatttaggtgtgctgttactgcaataacatctgttctggagcgcaccagtgccgcaaatgctcaaagccgtgccatgcaattgctccgtgctctttttgcggccgaggactacgagggattcagcgcaaaagtcacctgctgcaactgttggctcaacgatgatgacgatgatgttgtgatggacaaaaaagcgaacttcgccggtataaatgaagcgacaaacaatgaccaagacgacgacgcattcgaacaatttgccaacagccaaatcatcggagaggacaatgacaagattgatgcgtcggcttcatcatcaactcacaaacgtcgcggatacataatcgaagagaaaatccgcattttggactgcgccaagatgtcgtccattcacgtcgccagcagacgcttcagcatggaccgaaacacaatttgaggctcgaagaagcaggaggcggcactgaggaaaatgtaaatttaagtgttgtgtttttcaataaatcaaaaatccatataaatttcaaaattgacattttaaaggccccggatgtttgttggaacattgttattttttgttattacttaccaaatacattttatttaaaatatcttttttgtacgatttcttggccgtataaaaatttgatttttttgaaaaaatttttttggggggggggggttataattcagagggggttctaattctgaggggggttctatttttcaaccaccctcgaaaggggggttgtaatacagaggggggttctaattcagagggggttatatttcaataaatacgtaaatacggtatattgtaaaggctatttgttatctcatggcacattcagatttgtttatattgattcagcatggtccaaaaagtgttcgggtggcataactttctgaatagaagagcaattcccaaaaaataatgtgattattttatacatatttaagtcctacagataccgactttttgaagtttttcgagttcttaggtaaggaaatgaaaaagccccttttgtcatttcaaaaacattagaattttttataaaatttctttccgctctaaattattgctctgtctttgcttattcagaaaatatttgatcggactattaaaaaattaggggctgagtatgcctcctgaaatgtgagtggtttttccaagatcttggccaattcacggggccataactttgttaagtcaaagagaatgaatgcactaatcaattagtcaaaacttgggactaatgagaataatctggcaaagtttcattaaaattgcattataatttcaaaatctcatcttaaaagttaaacagtaactttgaccaatgatttattttaattgaatatcaattattattttcggtgaaattttcttaatattcttcctcgataattattttttatacatttaatttttctcggtcaaaatttcttatattgctttagttatttcccaaataggtcgttagagaatttattataattgtttcttaaaataatttttttttaaattatttaatgttctagttaaaatgacaatcattataatcaattaggattaatttttattgttaaatgttcaaacattttaataaaagaaaaatttacagaattttataatataaaaatggcattcaacaaagatttttatttcgttttatcatgattccgcgttctcttctcttgatctgcaacgttttctcattttacttttttagtcacatgtaatttttcattttaaatatgaaattttttctatgaaaataacttaataaatattgattgatagtttaatattcttaaataataatcaatttttgtcttcatttattatgcttctggtgtaaaccattgttgccgtttatgagaattcgccttttttgatattttaactttataattttattctttagaattattttcttatatcgattatgtcatttgtcgcattttcactaattttgatgctcaaatgcatcccactcgttttttagactaacaagaaatatttccaatgtgagtgttcaattgttaatttaaacaaaattataaaaatgcaaaaacattttttctattttaaacatttattttccgccttatgtttattatataaatttaggattaaattataataatttttttatataaaaaatattcttaattattttatatttatttttccatgtttaatttctttgtaattcagttttagtttcaatgttcttgtgtttttaaagttttgccaatttttaaaaaactagctgatttttttcttgcgcatatcgtgtgacaacattcatgcaagttgctcggtgcagataaattggttctaaaattatttgaaaataattctatttcatattttgcggcacaatactctaaatatgctttgtagaaattttttttgatattgttgatgaagtggaatatttcgaattaatccaattttatgaaaatttaatagcattttattcgaggaaaatttttttgcgtccagaatttacggacagaactcgtctgtacggtctctttcggctaaaaagtactaaataagtgtgtttcggcccaactgtagaaactcctaacttaaaaggcgcataacaacacaaacaaacaaaaaatgtaaaacaaatatatttattttcttggctaaattaataatataaatttattaatggcttgccgaaggcccaactggcaatttaaacataatcaaagacactcaagcaggttaagtttttttatcattctgaatggcatatagaaacaatgtagtcagtccatgcttgtcggacttagctcttttgatttgtccatcgggcccttaatacctatttttatatctatatgtcccatacaattattaccgaaaaacatatttccttaagtgactcacggtccatatacgaagcaatttttgaaataaaatttgaacccgaaattcgtattggcttacaaaaaactgtatccgttacagagaatttgagtggggaaaaagtggcagttagagatgttcttaagataagatgtatctatctattttaataaaaatacaaaaccttcgcttaaaacgtcaaataattcatccactattaagccgactaatgccccagctccgccaattaagagctcagatttttttaatagccgaacttcacggaagttttcccaaatttaaatttggccgcggaatattttttacctatttatgtacatattttgaccaatgttagaggtggcttattatatatttttacctagtcacacaaaattttcaaggtacttagaacccgtcttcgcactaatccaaagtctgttcttattgatttcgagctcggttttttatttttgaacttttgaatttattaaaataattaggagcgagaagcgcatttaaacatatttggcctcaaattcaaattagaatgtgcttatttcatttgtctcaatcggtattacgttatgtacaggtaaaaatacctttgttgcccctattattttacttcagagacatggtcttatccgtgaatatgaagctaatgaaaacttagaanaatatatacgctcattagctgcactcgcttttcttcaacctaatttggttgagggttctctagacatattgtatgcacgggctccaatggtagctcgtcctgtttttgaatattttagaaagtaatgttgcaaattattcgtctttaattagatgttttagaacctatataatcagggataatggtgaacagccattatttccggttgatagttggaatcatcaccaggcggttattgatgatttatgtagaacaaacaatgctcaggtatcaaacttgaggggtcaaaccgatttgttattaaaaataatttaggaagcatttcatcttcgctgcccgtcaaaatcccgacgcgtcataatcccgatgcgtcataatcccgatgcgtcaaaatcccgacgcgtcgaaatctcgactaagctaaaaagagtcataatcccgataaatttaaaaaataaataaataacattatttccggtgaattaaatcgagaaaggatataattttctaatttccaatatttagcaagcttaatgaaccgaaaaaataggtataagcaactgcagccgtgacggactcacggcgatcacttgcgactcgccgtcattttccgctgacagtcgccgcctttgt

SEQ ID NO: 8034 - DNA, 1636 bp, Heterodera glycines
tagctgtttttatatttatatttcatgaaaattttatcgaaaaaatattgtatttttcatatttaatttaacagggatctattaaattaattttatttatttaaatatcttaatttagtattttttgcaggacatattccatattattatgataaatatttattattaaaattttattgtctttttctgagtctaagctattcgcaaaaactcagaatccttaaattaaatatgtaaaaattaaagtgttttttatttgtaattttttttcacatacatttgccggttctgagtcactttgatttaaaacaataatctaaattattttgtaaaatttttggaaataatgttataaattcaaatcatatcaatgatgtgttgccatttttcaggtaaaagatcaatcccaatggaaacgtatttaagaagttagagctaattaagtaaaaatggtcattttcgaggtaggtatttttggtggctgattttgagaaaacgaagagaggatacagaagctgagaaatagtgattaaatagagcaaagttagtactataagaatactaaaatataaagttttatttcataaaaattgaattattgggggggggccgagtctgaaagtggtttccagaaacggcatttttcaaaaccatcaaataacaaaattctttaataggggtcttggaaattccgaatttaattgaactagttaaaccgaccacgctgagttcgaacatagccttagatttgatctctgaattctcactgaacctgtacagctccaacttcatgcatggaattgaagcagtacaagctcaagtagcaaagataggtcagatttaagaccatattcggattctgctggtctaatttacagaaaaagtttgtctttgttgtatcagctttcattttcgaccataaaaaatccgagaaaaattagtaagccaatttccaattttggcatggtttggaaaaaaggcagaaaaaatcgatcaagcaaataaaaagtgaaacgttggtatgaaatgaaagaggacagtttgacgaacaaattaaaaggaatcattaaaataggtgcagaaattacggagttatgaatttttgaagtcggcagaaaaaatgtgtgcggaaacttatgttacaccctaagtaattaaatttactttttaattgacaaataaatattcacttgactttaagattttccttttactatattttatatttctgagatattaacgatcatataatattatttggttgtaattacaacattcttagctatttagtattaaaaaaaaataatttgtcgttttttctcagtactagcaaatataaattatttttggcaatatttttaaacaaaatataacaaaaatattttttttattaatgtcatgtttattttgtctaagccatcctaataattttaatccttctgaatgggtattctgtagattatatgtaaaaattttctttatctatttatgcatgttttatttaaatgccaataataaaaaacagatcatttaaataggaaatgaattggcgaatatatcaaaatttgaaatataaaattttgaacaggtttcttttaggcgctacttacattttaaaaaattcctttttttcatc

SEQ ID NO: 8035 - DNA, 2178 bp, Heterodera glycines
aacagtgtgtgcagctgataaacaccggcacaaatctaaattaaaaagaaaccgaaaattagcatactaaaatttcgttttatgaggaaaattttaatatttttaataaaaaatttaaaaaattctaacccaacccatacttgaatggcaattctcaacaaatctttgctgtccaactgctttacactgtttgccgaattcgttttttgttcactgagaaatgcccaaacactgcccaaattcatccattccaacacaatgccaaactgggccggcctcagttggcaaatgccgttgaaattgctaatgtgcaatggcattgtcttgaacaggtgggcggacaaccgaatgtgccacaaaattgccgcttcattgaggaaaatatcgaaattgtcattttggcatttcatcgattttaggcacactgatgagtcatgcagttttgacttatgcaagacgaggaatttgccctaggcagtggttgattaattatgctttatttaaaagaatttaaatttgaataaaaaagaatattaattaatttaaatatgttaaattaattacaattacaatcattaatttaaaaatgccaaaatatttaccaaactaaagaaaagtttttacaatttattttttaaacattaaatttagtaatttttaccgaagaaattttcggtccaattttcaattccttcttggaaatggttggaagctataaggaaaatattaatttaaaaataaaatttaataaaattacgaatttattttaccaatttaatcaaggttttcacagcccatgtttcagttgccaaagttgttgcaaatttattatcatctgcagcagatgttgtcgcaaagcttgcttttttcttttgatttgctttataaaatggatttaaaattgcttttttaattttaaaaataaaattagcagttaatatcttttcaaataaaattttaaaaacattctcaccaacaaagcgtttggccatttttgcaattaaaataccagttgataacaataagaaaaacgaaatataaaaataaacaatgattttaaaggaaggaataaatgagagaaaatatttccatttggatgcttttggtacacaacaccttaattaattaaattagctaattaatataattaatttatttgttgatgaaaaaatttcaaattaattaggcaaattaattttacattgatggcattgggcaaagttcttcaaacaaatccatctccttccattcacaataccatgtctaaaaataagaaattattatttcctcaaataattgtattgtagtacaaaatttttgcctgaaaatctgtaaaattgcaatatccaccgatgtctttacagtccataatgtcaaataaatatactgtagattccatgaatatttcggatttgtttaactttaacaaaaaaataacaataatttttttaatatttatttgggttcaacagataaatattcttgaaaggtccttatcaataaaagaattcacatcacataaaaggaataattacttgataagaaatactgacacttgttgacaaatgattatgttaaattttaaaattattttgtattaaaattgaatttatttaaaaatatgttttattataataagaaaatatttcaatgatttcttcaggattagtgccgatcgtgctcagaaggtttatcggcgacttcttccaataaaccacaaaaaattctttctttttatcaccaatatttttaaaattttgattttaaaaatttctacctaattttttgaatttttttttctcactcaattttttacgggaacattcatttttagaataatttttactgcaattacaaattgttcatttatttaatgtctttgctaattaatttttatttattttttactaattaacgactaattattttattgctgtttctctcgttttatcccattagtttttggttggccattgattgattgatggttgagtttgcttaatctcatcacctcctcacgctacaaaacaccttctttcggcgcttttacttttgttcacttctccattcgatcgatgttttcaatatagttaaatatttttcaaatttaactaagttgacttgccagaaaaataattttttaaattgaaatatataattttatcgagcacatatttc

SEQ ID NO: 8036 - DNA, 3766 bp, Heterodera glycines
  unsure (1)..(3766): unsure at all n locations
tcatgacaatttgtgagccaaaaatagtcagaaatgcaatttacagagaaaccannccaataatttatgagaattttttttaaactaatattggaaatttttatcaaaaatttccaatttctctccttcggccccatcgcattaaaaatagatttaaatgatttttttaaatagataagtcactaaaattgccggccctaattattaagctcaatgaatttatgtaaataacattttttgtgacagtagtccaatattaaccaattaattccttgagaacaagaaattcatgataacaattatcaaataattagaatttataatcttttccttttttaatttagaaaatgcataattatcatttaatctttttgcttgtcgcactaataggaggtattaactccttaattgacaataataaaaaaaagtaaatatattttatttaatcaaaggttttggtctgatagcaccaatgaaatttgaagaactgaatggcctggacgccgaaaattttgtgtcaaagttgggcaaaatttttgaaaaatcagcttgggtagtccaagaagcgtacggagaaaagccatttgaaagcgttgaccaattattcaatgcaatggaacggggtaaaaatttttaaaattaaaaaagtatatatttaaatattttttaacagttttaatgaatgctggacgagaaaaacaactgaaattgatccaagctcatcctgatttggcggggaatgaaatgtttagtggcaatctaactcagcattctacgagcgagcaggttggtatcagagatgctcagaacgtcccgaaatgctcgatcccgagatcttttgctttatgaataccggcccgaaaatttttgaccgttgccacccaacccaaattttttttctcatctggaaacattcctggttggatttgcaggcatgttgagggtcggggaaaagcccaaaaaaagacaggggattcggcgagtgtcgaaggaagtttttagaaaattaaaattaatttaaaaaatcaatcctaataggctaatgctgggcttagcgcattaacggctcagcaattggctgagtttaattcgctgaactccgcttacaagtctcgcttcaattttccgtttattattgcgcttcgagaccaaaaagaaggtagtaatataatttcatatgtatcatattttaatttatttatttaataaatttttaaattttttggcattgatggcattttggcggcatttcgtcgacgacttaacaactcggaagaacaagaaatcaatgaggcactctcacaaattggacgaattgctcgccatcgattggacacattgatgatggagtcgaaatgagaattttatcgaaatgagaatttaaatgttaaaaaatgcttttataaaattttaatgctttattgtataataataaattatcggcttcaacattttaatataaaaataaattcattttttaaatttgttaagaaaaatgcaatgaaacagaaaatttatctgcgacggactaaccccaaaattacataaatttcaaaaattctaaccaaaattgaaaaaaatagtaattttaaaaagactgattaaaatattggcacaagacggatcagagagataatctctggactgaaatagtttcaaaacacgaagaaatcaagacaaaaatagaattaatattttcattataaattgaaaattaaataaaaaatttaatagatttaaaaaatttcttccatttacctttgctttttcgttaaaaatttacatatttaaaataatcacttaaatatttcatcaaaaaagctcattagtgacccaattcaaagctttaaccaactaaaataggcaaaaaatatatattacaacgttgagacagacaaaaacatatgtttttatactttacaaacaacaattggatttaaattggacaacggaaatcctgtgtattactcagaacaaaaagaatgaattaaaaacggaaatgtgcctgccctttggcagtcacagttactaattgctgcagttgtctgagaattgaaaaatgaaaaataaagccacgggggctctattttgggaaacacagtatgttatttaatttagaattttgtgccaataatcattttttattttctgaatttaaatatatattttttctgtcttggaattctaaaaaatgtgtagtaattcaggtttttgccaataaattagtatgagtatttttgggcttgaaattggcgtggagccggtcggcctactgatgggcgtgttcgagccgcaaaagtacacccaaatgtacaattgcaatatgtacaatgttgaagacattccattggcggatcgtcaatccatcccacttggcctgatgttcctcacgttgggattgatttgtgaggtaaaaaatacttagcgaaaaattgagactgcgaaattgttgaaaaaccccggattaagatcgaaatttgggattgaacgaagacagaaaaatccatttatcccctgaactttgactgggtacctttttacattatctgatgatacaagtcctatgttaaatttgaggtcggatatacagcaacaataattataatgtttttattcagctcgaggtcattatatgaagaatatttaaagctctgacagggccggaccctgccaggatttttccgggctcctgatcctgatcgggtatattttgaaaaattgggagccctgaaaaacagggttttgaatgcggaatcccggtccgggtcggtcaaattatttaatcctgattccgaatttttcaaagttacgagctcgaaaacacacatacatacaatgtacaaaaaaaattattatatatatatatattttttatatatataatagatatatattacatggttataggttctctacctcccgtgtatgcttgcgattcgcaaacatatggacagcacatgctttaaagtatgtacaaattatttattataatttaatttttgtaaattaattatttataaaaatggtaataaaatttccatatttttttccaagttcatgttttacattgctgtggctgacatgcttgcgctgtttatcagcggtgtactcactggatatttggcattggttggtgctgtctattgctcctacccaaaactcatttacaccatgggcgcatgggcaatttgtatgttaatttttttgttgctcccgtgtaattagggtaattaattgggttaataattgatttaatttttattctcataacaataactgtttgattgcttttaaagcattaaattttggagtttgatatgtgagggatcttttccggattagaactttgcatggtataaaattcgataaacaattaaattaattttcgactttggtgccgacttaacaaaacatgaatttattaaaaaaggtctctggggaaccgagtccactgccgagatggtgctggcgttcaaccgttgtgtggagttgtcatcatcctattgggccgatgtgctgtttcatggaaagcgtacttatctgtggatgatgatcccaactctttatgggtgaaccattttttgtaccgttagatttggggctatttagagaccgaatttttggacacacacgaatagagttaaggggtcaatggaaactcgtacaaaaggcatttttttaccaagattttgtagccaaatataaaaacccttcaaattttgtatagaaaatttttttttgtaaattatactaaaaaaaatttaca

SEQ ID NO: 8037 - DNA, 4165 bp, Heterodera glycines
tttttaacaattgattatttttcgtaataaaatgattgcatacatatccggacttgaacaattattaagtaaagtgagaaattgtgtaaatgagtccccttgggacatgtggtaaatgaaaacaatacaatgggcagcacaagttgataataaaggggattgatattggtaagcgttcttctttactccctccggaaatttgcacaaaaatgatgacgtaatgggtactggaatgggcagggcaaggctgtcaaaatacaccaccggcgcatccattcccttcgcataaatcgcgcaccaatgagagccttgcttgtggtgggggtccctattcacaacgagcgctgccgggtactgtagtgtagagggaggaggcaatttatcactggcgaagcagccctgaaacactcgcccggtccgacggttttcgctcaaaagttttgttatttgcatgctgtccattctttaaccaaaaaattgaacagagttgatgaagtaccaggctgatgatgaacattaaatagagagcaaagagggcccagcaaacagcttgatgaaaaaagctgctttcctctggtctgtccttgcacatttgaataagcggtgggagaacagccgagacatgctcatcaattaacttgtcgctttttggagggactttaggtgttgtagtaaacggaatgtttgtagtacgtttcgataaagacaatcttctcaaatattcagtgtaggaatattcaggctcgtattgttgtcgagtgaaagtcagattttttagataagcagagtaggtattttccggttgtctttgttgttgttgttgttgttgttctcgcagtgttgatgaaacgaggggaagagaaattcggagaaagaacaaaataagacccaattttcttgaaaacatcttttatttttatgaaaaatgaaatgacaaacggtttaaatagtggtgtcactgctaatcgatcgatttttgtctaacatcaccaaagagtcacattctcccatcaccaccagcattattcctccgacaggtactggttgattgaatttgatactcaccgctgtggtcccattctttatcaggtcaaacagtgccgcttggtcatccccgctgtttgtcagattgaacacgtaaatgcaatgcgttttaccgtattgggcaaaagttatcccattgctctccgatgaattggcgaagcccaccgcttcgttcatgtcattgaagggccgaacatattttccgtttgggtaaaccaaatcatagggtgcttgcggatacgatcgtccatttgcaagaatggaaatttcgcgcacattaaatggttgaaaattgaatggactgcgcaaaattgtcccaacatagtcagtattagccaccagacccattgtcacacgacgaggaatttgggccatgaacatattggcagtaaactcatatcggccctgactgatgaacatcgatttcatcattgtcttccgcacagcataacggacaggtttcacctccagctttcgcgcaatgtctagcgccaacccatccatcagggacacttttttcacatacattttcagtcccacaacctcgaaacggtaccgacccccggtcggcgcaattaacacaaagtcattgtcgttgggtagaatttcaatgtccaattcacagaaattgatcaggtatagcggttggttgaataggtcggtgtcaattttggcgatgaattgagctacgttactacccgcaaacaaatcacgtcgcgctgtgcatccgcctcccatctccaaagtatcgcccgtgtccctataatacccagcagcattcaaatgagagtcttttgctgtcgttgaataagagagttcatgtgagaaatatgatttgtaggccattagggcattggcattaaaaattttgcgcccattgatactcatttttatgttacggatgaaggtttgtccgatcatttgaattggtgcaatatttatgtcatcaatgtctaggttaatgagttgaccattagcgttttccttacggattcgaaactcggtgagcaaataacatttggacagatcaatataattttggctggaatgaagtttgaaatggtaaggtgtgtctgtaagcggattgctgggcagaagctcgaatacctttgaagatgaaacgctcacatttgtagggggtatacggaaaaagtccaatgcattggtgattgagttcacggagtcgttgtcgattttatggaaagccatttatttaattaataaagtccaaaagcgtccgatcgaatacgcttttttgcctgttttacaataggtcgtccaattagtgtttgatgaccatgcacatatgttctctttctttttatactccgttttccgcttccaaactgttttggtagtcctcctttgtcgagaacggtatcaattcctcgctttccctcactgacaagcgcctctttaaatggcaccccctcattcccgactcgctccagcacgcgttgcccagtgctcagcgcctccgaccctaccgtggtgccaacgcggcgaagaatgggtaggaaaaaacgccacagtccacgaaacacatctccaacgcccgcccctcgttgaataccgtaccccctctgaaaggggcttgaccccctgaagtagtcaaaatcgtccttttctaatccgctaccgtactgcacatactcgtcgtactgcgcaatgcttgggtcaaacacaatatgaaccatttttattaacgtatgacaaataaaacacaaaatgaatgaaatcaaaaatttatcactttcttaaatatcaacacggccatcgttgtcccataggcgaatggcacgagacgacctttgtccattgtgcgcagttcaatctcaatctcgttgatctcacgtggcaacactcgcgcaaatattggcgagtcgtaaatcttctcattatactccccggggattgcaccgctgatagacacaacccggagcaaggagctcaatgaattgccaattatcatattttcagttagtccttttgagtagactgcaaaacttgagatgccacctcgtagatcaaacccgtatttggcaacttcatttgacaccacacgctgagggttttcaaagccaagcacatacccgagctgtggtgagaaggacaaatggctgatgatctcctcattgaacaccaccttgaatcgttccatattggtttcatacagaataaacactgaattgggcacatatgtcagagggttttgattagctggaggagttctaaaaaatatttttggtgggtcgagcgtgtgaatcaaacgcgatgggtctatttgagctgctgatgttggtggtggtggtggtggtggtggctgttgatgttctgtttcttcaaaacggggtggagagcctgacggcggagcttgaggcttagaaggctgttgaggtttgagttgagatgctgtcggacttattagttgcgctggaggcgccgtaattatcggtttggcagaaggttttacaggcgttgctgtctttacagttaatttgtccttatcttcttcttcatcataatgtggtggagattccgccttaggagacggcggcgtttgaggcctagtgcccactttagcggaaaccgacgctggaagtggcggcttaacagtagaaattggggtttttgattttggagacagtgccgagctttttagttgcgccggcggtaccggaatcgtcggcttcacagatgggctaggaactgcacttattactggcgtacttgttgttgttgtcattggcggtgcagactcagaaattaaagcatcttttgtaaatggacgatcgtcagctggaaatgcaaatcatcgaggtccaatgagcatttcaatggcttcggcactttgtccggagcggggagtgaagccattttgtctccgcttgtccatccgatgccaaaaaatgataaaaatattctttaatgagtgttactggccaattgttgagaatggcgttattggcgctagtctctttgacttttgtcttcttctttcacctggttcaatccctctacagaaattaaaatatttagagggttctttttgtatattcattggtttcctatcgccttagaaggattcctcatcttttttatttatctatacatattttat

SEQ ID NO: 8038 - DNA, 2040 bp, Heterodera glycines
cttggaaagcgcatcctgcgagggcgcatcagagtgtagctgcggtgaccatccatataatgctgtacgtcctttttctgtaaatgtttaatcgtctttcgcgcctctttccacagcgctgtaacacctgcgaatgccgctggggatgatggatcattgtacattttgtcaagagtggtgttgatcagctccattttttgggcgaaattccttcttgattgtccgttccgttcgggtggttttgctctgtgatggtctctttggtggggccgtccatgaatacaaaattgggtccttcctaagccgctcttccaataggttcgctcctggtggtttaatggtggggcggcccgctctccggtctattatatacttgatggccattcgcaaattgctatgcgccaacggtttgccgtttgcggtattaattgtatttccccgaacgcccatacgatctgcataatggttgcatttgatgtatagccgttcaatccgctgagtcatggtcagctgatttgactgaatagcaaacagttcacgttgttgttgttgttgttgttgttcataagcttgtgcagatgttgaagggcctggctctggcgaatactgtacccttacccttctcggttgcctcacccgttttcttatgtgcacctcaccattctcatcatttacggggtgggggcgtttggtccccctcctaggcggaggaacatagggcatttcttcgacgacagcagtaggaggaggaggttgttgttgctgtaatggtttttctctgatttttggctctctttccgggatacggtatggtacgggcctctttgttggtgcatgttttggttctattttggttgtcgggggagggaagtacccggcttgcctagacgtggatggccgcgggtccagcttaagttctggctctcttttcgcccgaggcgctggagtagggtgttggtttttcttccaatccagctttgcctgttgtttttctctcttggcggtaggacgcggtggaggtggtcttggttcaatttttgttttcaaacgaggcggggatgtgagccgtggaggtgaacggtgataaaccaaaaatcttggccaaatgcgggaaaaagggtttgtcttcgacgtccaatccgtaggatggtattctgcaaattttttccgcatttccctgcttctgtccaacattcgttgaatctcgcactcccagaagacatcaactcgtgtcacttgagtcctcaagaactgtaaccgcttggcatcgcgctccctttgttctccagcagttttcccgttgggcaacatcatgttgtcagaaggaaagcattttctacagccgtgccaaacacaacctgcaaacaacttttttttaaattgcttaaaaatatagaaaaattaccattcacttcaattacacacccttctgcctcaatccaaccgtccacagtgtagtttgcaatctttttttctccatcaggtgagtaggctgtctgcacttgtacgttgttttcctcagcataccagaaaagaaagcggagagccagcttgctctggttctgggtgttgtcatagcccttttcagggacaatggcaaggtgctccgccggcagatggttcaacctgaagtgcttcatgcacgcaccggcaacagtcatgcattcccgtagaacatcaatcccatcgtggttttcccggtcgtcgattccgtcgacatattcgttccgcttcgacacatcaaaaaactcgcggcggaatgcgacgagagctgccattagaatttcaacgtcattcgtacaataactgaaaaagtccaaaataaatattttaatttaaaaatgttttacctcgctagtgcttcatcgagttgaaaaggctcttcgcgatgctgctcgtaccaatgatcgaattgtcgtcgcttctctggcatcattccgttggccaaatagtcgtcaggggttgggtagatgtgttgaccgtagttctccggacgcttagaaagatgcgggaaaaagggtttgtcttcgacgtccaatc

SEQ ID NO: 8039 - DNA, 4475 bp, Heterodera glycines
tgcgatgccaaaaaagatggcgaaataaatctgcgcgagttcaaatgctttgttaaatcactgctcgcctcatatttggtggacgaggaccggaacaaatgcatcacggaggaggagctggagagtttttacaaagaatgtggattaaaagaaatggaagaggaaatgatgggagacggatcagtgcgaaaagagtgatcggggagaggacattgggaaaagagcgatcaattgataatgtgatcaatcgataatgcctagcaataatatggaatttatcggtataagatatatgattagaatggtcacgtagaaataaataaacgacggtgattagtagtaagtgatccgaatgagtggaagaatgtaccaataaaatggaaaaacatgtaaataaatgatttagacgattaaatttctatatgccaagctatttacatgatgaaaaacaataattatttttgttaattaatttttcatatattttttattttatttatcgctactggccaaaacagccgtctcttccgatgaaaaatataacaacagctgctcattttttggccatttgtgctcaaatgctgcaaaagtgaagacagcataaacaggaaaaaataacaactgccattatttggcaaaaagtggaaataaaatgatgaccctcaaatgtttttaggaccaaattttgaaaaaagagagcaaagccatgcccaaccaaatgaatgggaataattatgttttttccttaaatattaaggaaatattttttttgtgaataaagaattgaatggcaaaattcgttgttttcatttttacgttggcattttttgcgagcgcaacaaatggccaagttgtgacgggacaatccgaccgaacgcagcaaggcactttagcatttgaagccatttatcggaaataaaaaataaataaaattaaaataatttaataagagatttatttttcttccaaattatatatattaaaagttaatttgtgcagaacttgcgctgtttggctggacagttgggctaagaacggcctattgccagcaggtgccagcccaagaattagtcgatccgttcaaagatgcagttgtacggatgctgaacagacattgccgaaatgcgtcggcatgccggctgaagaaaaggtcggcggatgtttaaaagggataattaatatgtgtttttgtggtttcaaatactggacaatgaatgagtttttaaaaagatatttatagtagaaacaaatttgcgtaattttacggatttatgtaaaaaaaaatttattcccctacaaatgaaaaacctaatccaaaaaattaaaattttatttaaacaattttatctcctttttctgctgcagtgtctccttctccaagcatcaaattgtccttttggatggatatcctcgtcgtgagcatcgcatcctccacttccgtttctttgtcgttttgccacatgatgctgtgagtttttgatttcattttaattgaattatcaattaaaatctgtttcctaattaagatttcaatggacaaaaaacccgacaaacctttactttccaaccaaattttatcgggtgaaaaatattttattttgagtttaattttattaatgtattgtagaaatgctcgactcacaaatcggagagcttagccatgggcttgggtggcaagtgcttggccatgacaaatacccgcgctttgacccggccaccacggtacagtatgacaaccgtacgccccatttgatcactttcccaaatggtggcatttgcttccgattttagtttttcaaccgcactttgatcccaatcgctgtgctcgcagggctctgtatgttctttttggcttattggaccactgctttcacttcgggctcgtccttttatgccggcggatggcttgtccggggctcaagtggcggcaaaaacgcggcattgaggcacgcatttttattatatttatttaaatattttttcaattcaaaataaaggtttgcttaaatcttttacattaaattaatgctattttgacttttttttttgttttcttttaaaacttttgttcgccataagaagtttggtggttttgattggaatttcaaggagcaattaattatttgtaaaaaaaattgattaaattttctggaaaattcgtgaaaaatatatgaatctcagaacttactcatccttaaaatcctacaaagctgaaaattcggaaatttttgattgtttacgattggctatttccaataaaactcagattattgtggtaaaaatggcatattgcctattccaaaagcttatctctcacctttagaagaacaatggaaatcattgaagaacaaaagtaccgttttgccctctatgacgcgcagagaggtaggccatcaaaagcaattttaaaaactaattaattaatattattattgggagaaacgatttatataccgtatgatcaccgtgcccgttaaccgttaaaggagtgcctccccattcgggccttttaccgcccaccaaggcggtggtggtgtacaaaagcaatgagcgagtgaggggcgttcagggtccgccaaaaagtgtggctacttcctactgcagtccgcaggtgaaaaattgttgcaattggacaatcatttttagactttttcattttttcgaactccaatggacccgaaagtacgaaaaagttgttcttagcattaattttacaattctagtgcatatttaggcttttttttctataaaatgttctttcactgccaaggcggtggaagcgaatcgcgcgatgccaatcattgcgccgaatgtcgaagaaaaagccgcagtcgaccaacaacaacagcaaaaagttgccaaaaaaggtgccacaaacattcagccacaacaacacgaagcgttgcccaccagcggcgccaaagggcctcaggcggcacaaaatggtcggcaaatttccatttcacaattagagtgatgtccgaacaaagtccaccatttaaattaatttttaacatgtaaaacgtaattaacatgctccctttgactaattaatgcacacaaataaaatcctttttttattgaatataaaaaagtataaacaattattttaaataaattaataatacgacaatataaatttaattaatttttttagggatccaacaaaaatatttgggcccggcaaagggttcgctttcttcagtgtccggctcgagcagcacaaaacgccgagagatggaagagatggatgacatggtgcccgaaattgtggtgatgcacgcgcacacctcgtcccaggaaagcagagaaacggcggccagcggaggccgacgcgtgtcgaccgccgcggaaaaagggtatcgagaatctcgacaaaaaagttatgtgtttttcaaaaattacccaggataaagacgaatgctctgggaaagtctgacagagtccggccctgttccgggctctagtccaaattctggaaaaccggaaattcgggagggagagcaattgcgagaccaaaactagccagaaaagaagtagtgaacttaggggaaaaggttcacaccggtccagtcaaattgctaatttccccccttccttaagccatcgtcgacagtcgcgtcgtgtcagcaccaccggcggggacgagtttaagcgcaaaaaatcttctgtttttggcggcaccgctttcaaaggatcggccgcgacacaacccgaaagacagaagcggtggaaggcgagttcgctggtgttgtccaagttcagcagcgccgggatgggaagccgtaaataatggacaaacagagaacattcggcgggagaaggaagcaaaaggacagcaaaaatggaagaatgaatgtcggaatggatatgttttctcgattttcaaaagaaaatttggtacggcacaccgactcaataccgtaatcaaacgctactataaaagagagggttttcttcccgggaccaatcacaattacgaacgataaactacaaaagacatacgccaaatctgtcgtaaaataagtcgtttgtcgttttccccaaacacaaaaagttttgtcgttcgtaattgttattggcccccgctgttttcaatttgttcagtttctctcttctccgttcaatcgctgctcttcgctttagccatatctcggaaaccaataatcccatctcgatgggtcttcaccaaagtgaagcgttggcgcagtgtttcccgtccctccggcactcgcccgtgacgaactgctcccactgctggcacccgtcctggcacttgtgtttgaacttctgatggagcttgtaattgacgagatgctgctgctgctgctgccgccactcgttctggcacttccccgtgccatgctgctgctgttgctactggcaccagtcgatgccgaacttgccgggctgtcttggcaagctcggagcaccattggtcgcaccacaaaataggagagaagagctaaaatgat

SEQ ID NO: 8040 - DNA, 2377 bp, Heterodera glycines
  unsure (1)..(2377): unsure at all n locations
gtcgccaatcgctgccaaaatcgttttcagagtttcgcgctgattttggtatgaattttcagagtttttgctgttttccttttcatttttttcatttccgtttctttcncaattattttggttccaatttttcgccaatttttttaaaatttcaattttatttttattttcatttttgtttgctttgtcttcaattttctcccgttggattttcatacgtttggctaacagaaacactgcttcgaccgcattttttcttagtctctcaactgctgctacatcacacacagattctaatactttaattatcagggattctttttttatgtaagaaaaatcgcgaaatatgtaaataaaatatgtataaaaaatgctaaaatatgtatgaaatatgtacaaaaactcccaaatatgtacgaaaatatgtataaaaatttttttaacggttattttttttggaaaaattcttcgtaaagggtgaaataggaatgcaataaaaatgacccaaataggcctagaatcactttttagtactttaaaaattaatttttggtatctgtttttgaaaaaaaattgattttttagaagtatatttctcaaaaaaaaatctaaatttcacaagaaatttatataaattctcaaaatatgaaaaaaaatgtaaataaaagtcccgatttttgttcgcaaacacaaaaaagaaagtgtttttcctactaattaggctatggagaatccaggaaaaaaaatgtatttacataaaaaaagaatccctgttaattataattaaatttttaaataattacccaattaccattcttctcattaattacttatttacctcgctaattaatttaattgcccatttaaatcatccttaattaatttaattacccaattaccttctcctccttttatttctccgagttttgtttttaaactgaagtaaattttggccaatttcgcgtcttcccgttcttcgattgcttcacatttttctatcactttggccatcgtttcgttttggtcctccaatttttggataaactcgcgcaattccccagtgccatcattttctgccaatttttgctcataaatttggcggtcgatcaataccaaatttttgggctttgattttatcacggaaaaaattggttggggaaaagcaatggaacacacaaaaaagacaattgccagcaacattttaagcaactaaaagaatgtgtttttaggctataatttcggtggtggcgatgggatttgctgggcaaaaaatttggaattttgattaaattatatttgaccaaatcgatgtattaaacgattggaaaagtatatcaaataaaacttattctttttgaaagaaaattatggtgacattaaaacaaatgcattaataggtttaaaaaccgaattaaagccttaattagagaattaataaaatttttgagcagttgaaaacaaatgataaattgtgaataaaaattaattgaaacttttttaaatatgcaaagatttacgcaaaaaaaagaaacagagatgacgaactatgacaaattttaatgtcataaaaacaggatatccggctaaattattatcctaacattatttattttatatacctatatattttttgttatttgcattattaattagtgggctatttctccagcaccgccggacgcaattaagtgctttttaaaaacagactctattcaatgttcgattttttttcgatgtcggaattgcttggaggcaataaaaaatgcctctaaacatctgatttgttgaaaaaaatgaaattttagcttttcccaactacaaatttcctttcgaaaaatttcagaccggagctctatatgtttcataaacgtaccaatttcacatttaatgaattaatttttataaaataattcataaatcacttttctctacgattttggaaattatccaaaaatgaaattctcgggggaataattgtcaattaattctccccatgggtcggtcggtggtgtttccttttcgccatttaatttttccctccccaatctgaacggaataagcgattaaaaaatcacgggactaacttaaagattttggagtgcggacgattgaattgtgattttgtggcttggggaccaattttttttttaatattaatcaatgattaataatcatagacggaaaagggttggaaacaataaaagtttatttttaaataaaaattgtaatttttatttatttttttatattattttaaaatgtgatttttatttgttaagtaccaattttttgaaatattttgaaataacaaaatttagctgacttttataaaacataaaaaaatgcttccccctgtgccggagagtgagaagagaga

SEQ ID NO: 8041 - DNA, 1033 bp, Heterodera glycines
tttattaattaggtgtcggtattgtcaaaaactgctttttaaaaggtttttaccactcttcttttttctaaataattaaaatgaaattcttcgaattttcatcgcgaatacggcaattttcctttcatttttcatccattatcgcatcaacaccttttgatgatgcctttttcactcttttttgtccaaaccgccgaagaaaatcgcccgcgggcaaattcccactttttgttttttgtcaacagtttttgccgctgacaaaagcatttcccccccccccccccctcctaatgcatcaccattaagttggcaaaattgctgagtgctatcactttcggcaatgtttctgaagagatgtgagcatttttattttttatttttgctttttctttttattttcgccattttttgaaaatattataaattaaaattcctcattttctccttttcacatataaaaattttactcatacaaattgcctaacaattaagcattttctcggctcgggcgagactgatttgtctcgcatatcgctccacaaaatctcccaccccccaaaagtttgtttacccaacaaccatcaaaacatgggacgtcacccccatataagtcataaaaaagcattaaaagattttatctcggacatatatatgtttcttgctcaaatcaacaaaaggcattgggggtcatcatcatcatcataatgatcataatcagagaatggatgggtcaaataaagttacgcctttttggcactcgctcttgctacgatcactcatacttcagcccactcttcttattattattggctcgttcaacccccccccccccttctcatgatgatcgtcgtcgtcttctgccccttttatctaatcccctccctcacccccccaccaattctcgactctcgacccacatccgattattatttttgcgcggcattggcggccggcgtttcggtgccaatcttctcgacttacgccttcttcgtcccccctccggggattacccagcggcttatccgccaccctc

SEQ ID NO: 8042 - DNA, 3754 bp, Heterodera glycines
  unsure (1)..(3754): unsure at all n locations
aaatcactattttggcgttttgtcactattttttcactattttgacatttttgggcaaaattccttaacagaaatgcaataaaaccaaaaaatacacccctaagaatcgacctaaaaaattttcaaaaaaatacacccctaagaatcgagcaaaaatttttcaaaatatactcctatgaaatgaaaaaaaattttctcaaaaatttactttcttggcaaaaatttttaatttaaaaaaattttttatgtaactattttgggtttttttggtcttaaaaataccagtccaactcatttgcaactgcaaatagtgaataaaaattagttttgctcaatttttggctgaaaattatgtcactattcgtcactatttcggactttttatcactatttcttcactatttcggcatttttactcactattttagttaactattttgggatttttcgtcactaaaattcacagccctaataattagttagtcaaaaagacattaatttggatgacatttatttgaatttctccaattacatttaccattaaattctaacacttaaaaaatgcccaatttgataaataaagcgtcccaaatttattataacgattgatgctaattttttattttttanataaatttctanatttacaaattcatttgccgtttaaatgatgtaggtgattcatcacatccccttctccgttttacaccccgttttttgatcctttctcatccaccaaagtcccaagtccagcagtagtcattcgctttcacagttcatcacgagtgttgttgttttgtggccaattcaaaggccatcatttttcgttgtcctgtgactgaatcgaaaacagcagaagttcgtttttatccgccgtccatatatttattattgaccattcatttaacaaaataaatggtggggaagcatcttttttccggtgtaatttgctttaagtcaatcccctcggggttggcgctttcgaaacccaatccaaccgccgctgacaaattgaaacattctttctgtttcattttttaaaaattacagattaaacaaattattttaaatccattaaccccccccccccctccgtattttctgctgggtgtttttaatggaagcccacaatgaagacatcgactttcaaatccctttttgttaagcgcctctccgccccctccacctccctttcaatccaattcaatgatcctttggcatttttttcatttattttgcttaaatgttgtctcccaaccttttcgtttctcattgaaagtctttgccgccatttcaacaacaacaaactccttcccttttttctgcacaattaccgttactctctctccgatcaacaatatgccatatcaattgggcaaaaaaaaacggggggattttccatcaccacctccgccatcacattgtcaagcagcacattggtggtggtgaataatgaatgattgctgtgctgcctggcgatgaatgaacaaaactgactaattcagccaagtgttagcggcgaatgcattcattacacaataaaaaagtgaagtcggcggacggggcgatagccccccggggccatcccaacgcatcggtcggcggacggtggtgatttgctctgcttttgctttttcgccaccgtttggttggctccgcgtcgtaaaagaaagtgattcgttttttgtccataagcggcggttgttccccccccccccccaaaaaaaagtgctgctgctgaagctttcttatttctttctctatcattcatcacattttccgggatggaccaatgatgctcggctcgctccgccccaggcgttttttcttccgtgttttttcaacggcaacatttttttgttgttgattaaaataaaattttttgatagacattttttgatttttcatttttgaaaaaatattttttgactttttaattttttgcttaggcgacttatgtacaacatttgtatggtttgtgatttcaaaaaaaaaaaacaaaatgatattgttttgggtaattttcattaatttgaacacaattttaaacatagattccctcttcaacccatcctccgccctccgaaaactaatttttattattttttaaattcattaaattagttaatccattatttattaattcattagtatgattgaatgtttgaaaattgtttctttgtttctgctgtactttgcctgctccgtcgttcattatttaagccccccgaaaattcaaatgaccaaaaattttggatcatttccattcattcattccaacagatggaggacctaaattgacaacaaatcacccattaatcctcgacttttttttcctcttaaactttgggatgtcaacccccgaaattttttttgtgttcgtttgagggtcatcaaattttgccgatggcaaatttttttggtgccaaaatttttgattatttgtcattcatctgtattagttttatttggaacgttcatctatgttcataatttttattacagaatattttccctttcaaagtgaaattcaaaaagtaccttataaatttgaataattttcaagaattttcataaattaaataaaaaaatttatttctttttattaccactgtcctctcgaatttcattaaacttaaataaacattttccggcattgtctattgtcatcgctggacccttcctaattataaaaataaattaaagcggtgcaaaattttcgttcacaattaaaacagcaaaaggttgccgacacaaaatacactttctctatctccatcaatttcttttgtcaattaatttaatttaaaattgaaaaataattatgtttaactaatttaattatttctccatttaagataacatcaagtatttttttgcaaatattttacaataaatttgttcccattttctgcccattttgctgctgctcccagcaatgaacagcttcatcttctgcttttccgttccactccatcgctttaccatcggcaacattttgctgctgttgttgctcatcgtttcttcagcgcatggggcgcaacggattgtggaggagccggaggatacggtggcacgggttggcgatacggtacaactgcggtgtcgcgttgcggaccaggtgaacaaattaattattcattttttgtatttattattcaatattattttgattttttgtaaaaaaaagtggtagtctttcaattaattaaaaatttaataatttttttcattacattacttttttaaatttggataagtaccgacagaaaaattctgagaactccatcacatttttgaacccaataaaaattagagcaattattttctaaaaatgtcatttttttgattttaattaaatttttttaaatccacaaaaatctaaacattttttttcaacataaaactctatcaaagatgaaatcaattagaaaaaactttctgatccacaaaaagcacaaaatcaatccatcttttccgcctttttatcggcatgattcaaaaaataaagaaaaccaataatggcataatatttttatacgcaaaaagaagaaattaatcgttttgcgggcactttttgtgtctccagtctctccccccccctataaatggcatttggcttctacatttttttgtggtggacattaggcggcagcagatggacatgctgataagttcccccatttcgcgttacacaattggcattggcacacagcaaatccgcccatttatacggcggacggagagggacgga

SEQ ID NO: 8043 - DNA, 1324 bp, Heterodera glycines
  unsure (1)..(1324): unsure at all n locations
gacgtacgattttaaacaaatttaaattattatttttttaaaatttaaaattgacgcaaaaattactgttcccagtaccgtatgtcttttacagttttgtgcccagccaagcggagaatggtcgttggatggtctgtttggcggcacacgaattgtacgggcacgagtcgcgcagtgccagcattcagttggatgtgctgtacgcgccaaaagtgcgcattgaaaccatcccggaggccagtcaggtgcaattttgaaatttggaaaatgtaaaaatttttgttttgggtcggtcgtccgagtcatttttaaaatttctaaaaaacttttggattcattcttcaatttataccggcaaaagttggccgaacaataataatgtcaattatatttcctttttgcctaaataattatgtttttctcttatgaagcaaaatattaattaaatttatataagcaaaattttcatttattagaaattacagatttacgaaggcgggtacatccgattgcattgtgccaccgatgcacgtccgaatgatgttaaattgcgctggagttgggacggcgagcccagacggttggaggtggtggacgcgcaggtaaattattaattagtgaattaatttaaatagcaatcataaaataaacaatacaaatctaaaatcattggttgttaatacctaagaatttataatgtttatgaatttttatcaaagcttcacagatctgaggacaaaacgcattttgtggttttaatgagtcagggagggtttttttctattttgaaatgaggatctgttattttattttataatagattagggagttttcgctgattatttttaaaatatttccaaacatggttttctttaaagattgattttttgatgatttaaaaaaaaattggtaatcttatcgattttccaaactttgatcgcttttatctgatcaatatgggtgtgggaaaaagccaaaggttttcagaagtaatcgaggaaattttgctgcaatttcacgaatcacctaaaattttcaattatttttctggaattacaaatctatttatattaaatatttcatcaattaatattatttattaaaaattgaaattattataataaagcattttttaatttaagaatgttctgattaacggactacgattcaacgacaatggacgtcgtgtgacgtgcacagcggagaacaccatcgatgttggcaccggcgtgttcgagttggacgtgccatgtacaaacaattatttgtttattttttattattanaattttagatggaccccgcttcatgtcaccaatcagtc

SEQ ID NO: 8044 - DNA, 4336 bp, Heterodera glycines
cctccgtcctccagggcatcggtgacttgttcgtggacaccaacgacgagttttgccaattgggtcacattttgcaacggcttcttcattggctggccgtcgacccgtcctcttttgaacaggcctatgttcctctttgtctacccaaactgcttggcccttttgtgcgtcttcaacttgtcgactggcgaccgctgaaggtatttttttatttcataataatattgggttaatctcaaattattgtcgaataaattgaaaaaatctcaatgagtattgctttatcttattttaatagtctcatctgtcctaacaaaatggcaccacaaattttaatgaagaaatgatttggaatgggacttttgctttaaagataaattacgttaggctattagatgactttataaaacctgatgtgagattcctaggcctaaaccaatttaaaatgaaaactttttctcaggccaaactttttgagattttttcgtaattatgagacaactgaatagcagaataagttaatattttctctattagggacacaccaataattagtacgactgtttacttttgccccttttctttgccaggaatcaccaacccaacggcctttgtatcgcatgccctggtaccgtgcgctgctgatggccggcctggacaactcgggactggaggaccttgaacatccgtcgctcgtgtctctgatcccgtccgttgtggaaaagattgtttttccaaaaattgcaagtatacttttaggactatccaattttagacgcccctctttttgtctgttgaccatttcccaaatgtggtcaaaaaaaaccattggaaaacccatgcataaatattatgccaaaaaatcaaaattttcgcaactcatttcttgttcgccatgccattctcaatatttagaaattgtccgcgagcaatgggacccgttgtcgctgcatgagtcttccaacttagctcaattgctgcgttcactggtcgaggaatacccagtaaatttctgtcggcttatttgcaagatcataaccttggaatcgagtcccccgagatgtttccttattacgatttttttggttttagaattttggcttttcaattagtggtctgatggtttcatcaacgacatcgtgcaaaatcttttaatggattaaaaaatcctttttttcaaaggtggccaacgcaagctcgaaacgaatgcaagaactgcttgagggtgtttatgctcggttacgtgacactattgaccgcgacacttttgtgccgttgtacagcaaagagttacatcacattaaaaaccaattttttttatttttaccgatttttaagagccattgaatccactgagacggggtgtggcgcttttttggatcggcaattttggaagtctatcaaagtgagttgaatattttggatcaacttttcataaatcaatggggcggtggagagcgagctgcttcccaaatctgtgctacctttatatggcagttatttgttttagttgatgcgctccatcctctgcttccgctccattctctccgacgcgtgtctggaggaattggtcgtcgaaggactgcttaaccgtttcactgtgttggcactgcaattctcagtgttgggccaccagtcgacgctgaccaaatgtcgggcagtgatcggacaaattccggtgtcatcatttcatttttttcatctctaatttctgctttcgcttttagtcctcctggttgcccccctctcggcccagctcctaccgtcctttagccgctcttttaaaacaagttgttgaaatacaccgtcgggatcggtcggaaagaaattattatttttatttgtttttatttcatcaatttatttagcaaatttctcgcgcagtcccaacgtttcattgatcttttaacagtaaaggaagaagcagaagaagttgaggaggactgatgtgaaaaccccattgatggacattggatgattggaggacaaaacaaattttatttttaaataaatgatttttgtttaattccaaatcttctataatttattatatctcattcttactgttagttaaaattttcagctaagtcagtaaaaatgatcattttgctgggtcaggattccatcagaatttccagttccaggttttttcggacagaacactggggaggccaagtttcaagtcctggccatttggactgaatctagcgggacaaagggtaatagtttagatggtacccccccttttttaaaaattttttcaactttcaaaaaatcataaaaacatgttcgggatcgctgatcacgaatccgacatccatttcgaccgattccgaacccctgacccggattcgaacaaaataaaaaaattgattttttaacaaaattcacatttattgctaaaaatcgattcaaatgcacgaaaaagaaaataatcaatgttcgcatggataaaactcagagacatgcaaccaaaaattgtaaaacgcattttcacggtctccaaaacgctgacgccaaataaattctgggaaataggtgtcgtatgtttcagtcttgttcccaaactgctttttttattttgttcgaatccgggtcaggggttcggaatcggtcgaaatggatgtcggattcgtgatcagcgaccccgaaaacccctagaacatgtttttatgattttttgaaagttgaaaaaaatttttaaaaaagggggtgtaccatctaaactattaccgaaataaataaacagcaagaaaaggcaaacaaaaataattcggcattaattaatgtgtccgttctgttgtctgtcatcaccgcttggcttttgcttttgatcacttccgcttcaaccatttcggcagttctgaactcggcttcgttgttcgttgactgttgtttctgctttgactgttcgtgccaccgccgccactgtcgtgtggtgccgacgaggaaggcatcaccggacttggcattgctgctgctgttgcagttgaattgtctgtggagggcaacatgtgcaaaatggtgtccaaatagggacggaattcggtgtttgacgacagcctaaaatgagaaaaaagttttaagaatgcggaagtaaactaattgtaagcaatgaagcgttaagtggctatttttgagggtatcattaaatttggacttggagtggagttggccaagtgaacaaaaattgtactagttttgtctaatttttgattttaattatcaaaatcgtttattgccaatacacaaattcaattgaatcgacgtggcagaaatttaagcaagagcccaaagagagatttgacaaccacagatcatttttccaaatactttctgattttttgggacggaagaaattttggaggctcggacattttttaaattatggtcataaatcgctgaatttttcaaataaccatttcgaacaaatacataaagtggatccaaaccaaattagtacccataacataacgattatacaattttaaggagaataaatccatgttgaactttaccatttttgagcttcggcctttgcttccgtttgtgtgcagctttgaaaactgtcgaccacaaaaatttggtcggcgttcatttgctcaggtgattccggtgaattgtcggccgccacaattttcaaaatgagcacacttttcggcgtaatgcccgcgtccaacagcgaagtggtcgagtcgtctgatttcaattttccactggtggtcggaatttggcgcaattcgaaacgaatcgttggcgaaatgatttggcgcaggaaaatgaacagtgccgaaactgaatttctccattttgtttaatttgataaattggaacatgggattgggacaaaaggccaattagcaaaaacctggttcggtggagaggaattgcgcctgtaaaatttgaccattgttcaggcgaaagcgcacaatcgaatgtttgtacgccttgtgcttcagctgttggtccctctctttcatcagtttggttggcaacagcgaattctgtcttttgctggaagaatatgccaatttatggaccaaaatattcaattgaaaaacaagtcggaactctcctctttctttacctctcatcctgcaacgctttgagcattttgcgcaagtcttcggccgtcagttcatagaattggtcgtcctcctcctccgccgcattttgttgctgttgaacttccgccggtgccgctgggtcgaataaaagcgcatttcgcgggacggtggacgaaactgggagggaaggcgaggatgaggagggaccaacggcactgtgatcagtttgatccattgattgttgaataaaatatgaaaacactgattga

SEQ ID NO: 8045 - DNA, 2463 bp, Heterodera glycines
tttttgtgcaactccgcaccatcgtgctgttgttgttggattgcgtcgcgtgcacattcccacgcgtggcaaatcgggtcggacggctgctgaacaccaagcgtgaactgctccggcatcatggaacgcaattcctgctcactgccaattagcaaaaaataaaaattgaaataaagggctaagaaacaattttttattattgagtttgtccccgcccttttttgaaaacgttcaaaaattttaatttcataaaaacaagtttcctgtggtttttagaggtcgctgatcacgaaaccggcgtccattttgaccgattccaaactccgggtccgaattcgaacactaagtcgaaagttcaattttcgtttttgagttctaaatcggtttactgaaaaccaacaattctgcaataaaaaaagaaatttcgaaattcaacaatttgaatgaatttgatcggaatcagttgaattggtgaacctcggaaaccggcgttttttattcttttcggagcccccgattcggcgccagcccaagttttcggactataactttttttagtctaaaccaaatctaatatagttggtatcattcgaagtcttaacatgttttgaagcttttctaaggtattgctttacgattagacaaataccaaaaaagttatacatgaaaatttcaaaaaagtcaaaatttttgaagttttttcttaataattttttaaaggctagaatttttttggtttttttttgtaaggctagtagagcatgtgaaggactttcgaatgataccaagtttgtttgatttggcttacaaagaaaaaagttatacccaaaaaacatgggctggcgccgaaacgacctagtctgtgattctaagcctattttggtcatttttatggcattttgtgcctatttcactttttacgaagaatttttttccaaaaaataaccattaaaaattttatttacatatttgaggatttttgtacatatttcatacatattttagcattttttatacataaacaagtgatgaaaatagactttcaactaaataaattaataccgtattgcactttttataatttatccactgtagattcgaaataaaatatcctatcttcaataagaaagaaaaaatgatcaaggacaacagagatcaatcactaaattcggaagtatattttgaaataagaaaaatccgattttccaaatgaagagacaaaccgagaggttaaaaaaaggtaaaaggcattaaactaatcaaagaatgagcaaaatcataaaaaagaatggcaaattaaatgttattttgtgcgattggtacgattgtttccatttgcttcattttggagcttgcttttcattgcactcgcttcaactcgaatttgcatgaacagtccacgcgcagaatgaacgggccctcctgcccagcgacaaaagtcatcggccgaatggaataagtgccggccggcagctcatccaattggagaacggtgaagccaggcctggaaaacggaatgacaatattgtgccgacagtctttgggatgataacaaaacagctgaattacctgaacggtcccgagtcttttgtctcaaaagtccggtcatttctggtcagagacaccggtgcgagttcgaagccgacactgaactccttgggaccgcgcaattccaccagcagagcattgtcatcactgccgtcttccgtacacaggtgaaagaggggattgtttctgcagaaatcaatgtttgttgattaatggttggcgattcttttgattggtttaaaaaaaattgataaagctgctcgagaggaggatcgctctttagtctcgagaaatcccggatttataatcagttttgagaaagtccaattatgagcaacgcgcttaaggtaaagtttgccaatttgctcactgaaatgtctctctgctcgccccgtttccacatccgcctgcagttgggccacgccattccgccgcttccttaaaatttactttcaattttttcaatgaaatttgtttccttaacccactttgcggtggaatttgtacggcattggcatattaccgcaacgaaaatctgcgctcgaatacacccgcaaactgtagtaaatggtcttcatcttttcatactgtaaaagaaaatattgggagagatggatatggtaaactaaattaatattaaaataaattaatatatgatatttgtacttgcgcaatgacaagcgtaaagcgttgaatgccaggctcacggacaatcagttgacaaagataatggggactaattgaaatggacaaattaaaaaagggacagaatgatccaggcagaggcacctgttgatgcgagtgccctccaaaattggcttggggtcaactgaaaacggattagaatatcgggtaatgtaaattaaagcagccgaacgcacatggcaaatagacgcgcttcccatcatttttgta

SEQ ID NO: 8046 - DNA, 1694 bp, Heterodera glycines
  unsure (1)..(1694): unsure at all n locations
tcccgccgtggtcgctancccccggaagagttcgtccgctgtcgttggcgttgctcagcgattccgtgccgcagctctccgctcccatttcacttatgcatggcgacgttccgttcgaatgtgaaggcagcaacaaacaatcgcccgcattggcaacagtgccattcccttcgatcactttgatctctccgacgatcactgctacgtttgctcctagtgatccactgttgtttttgatctgagtgtacggcgaggccatcggcgcgtagcgcgaacttcggtgggccatccgcgagtgggagaggcggtggcgagtgtagcagttgtgcagcacggactgcacctcacgattggtgaagcagtagatgatggctgaaaaggaaggtgatccgatccggaaactcaaaaagccttcgtaccgatcataaaaccctggtacatgtaggacagcgaggcacagtaagtccaaatggcaaagtactgtaaaagagagtaatcttagcggtgagtgtgggaggggggtgggtactgtaatgttctcttgagtgggcgagaaagggatggtctgcataatgttggggatgcccagcagagggatcagcatcagagcagccttcacggactttcttaagtggcggaatggaaaagcgaagaaaattaattaaattggaaaatttgaaaatgaaagcgaaagactaaggaaaaggcacattcaaagaatatttaagcccttctaattctgtcctgcccattactcacttcattcggccaatttcgctgctcgactgttgcgagtcgcgcactttcagccaaagaacccgtataacgttgaaaatgaaaaaggcgttcagctgaagagtaccgtatgttcttatttgagtatacagtattttttaagtgatactgtaacgataagcacagtaagtgtaagtcccaccacaagttgaagcagccggggtccgtccaaaatccaaaattccgtctccaaataatatgagccaagacatctctccaactgtccgtgtttcttcaccagaagcacaattagccaacagaaagtgtgggccaagggaacaccttaggagaagggaaaggccaaaagtgagaagacaaagcgagaagagagaacgatggccaattcaattttatggacattttcacatgagacgaaatgccaaaaaagggaatttgaatggggagaaaaatacggaaaaagcaaaggaattggagcaaattggcaaagaaactctcggcaagataaattgggaaaaaggaaatccgagtcatatgaaaagcgcagaaaacagacactctcctcagaatggactgaaacacttttccacggggactgaattgagccggcatgccgagaaaagacaatttagagaacaattagagaataagtgggaacatttgtggaagattttactgccctgctgacaatcagcagaaggatttgtccatcatagaaacgagtaagagtcacattaagagttactgtggaaagaacctaccgtatgctgtgatcagatagggccaaagttttggcgttttgttgaaaaaggcaaaaacgagaagattatgtaggtaaaggccctgaaaatggggaggaaaagtattaatgaaatgggaaagagaggaaggagaaacgacctcaagaaacatccaccaaaaagcgacggatttgaagtact

SEQ ID NO: 8047 - DNA, 1832 bp, Heterodera glycines
  unsure (1)..(1832): unsure at all n locations
atccaccaaaaagcgacggatttgaagtactccaagaccatttaagtcagctcacagacgaacacctcaaaaagggacaactttaaacagnnccaaaggcangancancaannatnanaanagngancaacccccccccccccccccncaaaagaacgancagcaaaacanccacccgagggggaaaaaacatacagancagaccccaggccacataacgatgatcagcatcgttctgccttccaatgattatgactgaccatagtgttgatcgttttcccgtgcggattgaccaattgttggtggcccattcggtcggtgaaaatgaggtcaatgtaaaggacgagacgaatgagaacgacggcgagcagtgcgaccatcaaatggaggtgaattaagttgcgaaatacacgtaaacgcctaaaaaggggaaataataaaataggcaattaattaaaagggaccgaaacaaggagaaaatggcgacactgaagaaaagtgagatcagagaaaggccgagcccgacgaactccaatttgcgcacgttttttgccacttcttgtgccatctgacaaggaaaaagaccaattgaaaaattttgttaaaatcaccagaagagtgccattgtccatgttctgcataatggccacgacctgaagaacggacaaatcagtcgctgatcagaaaaataaaggccaaaggagcaaatgccaattaatgaaagtgcctgcctcttgagtaaaacacattgtgaagtttgtccagccatgcggacgggaaaaatcgtcctccgttttgcccatccattggccggacggatgacagaatttggtgatggactctgacaaattaatcagggattagtctgctggatggcattggccacttctcccccccaaggcaatgccaaacgaaatgactcactggtggtgtccaatcccttgagaggagggcaccttaaaaaacaatgccataatcatccgactcatatgaaagcacaatacctgagggacaccgattgacctccggggatcgcgggcctaaaacaagcaaaatgaatgatggaactgagggggagcggaaaagagtgactttattcaaccaaaccaaaacccattcattggcacagtcagtccaaatgatcggttttggctgatcggatatgcttttcgtcactgttcgtcctaccagcataaaacggtgtcccaagttgcgttacaccatggcattccgtcttcgcttggctctgcactgatgggaaggccggaatttttgagggcgtcaaaacatctgaggaaaagcgaaagtcagagaaagcatcgcagtgcaaacgaactgctccatgctttcggccaaactgaactgaaggcccctaagccaaatgtttgaagtgttggacagcagaaaagtggccacgacttcggaatccgacagatcgtcggcatcctccgagtaggcaatcatggacattaagctgaacagcaaaagaaattggcaattgaatggcccctcccccaaatcaaatggcattttcgaaacagagtaaagcgggacagaagccaaaggtaaagcaaatttatgccaaagtgccccaagtaacggaggggggggggcggcgaaaaaccatccatcaaattgtgacatgaagcggataatcccaaaagtctctcaaccgattttctttttccccgcaaataattcaattgcgattctttttttccagtagaagaacagaaagcgggaagagctttcatcggttttcctaatttgaaatgcccccaaaaggcactcaaaggaattggaaacttaggaaaagcaaatcaaaaaaagga

SEQ ID NO: 8048 - DNA, 2396 bp, Heterodera glycines
aaaagaagccgcaaaaggacaaactatcgaaagcgggagccaaagagacaagagagaaaagttggaagagaagccaaaaagaaaagaaagagcggggaaagggggagggagtgatggatagggccaaaggataagcaaagggaggggcaaaggaaataatgaaaggggcagcagatcgaacacaaagccacgcattttgattaatcattcttcagcacaagcttaatccatgcccaagttactagaatttgtttgctttttaatttcgtttccattgttttgccattcaattgaaaaattccatcgcgaatttttgctaacaaaggaaggtcatcagcaggtatccatagagtttcggtataaaattctgttttatttattaaatggcattttgggtttcagcattcgttctcatccctcaaaaaaagaaagtactcaaatggtgctcaatccacccacaaaaattcataccgaacccccacggacacctgctgctgctggggggacctttctttgtaaattgccgaagggattggaaatgaaattgaaaatgggaggaaagatcgacgaacacccgaaaataaagctttaggggtcaaatatcactcagtttatttgttaagtgggccaaattgagcgaaaagcattgaataggcacagattaaatgacaaacgaattaaacgaacggacagttgccaaaaggaaaccaatgtggacaaatcccatcattgaataaatgaatgaaagcatcatcatctttcagtgttcatgttctgttccccgccccacccccaggggagaggtgaaagggacacgtgccatggatgaaaactgaatggacatatcccttggcagcacgtacccaggacggggaaactccacaagaaaatagagcattatcggaataaaattctccatttggtccctctctttctcctccttaggtggcccagtacgtctcccgcccctgcccctctccctccaaccaaccttttttgccatttccatcaccatcttcagcagaatgtgtttataaatgttgtttctgttgctgctccgttttttgttcgtttttaagcgtaaaaataaaataaaaaaatttccgcagcacttttgacaaatgaaaagaagaaacagtgaatattggctgatgcagcagaaaatcttaaccttttgattaactgattggtctggggcggaatttgttattttgcaaatggtttgggaagcgccgcgaggggaggggggggggacggagggataaacacgtggggtgaaggatggcacggcacacaaagcaaagatgacataatccgaggattaacgagtgcaacacatcagcggaagtgcagcagaaacagcggagcaatacgaaaaagcgaatattttctttccgtcattttttggttttgaataatcgaaaaaagagggggagaacaaaaggttcaaagaagaagatgcaacgtgaagggatcgccgttccttaaatcattggccgttaatgggccaattctgcgactgaatgggtgaaaaagcgtcgcccgccattccttcgccattctttcgccattccttcgccattctttcgccattccttcgccattctttcgccattccttcgtccgtccctcccccccccccccacccgaatttgccccttctcaactataaatctttctcactgaacaattatcacatggttagagaaaatcaaccggcaattgttgagaatgggtggccaataattgcaatgggccaatggcaccaattccgccgggggggacttttgcggaccatcgacagtctgccaaattaaattttggcaaagtgtaaattaaagttcgttcagaaagaaaaaggcacagaaaaagaatgggaagaaaagagaaagtgtggggaagaattattttgttatggttcgaatagaaattaagcgaaagtttggggagaagcagcggaagattcaacgaaagtcataagcaaaggcacaatttcggcggactttgagtgcttttacttaaggaacagcgaattgggttatcggaagtgttcgtcggtcgcctcggcacagaaaaaagggtttaaaggacgtaaacaaacaaaaatggactttttatatgagaaataaaacttagcaaattgtgaaccaaaaaaacggaaattagccctaaaacgacgaattggcaattaattgccttctcatggatgcgattctgaggcaattgttaaaaaggatatttatccacttaatttttcaaataataaaattaaattaaaaatgtttactcaaaattggccaaatttaaataagcctatgtcgaaaatgcatcaatttatcacttcgattacgaacgttttatagtctgtgggacaaattacaattaaatttgtgaga

SEQ ID NO: 8049 - DNA, 953 bp, Heterodera glycines
ttcaatcagaaagtgtctcgtatttccattttttaatatatttttttttcggcattcgattagcgaaaatgggcatcatttttgttggtgaatggggttggaaagagtgaattttgtttataaaaatttaaatttttaaaattttttttactttatttatatccttcctcccctcgccgtttcgcaggtgttgcaagagtgtgtttccacgaaaacgggtgctccattcgcgcaccattcgcattgggcatggtccggtgtgcacgggcggctacacattcccaccaaatgtgatatgcaaccgcaagtacaacatgttcacatttgtgcccatggtaactttgggaagggaagggctacaaattttaaattaataaaataataacaatggacaagcacaagcaatgcttattcttacataatcgaccacatcatcacaaagtgccaatttcaacaggactttgtgccaatctttttggaataagcacaaaaagttactatttttaacggattaatttcgggatagcaaatgccaggaaaaggtactttgagcagaaagatgtgcccaagggattctttgccttttcgggcggggggggggagggagggaatgccatgcaaatgacgggaagaagcggcggtgaagccggaaaacagaggaggaaaagcggaattggcctcccaacaatgaatgattatttgcatccggagaacagctgagaatgaatggggtggccaaaaagtcagtcgcaggcaaaaccaagtgccaaagaaagtaaacggaaaaaacaaaacaaaattggactaacgaagtacggcatggaaatggcatcagtgacagacatcggcaaatgaatgaaaggacggacagtgagggacgaacgattggaggaggtcgaggagagggggcaaaagtaatggcaaattgggaaaatgaaaggacaatggggagg

SEQ ID NO: 8050 - DNA, 1552 bp, Heterodera glycines
gcaatttcgagcatatttcatttttttacatatttagagatttgagaaatttatagaaattttttatgaaaaataaaaatttttatgaaatgtatccctaaaaatatgaaaaaaattaagcttaaaatactacaaggtgattctaagcctacttaggtcattttatggcatttttgcctatttcaccgtttgcaagaattttttttccaaaaaatgatcaattttaattacatattttcgtaggatttttgtatatatttatatattccggggttttttcttatccatattttgtaaattttattacataacattcccatccctattaataatagataacgccgcgtcgttcatttttaaaattaaactatttcttcatattttagaccaaattttaacttcttttttttggaaattttttaaagccgtcatcataagaaacacaggctaaacccaattttataaggctaaaatcaattttacatattatttaaaaaaagaataagagtagtccctgtttaattgtatttgttgtataaatatgttttttaatttttcgattcctttttttcattaaaaatatttttcctaccaatataaataaattatttgaatttaagaaaatgtcatgtaaaataaattttggcctaaagagcagattgaagaaatattgataatattttatttgctaaattttttattttgggctaataaaattagagaccggaaatttcaaatttgcagatcccgctgcgggactggaactcaaaattttttgcgggactggatcccgcgggattaatcccgcaaatcccgcatttaaaatttgcgggatcccgtgcgggattgcgggattttggaaaatcgaaaaaatttcaattaaattcaaagaatttccaaaaatcaaaaaatgctgaaaaataaatttttaagggctggcgggatgcattaaaaggggctgattggtcgactaagatttttcgattggatccgacggtaaaaagttgatcggaaatcaaattattaatggttcataaatttgactatttttttcttttcaaaaccacttttttgcgccgtaagaaatcggaaatttttcaaaaaatatacaatataataataaaaatttctaaatattttaataggctaaattttttaattcttaaccaagtaaaaggtatttcacaaatgtttttagtattatattcgcttgaaaaaattattcaattattttatcaaaatcttttttgtcatttttcattattttagaacatttttgggaaaaggagtgactatttacacgttttttacagcgcgattttttcaaaaaactttttgggaacttggaggagggtacagcggtgccgataggcgccgccgggaaaatttcacaaattttgaatgaaatttgcgatgaaaaatgaggtaactttaattaaaattatttattttaatttatttaaaaatatttggcgatttcggtcttaaaaaaaaattttccaaaaaaatcaataaaatccccgcataatccccgcacaaaaaaatcaaattt

SEQ ID NO: 8051 - DNA, 3441 bp, Heterodera glycines
tgaaaagatttgcaaaaatacatggaaagaaattaatttggattaaaaatgggggaaatgggaatagaaagcaattttttccgattcggcgccgccgggaaattttttgaaaattctatatgaaatttacgatgaaaatgagtcaattttaattaaatttattatttaatttatttaaaaatatttggtattgtcttagaaaaattttcaaaaaaatcaataaaatcccgcataatcccgcacaaaaagtcaaatttgcggatcccgctgcgggattggaactcaaaattctttatgggacgggatctcgcgggattaatcccgcaaatcccgcattttccaaaaaatgcgggattgcggactgggatcccgcaaaatcccgcgcgggatcccgtcccgcgccggtctctaaataaaattattttaatgccaaaaaaaatcatttttttaaataaatttaatattattttatatagatttaaatctaaaaaaacctaaaaattaaggaatttgtggggaatcgcataaaaaaaactttgcagaccagcagaaattgtggacatttacttccgctccatttttaaaattaaaatttggcaattattgccaaatttttagcaatttttattttagaaattctctttagtcatcatcataagactaactcaggcaaacgatcaatttaatctatttttagctgctatatgctatagcaaatgacgttaaagccccaatcttaattttttttttattcatacaaatattaataaataaagataaaagtaataatgcctgtttaattgtatttgtagaaaaatatatagaaatatatatttttcgatttccttttttattattaaacaatattttttattaccataaattattaggaatttaagaaaatgcatataaaactaaaatttccaactttaccaatgccactggtacttttggccataaatattgtcatcatttcggcatggcaatttgagagtgaaactatgaaaaggggtataaaaaaaatttattttttaattatctaattagcataatttatccaaaaaattccactcaagatggtgatggcacttcttctcggcatggcatcgctttttccaattcgtcgtcaactgcacttgacacaacgacaaacgatgttggcatattacacattatttagttttcaacgagaatagaacgggaccggaatcggtccgggaattcccggttttcccatggcccggtttttattaaaaaaaattctaaaaattcccggcttcaacttttttcgtgccaaaaatggttttttttttttggaaaattcttcaacatatgagattgccttttatggttattggacagttttttttcttaaatttagacacaaaaaaacggtgctaaattttatggaagcaaaactttttggctacttataattttgggcttttacgcgtccttttttcaagaacactatttgacggacttgctcagttgggccggcacgggttgggctccagcatttccactataactttttttctctgtcttccaaatccaacatttttggtatcattcgaaagctcttcgcatgctctattagccaaacaaaaagcgaaaagatttttcaagcctggaaaaaattattaagaaaaaacttcaaaaatttcgacttttcgtaattgtctaagctcgaaaaaatggcttaggaaaagcatctaaacatgttaagcttcagaatgataccaacaatgttggatttagatgacaagaaaaaagttatagtggaaaatcatgctggcgcccatccgtgagcgcccaacagaggtaaaccgtcattctttattacttttcttagaaacgaccaaattccactttcttggcatcattcggctgccttaagtgttcgttcttctattagcttgcaaaattaaaaaaaaaatttattaagtttccaaaaattattgccagaaaaattcaaaaaaccggattttcgaacatttttggccataattttttgaaactcagttaacttttttgaaattttgcaggttaataaatgacacagggctatcgaatgatgctaagaatgtatctaagaaaagttacaaactctcaaaatatgccgcattaaatggctaatgactccaccgcccttctttgaattctttttccttttatgaaaaaaaattatcttttcttcgtgcaaattattttcacaaagcttttccttcaatgaatttggcacaatgccaaaaaatttgatggccctcctcccccgccgcccaaaaattgttggcacaatggcccccaatttctggcacagcgcaaaacacattgattttggccaccactttttaaaaacataaagcatgacactgctgctggtcgtcgtcgttggcgccgcggtggtgatggagagcctagccttggccgcagcaaatcggtgcgccaagatcagctcagcagagcgccgtcgggtcgccgtttgctcgaaagattggtggaagagaaacctgtgacaagcgtgagcaccaaaataacaaaaaggtcctgctgtgcaattgcattttgtcgcccgcccggtgggcatcgaacccacggcatttccataccgcgtgggaatgctctgaccgactgagctacgggcacggtgctatttcgttattaaaaaaagccataaaaagggcgttataaaaaaactaacaaaaatgaaattttcaacaaaaaaatacccgtaatttttctcaaaacctttatttttttttatataataaagtgaaaatatatgaaaaaaaatatttttttaattcctacaagataaaaataaccattttgaaattaaattttgttcattttatttaaattaaaataacttttgacatgcaaaatcaaaaaatttcgtaaattttgatcaaagttatggtcaagtgcacaaggaacaaggttttcaaacgtttttggtctaagcaaattttggtcagaatttttgatgatgaaattatttatgtataatgaaaattttttgtcataaattgtttcaatttttatttcctttaatcattcgatagccctaagtgttttctactatcctgcaaaatcccaaaaaattttactaagtttcaaaaaagttatggccaaaaatgattgaaaacctggttacttgtgtacttttggccatgactttgttaaaattaaagaaatttctgaactttttcatattaatacttaattctatcgaaaataacaagaattaaaattttgcgtgctggtgcgtttcttaaattccgccaatgagttcgaaaacaaaaaatgggtaacacataaaaattcataacttagctcaaattcaaccaaattaatattttttgttatcattcaatagcttatgtgttcactatcagaatatgattttccaaaattttttgcttaagtataaaaaaa

SEQ ID NO: 8052 - DNA, 1156 bp, Heterodera glycines
  unsure (1)..(1156): unsure at all n locations
caaaaaattaaagatgagcccaggggcataatntgagacaaattgaaatgttgagggggtttaagcaacaacgtgataatgttatgaatgataattaaccacattgcatacgattaaacactgtggagtaattagagttatttttttaaatgtctttctaaattttgactatttaatatacagcaaaaggaataaaaaatttgaagatatcaaatttgtttgaggatgctggcaacatagacttaatgtaactgctccaaaacaaggtgcagaaaaaagtaaaatatttgattaaaacattttcctcctatttattcaacgctctagatataaaaaagattatttgttaacaaaaactaggaatatcagccttttaagtgatatggaaaagtttgctagtattgaaaacagtggaatataaaaaatttattgtaattttagtcaaaaaattaaagatgagcccaggggcataattgagaaaaattgaaatgttgagggggtttaagcaacaacgtgataatgttatgaatgataattaaccacattgcatacgattaaacactgtagagtaattagagttatttttttaaatgtctttctaaattctgtgtatttaatataccgacaaaaggaataaaaaatttgaagatatcaaatttgtttgaggatgctggctataacatagacttaatgtaactgctccaaaacaaggtgcagaaaaaagtaaaatatttgattaaaacattttcctcctatttattcaacgctctagatataaaaaagattatttgttaacaaaaactaggaatatcagccttttaagtgatatggaaaagtttgctagtattgaaaacagtggaatataaaaaaattatcgtaattttaagcaaaaaattaaagatgagcccaggggcataattgagaaaaattgaaatgttgagggggattaagcaacaacgtgttaatgttatgaatgataattaaccacattgcatacgattaaacactgtggagtaattagagttatttttttaaatgtctttctaaattctgagtatttaatataccgggaaaaaggaataaaaaaatttgaagatatcaaaattggtttgaggatgctggctataacataaaacttaatgaaactgctcccaaa

SEQ ID NO: 8053 - DNA, 3509 bp, Heterodera glycines
agtgctgtggagctgcccgccctacattcacaaaaaacagcgagaattcgaaacgctggtggcacaaatgcaggggctcataaatgatccccctcagattctgccgatctgcacgacaccgaatggccgctcggcattggaaatttttcgattcggcgatcatttcaatacgcacatggtggaagaagacggaaaattgaaaaatgcgggctgtcgggcacttaaggcttggataatgactcagaccccattcccaggcgataacgaaatgcacattcgctcgctgccttcggccgtcattattccatcgggagatcgggccgatcaccgatcggaacagctggaattagggcattcttcgagagatcgggccgattctcgtagaattgttcctaatcgttcggctgatcgtccggccattcgttaccgtccttatgagactaatggccagggacagtacggtaacgaacgccgtcgggaattccgtctcaatcgccgctgagacacctgttggaccccacctttcggtttctgacttctaaaggcagggacgccttttctgattgttgagggatgttgtagaattttaattataatgactcattagtgttaattaaatttggcataatgtcttgtttcgcgttttttctcacttaaaattgtattctttgttttttctttccatctttcattccaattttttatttatctggtaatttttattgttttgcgccgtccaatttcttttgactttaaaattgatattcgtcaaattgtttctcatcgatatttgtcttttgggaattaaagtgtttggatttgacattggcctactctgtgtttggtataattgcgtccctgtcttaagtcagtagcaaaagtacaatttggcgctcccgaggaaacaggtacaaaagccccgatttttaaagagtttgagggtgagatcgggaataaaaaaatttttcggacgggttttaatttggagtgtattaagtatcagtccggaccggacgatatttaagttgtgaagtggaaattgactattccggatcggaaagttaaaaaaagcgacaaaaaactccagcgcaccgaaaaatttattgtttatcagaaaatttgagttcgggccgaacctttttttctgtctacatcgccgtataaactattgacaccgtgtcggtgcttagtttttctccgtcttctcgccgaatttttacatttgacttcgctggatggtcatcacacgcagtccgattttgacacggcaacgagcgttgaatttggagattgccgttgacagaaatggacatcagattaatgtcggtggaaatcagcagaactctccacaacgccaaaatcacagtgctggagaaagttttccccaaaatcagcaaattgaaaactcgccaatctcacccactgaactcgcgggctttaatggggaaaatggtgatgacagttctcttgttttagaaccaaatatgaccgaagaggaattgcgcagacgcttgttggtggtcagcattgaacgtagccagccgccagccaacggaaatgccggaaatggagaaaacgccgaaggtttgcgaaacgcaatcagggaaaatgatggacgaccgaattttggagtaaatggtcaaacatttgcccaccaaaggaggccgcatgacactttcttatcaaatttgatgaataatggaataggaaactttcctcaaaatttggtccatgtaccgcgcacttctaccccaactcgaaatgttgaatttgaacagcaaataggaccattcccgtttgttgttgaccgcaacaacagagcaccaaccccacctttaaacatacggcaacaaattttccaccccatcccactgaatgcacaccgcattaaccaagtgtcggttaacgcgcaacgcaacattgacgttcagtacgtaccaaataattgcgttaatgtcccgccaaacgtacagcgtcattgcgacattcagtacaccgctcctaaccctgtcgccgcgccatcaaacgcgcaacaaattcaagcaggaagtagacttattcaaaacattccaatgcaggctcagctttggcagggccctgatggaaaaatgactttggtttacccccaagaccaacagcaacaagtgcagatcgagcaacctaatttggctcaaaatcatcaaaaattcactcgccaggtctttcagattccggaaacgaatcaagagcctagacatttccctacctacccccaaccgaatgttgcgccaagcaacctcgaattcaacttgattttggaaagaattccggatctaaatggaaatgagggtacagattctgtgcgccgctttttcaaaaaatttgatgcatacaccgacggatggccaaacgcgaaacgaatttcggcgttagaaagcaaagtttacaacaaagcagaaagagcttttgaggcagcaaagtcaaagcgccttaccgagtcaaaaaatttggaaatttatctcatatgcaatttcaaccaataaatttgaagaaattttgcactcaattttgaaaaatttatgtccatattttgacatttttgccattttatgtccatattttgcgatttttggtccatattttatggccatatttcgcgattttatatccatatttttaccatccctaatcatgaattaaaaatggcaaagggcgaccgattgaattaaataaaaatttaaaaaatatattatatataatagataataatgaacgaaaataaatgaataaaaaaaacaaagaagtaatacagtgaaaaaagataaggaatgaaaagcttttcgatgggttgggggaatgagcggcggatcgaatttcgctgtcgcatccgtttggatgggatgcgatggctttgatgggtgggcaaagatggcaatcggtgatggattcaaaacggagagagggggggggggggtaaaagatagaatttcagaggttttcttggggtgtaatttcagtgccattaggcctttctcgtggcttgagtttccgcgccctttttgggttgtttctccggcgttgaatttcagcgccgcgccgaggcctttttcgacagggcgaaatttgagacgagtcactcttccgccgactgctgctgctgcactccttccgcgccacggggaatcaaacgaagcaaagggaaaagccgcggcttcccttcccccccccccgcacactctcagcacccaccgctcactccccccgggggctttctttttcattggaattagcaaaaattaatttgattttttacatttaaagattgtttcttctttcggaattgcaaagcaataaactaaaaataaataaattataaatgtttaataaaaattcaacgaattaacaacaaaaaaagaagttatctctgcccctctttacgacaaaattaaattaagtaatttatgttcaataaatggccgatttttaccacttcaattcaaattatccactaaccaccaaatcattgtgca

SEQ ID NO: 8054 - DNA, 1350 bp, Heterodera glycines
atgaaagaggaggagcaaattagtgagttccctaattcgttgttaattgggagcagacaaaaaggcataaagctaacaacactcggccaattagtatttgtatttaagctggtggaacgacaaaacaatcggcgcacagtaaaggccaataccgcacgaaaagtggtgcaaaaagtggagagaaaagaaggaaggcatcaatgcctttggaaatggcaacacaaactgccaaaaacaacgccaattttcaaaacagtccgccattgatgccgcagcatcggccaactcccggcactttctcccctccgccgaatcgttcgctgtttccgccgcaaagccttgggattgttcaaatcggaagtaattcttgaatattttatgttgttcacaatttccctcactttagcctcacttcctcctcaaaatgagcagcctttgcttcgctttgccccttttttgcctcctccgccccctcagcacggcattttgcgtccgcccgtcccgctttttgtgcctccggcggccgatgctttcattccatcgcaatttgcgccttcgtttgactcgtccgcaacggcgtcaacaatcaatgctatgaacatgaacatggtcattcccccgttgatgatgctgcaccaacagcaacagtccaacaacaatgccgagcgaacgacggcgacagcggcggcgacatggacactttttgaaatgttggcaaaaggcacaacgccaaatggtcagcaacagaaaaacgaaatgggacaacaatcgcaacagaataataacacaaacagaggacaacaaaatggcacaacagaaaatgagggaccaataaatgtgtaagttgtgaagagaaattttgccaattattttgtatttgaaataattttaattatttgacaaatacaaaaaacacatgccaggtgttttcgacagtgattgaatttgagtaaaagctaaaatttttggtgattcgaacgatgcgaaccaaactcgactcgagaacaaaaaaccaaacgaccgaaacacaaaaggcaattctttccaacaaattcagcacttctccttcacattctttggttgtttgttcaccaaatttgctgagaaactcagaaagtgacgcgcaaattgatcagctaatggatcaaatgattgctcaaagacatgccgacgatgtgagagaatagtaaatgattgattaatcactcatcaaacattttaagaaattaataaaagggaaatgtttttttgatttaaattttaagttaattttacatacatcattttaacgattttaatgcatattaatgtttagaaagaactttcttctgatcgccgatcactgcattc

SEQ ID NO: 8055 - DNA, 598 bp, Heterodera glycines
caaaggagaaaacgctggtctcatggtgtaacggctatcactctgggctgtgaatccagctatcccagtttgaatctgggtgagacctaagcggaactttttgaatttcattttttagacattagccactgatcggaaaaattaaagcaaaaacttttgtgaattttcttctcgtattcctaaaaggtgcatcatactcgcgcatttaattattaattaggtgcccatcaataatctgcttcattaacaatcaattaattaattatcttttctgcttccattcccactcacttttcaatgctttttccctcaacagtcattgtctttttttttcttctaattgctgctaaaccggtctttttctgcccattctcgggtggtcattaagcaactgcgagagcgatggtcaacggagattagcattataataaacggtcatttgccttttttaaatcatcaaaatgcttctccccttaattgtctcttttattcctttgactgcgttttttctgagtgccatagaagccgacacagaaacaattcactgggaatggcgcgaatggatctgtcagacgaatgacaaaggtgcggataaatt

SEQ ID NO: 8056 - DNA, 2639 bp, Heterodera glycines
tttaaagcatatgactcgggaattgcgggcttccggcgggttacgagattagtagacggagctgctaaaataatgtggtgctagctaattccgttcatgccaataggtgaaatgttttaaatcacacaaaaagcttaaagatttgaagcggaagaaatggcacaaaaaatggccataaaagttaatctcttatcaatttgttttttaaatttaaacaacccaaagaaaatctagtccttattttaaatatttattaagttattctctaattttaatttagttgagtcttagatttgaagttgtctttttcaaaggaagaaattagttttaaatgaaattttataatttattaaaaaaaatatttttattttatatacaattttctatttgatagggttcgataattccaatccaatcaccaaaaaatttacttaacagcagtttgaataaaaaaaaccatgccgaaattttatttgcaaatttaaagccaaattttaaaattattttttatggtctatttgaatttattttcattaaaattaatttttaaacaaaattgttttatgtatatgccaaatatagaaagccgattttttattccttttcccgtttataaatgctaatcacagcaaatgacgcatgacattattcgcttaccaaatgcgcttcctgttggggaccatcactcattaatcggatacgaaaaaaaacagtcattagcgctgagaatttgattatttttcttaaaaaatgacaaaaaaataacatttaattaaactaatatttctttttaaaataattatattttagttaaatgccttatttcatttaaatttaattatcaataaattaatttatctacactaattatttttgcataaaatcgtctgaactttttaagttaatttttgtaaaattctgttcctgtttcctttttgtagcaatttcctgtttaaaaaaaaataatttttataaaaagagtaattaaatctccgcatttttcacattttttgcacttttgcgtaattaacggaagcaaaaaatatttgtaaattttaccgtatccttccgtctccgcttccggcatttgcttaattaggcaattaattattcatgttatacccattttttgtgtcaatgaagcgaaccccatttaaacgaagaaaaatatttacaatgttcacaatacaatcagttttaaggttcataaatgaataacaaattgttaaactttttgaataatctttttacagtttttggaaattaattaatttttgaaaataataaagaaatattttaaatatttaatagaataaataatttttaaacattaaattaaatcagctcttttattaatttacgatgaaaattttggtgatagatttcaatttaataaaaaaaataaccaatgcctaaaatacgggtccctaatggattacaacataaataaattaccattaattaaaaggaattttctattaaataaattttgattatttcatttgacctttacaagtggaaataaatattatcaaatttattttttataacaattttttagaaaaaaataaataaatgttccataattcgacgtattttctcattgtttttttgcttcatgaaattctcatttttacgtcggttcattgtacgatggctaaaaaaaagctacatcaacagcagcgggaggaaaactttgatagtacgacgtcagcattttcaccaaaatttgaggtatcatttagaaaaaataataaaatatatgcatatatacatttagaatatatataaatattacatacaaaattttcaaaaattttttacatgattttattttcatacattgagaaaattaacgcttttatgaaacattgatttttcagaaaagcatttattttattttatttaacttccgattaataaatatagaattttcagctccaccgtcgacatcataagcatcgactgcggcgtgccgtcatcaaaatttgcgtcgatttcaaccggcagcccattgcatgcaaatgggaaacagaggcacagttgcgcaaaaagctgatggcatgccatttgagcatcatcacaatgccattctgccatcggacagtgccgaaaattacgcggaaaatgcataaaattcaacgggaccggcgaagaggcggaattttctccgcattatagacaaaagcgtgaagaatttgagaattgtgaatttctattaatgaattctaattaacaaatttttttatcattcttgagaaaattactataaatttttttgaaaattttagggcgttaaatgctcaaatgatttcaaaagttgctgaaaacatatttttcatccctttcagtcagctgaaagtccaggaaaaaatgcatgcgcatataatttctaatcttgtacttaacttttttattaaataaaaattattttttcttttttttgcccggtttatttttatttttaataataataataataataagaatctttttgattttacttaaattaataatttcgttaaaaaggttcataaatgaataacaagttgctaacatgttgaatataattttcgatttttttgactattcaggggggcaagaacagacttgagtttgtttgttatagtcacagtgaa

SEQ ID NO: 8057 - DNA, 1446 bp, Heterodera glycines
  unsure (1)..(1446): unsure at all n locations
atgaaagtaaatgagttccatttttattcatatattcaanaattaaatttatctctagtaatntatgaatagttacttaaactaatttggaaagttaacagttttcctgttcctttagcacatattaactgtgccactttacaatatcatagcataaaatattttcccaaaaatttttgcgtgctttgttgatgacatcgtaacaatttacgatgcaaatgcgcaacttgataataccgtttttcacaaaaatttgatgtaataattttaaaaaaattgattcctctgttcattattccatttattattttttagattaatactagccctattacagtgctttaacatggtcattgataaaaattgaaaagagtttagtgaaatcttgtaaatttttgaaaaaataattattgtaatgtgaataataatgatacttttaattgtataataaatattcaattaattttttattatgctttataagcattcatgtattaaaaatgtataaaatatattatttataattttttttataaagcttaaaatgtttgtatcgtatgaaatcttcaaattttggaagacaaataatgactccatccaaaaataaaaagtaaattttaaaataccaaaatagtgaaaattaattttaaaaatgagcaataagtatttttttaagtttttatgtgttttgctagctaaaaagcgttcaaaaattttcatttgactattttagtgcctattcgcggtctttatcttattcaattcctacttttgcgcgttttttcagttttcgggaacggtttttgtgctctagaatcacatccctgttaagaaatatttaatttgatttttataatcgtaataacaatttattacaatttaatttttataaaattttttttataaattctaaatatggccttttcttatttaaaaaaaattaaaattttgccaatgaaataatcaatttattggcattgtttcatcattgcattcattctatgtgcttatgaaagattcatcaacgtcatcacaaatgccacatcatctgaagagaaaatataaatttccattattaaattgcatccatttatatttgttgtattagccaaaaagaaaaaaattccgctttttgtataattcgaaaaaaattctttgaaaccaaaataaaaatgttgaacatttggatgcttttatttgttgtcctgaattttgtttatataacaaatggaaagaattgtgattccagtaccaaaaataccgtcgtaaagaaagcaaattcaaacaatacccaagtaaagaatggaaatgccaaaaataccgtaacagtcgagcagcaaactgataccgaaaccatccaattggcaagcaaggataatgtagcaaagaattcaaagcccaaaaccatcgtacattcaaagcccaaaactagcgagcagccgaaat

SEQ ID NO: 8058 - DNA, 1898 bp, Heterodera glycines
  unsure (1)..(1898): unsure at all n locations
ccccccccccccccccccccccgtcctccncgcgcttccggacatttggacactggacaatcgacagtggacacatttcgactgtgaagtcattttggaaataacctggcaattggacagtggacatgaagacaatgagtgaataatttttttactattataaatggctttggcagtattaaaaaatttttttttatattgtataaattgcattttctttagtctgatcaggcattaaaataggtaagtgattccttctagtcacagaaaaattttttaaaaactaagattaaatttattgttgtttattaatgagccgggcggttataaattgactaatcggttcggaggaataatcaaatgttctattaaaataaaagccatttataatagtaaaaaaaagtcatttactgtcgtaatgtccactgtccaattgtccggttttgtccaaatgtccacgtcgaaatatccactgtctaaatgtccagatgtccactttccaaatgtccggtcatgcccaccacacgcctccccaaatatttgtttttgatttcaattattatttcttaaaaagataaatttcgggaaacaaacgaatgtgttttgagtaatttgattttttttttttgagttcctttgtgtctaatttttttgaaaatgaacggaattttttgaaattttgcaggaaaatagagaacacttagagctacgaatgttatcaagaattaaaaatttttacttgtgaaaactaacagtatatattaattattacaaatatgtcgtgtttttatcatttccgtagttttttgtccgtaattgttgaaatggcctcgtgtctaaaatgtacaacccgttattatttgcatttacatttttcatagtatcgcaatttgaatgggaattggtttttaccagttaacaatcgaaaaaaatgttttataaatttttttattataatttcatgtataatatttaatttatgaaaaaagccaatttaagaattttttttcattgggttgcatttttgtttttattgaatatttttaaagaaaaaatggttaattttttaggattactgaaattgttgttgaaattattttggataattgcgaattgttgaaaaaaattgataaaagcataacaaattttattgatgcagaattagaacaaaaaattattcaacaaaattgtgacgcattgaaaaatgacaaaaaaattgacgatgcaaaactgtctggtgaacaactaccaattctgatacaaaaacatgggcaaaaaatgttagaaaaactgaaagaaattgaaactgaaaagaatgttgacaaaatgtcccaaattttggcaccgacaaatgagcaacaacagcagcatcaaccaaattggcacaatgatcaaaaaatgcaaaaagctgtgataatttttaattttttgcgggaaatttttgctgttctacaaagcgattcaaatgctaatgatgatgatgatccaatggccaaaaatgccaaaagtgtcattcaacaatttttaacaacccaaagccaaaagcctacggtagtgccaatgccaagtgaactaatgggattggtcatcaaactttggcctatcatatacaacaatgcaccgcagaatcaacgaaaaaatcagtaggtgtacggtggtgtatttaaattagggaaatattattaattggcgatgatctcaaaattcgaataattgatgaaacaattaatagaacttattaattataattaatatttgaaaatatatatttctaattattctgaaattttttgtgttaatttgtgccttaatcggaagtcatttttggtaatgtatactatgctacgattggagctggagctcaggcatacgccatattttcgtagctaaataattaa

SEQ ID NO: 8059 - DNA, 895 bp, Heterodera glycines
  unsure (1)..(895): unsure at all n locations
atagggctaaatgttctttattagcctgcaaaattcaaaaaaaatatanntagtnnntaaaaaagatatggcgcgctgcgccaaaattgnncccgaaaatgcaatttttcgaggttttttcggccataacttttttgtgtctcagctaaattttttgaaactttgcaggttaataggcactatcaagcgacttaaaatcataccaagattatttaattttgctgtgaaatcaaaatgatatgattcgttctgcaccaaaatggccagaaaatgcaattttttgaggttttttggccataacttttttgtgtctcagctaaattattttaaacttttcaggttaataggcactgtcaagccatttaaaatcataccaagactatttaatttggttggtaaataaaaatgatatgattcgttctgcgccaaaatggccggcgcctaagtgggcggttcccaccactttttaatttctccatttttggttttaagttccctgatgacaccgatatgactgagtacctcagtaaaatggcccaaaatcgctaccatcgcgacaaatgggtgaactcggcacaatttacacaaatgcattcccacaaaatgccactttaggcgacacctctgatggattccatccaattttatgtaagcttttgtttatccatttcaatgaggtttagcattttctttgcacagcacaaatgttgcggaggaagcggtgctcaagactattcggagtcattttggtacaaaacgaacacccaaatgggaatgccaacctacggtaaatattccgatgtgcaccggggttgttccgggacgaaaaaaatatcgggtcggccgaaaaaccatcgggccgggattcgggtttcgggacgagaaaaatgtcggg

SEQ ID NO: 8060 - DNA, 1357 bp, Heterodera glycines
ttttttcttcatttcccattaattttaagtgccttattcttgctgtcgccagacgcaggacgcccgggcttggcacttgcagtccattgacccgatgtgcaatcagtacaaatacggaagtcgcgcattcaacgactcagtgaattggacggtaaagtgccgcccaacgcgatcaggagagaccattagcattagcccctttcagggctgcggtaaacccacctttgaccatttgaattggcttctgcttatgttgtcgatttgtctcattattatgatagtgctcgatgtaagtctttgtggtataatactgtgcttcgccccccctggaatccggcacccattttggccaattccgaacctcggacccgaattcgaacaaaaaacctaaattttcaagtttcacattttttggctcaaacattgtttaaaaacacggaaacgaactaagagtcaatagagtgcttcaatataaaaaatattttaaacttttttgactaaaaatcgaaattttgagtcacttttccccattctttagtcgcttggacttttgcttgtggtgaaatgtctctgtctaattttgtcgttttacacttccatcagcgattccatccgaagcagggttgacgcccgaatccggaatcccgaaaacccgacattttactcgacccgatgactttcggccgatccggcccgaatcttgacccggtattatgttggatccgcggcaaccctgatccgagcctgcgatgatgccaattgtgattgtgttatgatctcacaacacagtgccttcatgctttcttaaatatctcactaatttccttcacataacaattaattactaaggagtaaaattatatggaaatccatattttcctggactgagggcggcctgaaacgcacgaaaaacatgttgttagcttggtttgaagcttctaggatggattttctatatccattttttccatatttcgcgatttatgtccatattttggcatttttatccatattttatgtccatattttggcatttttccaaaaaaaccctattagaacggccccctcaggtaaattggcctttttgaccccaaagaccgaaaaaattcccgaaaaagacattttttagaaaaattttatcgaaaatattgattagattttcttaaaaaagaaaatttcgcttttcaggttgatttttcgctaaaataagtaaattttaacctgtatcgtgtttttttcatttaaattatttttaataccatatttagccatttttaaacgttttactttgcttttagctaagttgaacaattttgaaaaatttaccctcaatttgggggggggtctgtttagtctg

SEQ ID NO: 8061 - DNA, 2023 bp, Heterodera glycines
ctcaaatttggaataatttatgtccatatttttgccattttatgtccataattttcgatttttgtccatattttatggccatatttcgtgattttatgtccatataattttattccctattaattacccttttgttttttgtatggctttattttctctgtcaacaattttattcattgtcagtaaaaagcgattgtaaaattacaaaattaattaatggatatcaaaagaattaccgacgaattgattgaagaaagatcaaatgaaagtgaagattaacggaatatttttaagcaagaactcgaaagtgaagccgtgactcacggtcacgattaccgtgaatttcacgggtttttttactcacggtcacgattcacggtaccaatccacggttattccgtgaaaaattaacactgtataaaattgaaattttggttattttttgagcaaagtttgctaagaaacagagcaaaattttcaaaaatttcccaggcggcgcctatcggcaccgccggccccctcccctattcctgaaacttttttgaacaaagcaaactacaaatattgtgcgaaaaacaaataaaaagccgtttcaaggatgatcccatttaaataaaaacaataaatttctttaaaaaattcgctcaaaataaagctattttgggcaaactcagttaataaatcccaaaattttccactaaaaccctaatttttcttaaaaattaggttaaatatttctcaccaaaccattttaaaaaggtcggaatcgatttagaacgcaaaatgatgataaaaatgcaaattatcgagcgtgccaatgcacacttcagtacctgataaatatgttaaaaatggtcaaaaatcaatttttcatattttctgaaaaaattggctcaaaatcacataaataaaaacaattttttttttcattggaataatttctttaaatgcaggttttttgtcggccaaatgctccttttgaaaattttcagttgtgagccctgaatttatttttcgttttcgtgtttcgttttcgtccaataaaaaattttcgttttgtttatgttttcgacttttaaaatttttaatttcgtttcgcgtttcgttttcgtgaaacattttgtttttgttttcgaaaattatttttttggttttagcacacccctgcccctgaagttttcaaataaaaagtcatttctagtcataaataaatttttggaaattaaaaaaaaaatgaaataaaacctaaactttcaaagtgcagagtctaatataaaaataaatgcaaactcctttttagattctttattgttgttcactctcagtacatttccgaacaaatgagttcactgtccaaatatgcaagtgttgtttgtgatgctcgagaccgagacaacaaaaagttggagttttctcgaatcgagactcaagaccaagactctcgagctcactaatcgttgtacataatttgctctattattggtttgttcattgaccattgaatagtactgtttcaccagttcaggatatgtttaaacttttcgaaaattcgagtataaatttaatttttttacgaatgatgcacgattttctgggtatcaaaaaagtttaccacaaaaaaaaactatgtttttcaatgatattatttatatatagaaatcttaatagggcagcaatattttgggcatttttctgaatttccatttaaatttaatttatttaattaatccttgtgaattttggttgctttggggcattttttacttattcatggcgtttatagcgccctttttttacggataaactgaaaaaagcaagacatttcatgtttttcatattgcctttctcaaattcaggacaaatgaaaaacgaggacatttccttttttcagattgacattctcaaattcagacaaatatgtaaaaagcagtacacttattcatttataaggcgttgcgattttatatttttataataatttataaagaagaacaagctagaattttttttttgcttaattaat

SEQ ID NO: 8062 - DNA, 1607 bp, Heterodera glycines
gatttaggttttttttcgccaaaggtcgaaacaattgccaccattagtgagccattatttattactagaggtaatcttctttacagacgaattatcgaaacactgagcactaattcataaaaaggaaaaaaatttgttccataaaaatatacaaaagggaaaacaattttaaaaggaccaacggatattgaaaaaattcgggaagaatttgagcagaaaatgtataaaaatacgaagcaaaatgccaaaatgaatcaatgaaaaattttacactttttatttcgtcaacatttcataaaaatccttttcacaaaatgattgaaactcttctgattttttagaatttttatgaaaaattgaaaaaatttcaaaaaattttccatttttttcagaaaaatactgaaaaaggcatgaaaaaaggcacaggcaccaaaaagttcaagctagaagcttcaaaccaagttaaaaactggttttcgtgcgtattaggccatagcaagttagcaaaaaaaggcatatgcctcaaaatccagtccctattcataaagtaaaaacccaacttgtactgtttttcgacaaaaaaatcgtcataacttttttcaaagtcgaccaaattaaactttcttggtatggtatcattcgatagcccttaaaattttctatccaattacaaagatttaaaaaatttctgtagcttctgcacagttcgttttggcgcgatccctattttttaggcataagtttttctttgccaaccaaatccaacaatcggagttcagaattttttgtgaaaaatcgaaaatttctagaatttctggaaaaacttttaatctttgtgttagaaaaaaacttaaaaaaatacataaaatttccagcttttttattttttaagctttattccactaatattgtccaacttgaagtgagttatgagtttccaaaattagtctaaatttcctgggctcaaaaacgaaaatttttaaaaaattccactgaaacttaaaataaggtttatttatatttgtgtctaaatattttgatggtttgtcaatgttttgtaaatattttcacatttttcaaatttttcaaaatcatgagatctttaacaaaaatgcaataaaaaatgaattttttaacgcgataatattttttccgacttgcataaaaattttcaaaatttttccactaaatttgtttttaattaacaaaatattatgtttttaaattgttttttaaaaaaatattaaaatgttttctgaatatttttttgcaatttaaagatcagcaaaacagccctgatttcgttttaacaaaaatgaaaatgacgacgaatcgaaaatgacaattttgtctttaaattccttttccagatctattttttctcgagatttggataatcctactaatgattaatcatcattttaaataattcatctaacttaataataatatacaaattctatttagtaaaaaattgacttggataattctactgatgatcaatcatcaatttaaataattgcatcataatttaataataataatatacacaaattatatgaagaaaatttataaagtaaaaaattgacttggataattctactgat

SEQ ID NO: 8063 - DNA, 5264 bp, Heterodera glycines
cgaggcccagcgaattggccgaatggcacaagtgctgctggaggcgaccaaactgctgatggccgggtaatcagcaaaaaagggaatggatggagaacaactgattagcaaattgataattgaaaataaaaatgaataaattataaatattcaaaataaatgcaaaattataaatttaataattaaattatttgatttaaatttttataaattcattaaatttaatatgggatttacaaaactttttaaattaaattgaaaagcattttaaattaaattaaaattaaaataaaaatgtttcgccgtttattttctaagtggtggtcgtctctctgctgctgatggccatgccaaccgtgttgatgaggacggcgtggaaagtgacggctcgccagggccatcgccggtggaaaatcagccgccactgcaccgaatggacgcgcaaacattgcaaagggtgttggcccaattggacattagcaggtggccaattagcgggaaatgaatttaatcaatcattagcaaaagggcaacaaataccgtaccccgaaaatagactcaaggatttattggaatatacggtactcttaggcattcctttaattattttgccaaatatctccctgtgccctttttcaatgattattttatcctttttgtgtagcattctcggcaacattgagcccttcgtcaactcagttgagcacagcggcactgtcgaggagtgtttgccgcgggatcagccctgtgaccacactacaccgtataggttagagcccggaaattttaagtttgcggatcccgctgcgggattggaactcattttgaacgggatcccatgggattaatctcgcaaagtcccatgcgggatcccatcccaagccaggcgctagtacagatggccaaacccacgcagatgcaatgcactctctatgggcagtgatcagcaattataattagccattgattgctgatattagttaattgatcagaattttgcgtgctcgaaaatgcctttttattcggcgagggttgattaattaaattctcataaaatatggtttgatgagttttgtgatcaatgtacaaatttatcggttgtaagtagggctggtcgggaccgggaccggggcgggaaatcccggttttttcaggtcccggtcccggtttttggaaaaacagaaatcccggtcccggttttgccagtcccggtcccggcgggactaaacaagcactggtaagaatggggtctgggtgagaaaatagaaggtaattggtgaagaaggagaaatctttgagaaaaataaataaataatttattttatttattgccttttttcacgtcgttctgtggtctagcggctaaaccttctgactttcattatttgtcgcttgggttcaattccccacttgaacagaatattttctagtttttctttaccatttcaattaaaaaattaaatattccaagtttatttttatttaattttcaagcaggctaaaaaataacaaattaaccaaatattggtcattttttgacaaattctgttaacatatttcactcaaaatttcaaaaattttccggcggcgcctatcggcaccgccggaccctgccgccccctcaccaatgttcccaaaagttttttttggaaaacagcgccacaaaaacagcgattaaaagcaaaaaatttaagaaattttaatttattaaaaaatccagaattttgggacccagaaaattccaagattccagatccccccccccccccccgaaatgaaacagagaataatagaaaattcttcgaattcctcccccaaaagaaaatttaaaaatcttctgggcacatttttgaatttaggaaattttcgtaacaaagtgcactcaaattttcaaaattttttcaaaaaattttctcttgggaaaattcccggttggtcccggtcccggcttttctcgcggtcccggtcccggtcgaaaaacttggtcccggtcccgacttttctggtcccggcaagtcccggtcccggtttttgtcaaaattcccggtcccgaccagccctaaataaaatagaaaaatacacccgtaagaatcgacccaaaaaattttcaaaaatacagccctaagaaatgaaaaatttctcaaaaatttctctccaaaatttatttatttatttcttgacaagaatttgtgattttaaaatttttttagctcaatactgattttgcctattttttttttacttttttgattttggcagtttttagcacctataaatatcagccctagttgaaaggcttcttttaaaaatggatgagttgactcatttttatttacaaattacctaatttggcatttcgtttgaactgcttgaatttgaatattgtgcacaacaaatggcattgaaagtgttaatcgaactcctcgctgacaaaattttcactaaaaatttttacgcattcccaaaaattcaatcaattaaaaaaaacaataatttaattaaagtagcctggtgtaaacagacatatcacttatttcttttctgtcttcatctctgcaggcttttctcccaccaatatatcgattttttatggtgacaattttagttgtgagcagatagaaagaaaatggagaaatagtgtgggctagagaaatcaaaaatatttggaaaaaaggaaggaatcaactgaaatatgaaataaatactaattttcgcttctcttaaaaggaggccaactgcctttttgttctacggttaaagtggccttaaatggctttaatctggcagaatttttcgtgttaagaagagcaagggaattaaaatcgcccaattttatcagattccctcagccaaaattgaaatccctgaatttcaagaatccggaaaaaactttgcaattgttgagaagaatccgagaattgaaacaatcgcctaactttgtcggatctttcaggcaaaaatgctgctttaaaatttcccccatttcatttcccattttaaatcatttttctatgacaaatttggaaatttaccttttagaaattgttacaaaattaatttttttataaattgattgacgtacgattgaatacaaatagtttgtttttgttgtttttgaattttgtgacttttttgtgccttattgctattttatgatttttaattgtctttttaatgtgcttttttgtgaattaaattcccagccctacttataatatgtattaaagtcaattaatttaagatattgccgactaattcattttccattattaaattcatcatttttttcataaaatccggcataagtatgtgtttatgtgaagtgtacaccacataataaatattaaataatctttataaagcatctcatcaaaaaaccatcgactttgaaaagtgctaattaagtggtctaaattttctcacttttgatgattttcaaagtttgaagaaagtaattgagttagttttgagcaaaacattttcaattggcaaggtaatttaaaaagaaaataggtcgaggggtttgatgaaaagcggcaattccttccaacgccaatttcgaatttgtttttacaagtttatgaatttaatacataaaaataatgatgcaataaatttatgacaagtaaatgatttttacatggaatttggaagaaatggactagggaaatgaagataaatgtgaaatgaaaagtgaccaattagcagaatgatggaaagggggggagaataaaattatatcaaatttattagtatcaaaatgccaaatggcatcaaattgtcgtttattggcaagattccgtgttcctccgctcattttccccattttcatttgctgtccgtcgtcgtcggtccctgcggggcgggcgagccgttcaaacgcaatgaatcgtccgacactttggcgcttcgttccaacaaatcgtcgccgctttccatgcccgagtcgtcttcctccttcttctttgcttctctttgctcctgctcgttttccttttcctcctcctccttttcctcctttttctcttcctcctcctcctcctccgcttcgttccatcgcatttccgttctccaccaattctctgccactgtgccggccaacttttgtctgaacgcgcggcccatccgatcactttgctccttgctcatgtaattcttccagtctctgctggtgcccttccgaacgaatgactcgccgtttctgaaccaatggatgtggtaagaattttaaaaccccaatttaattcaaaaagagtcattagtgatgggcatgactcttacaattagcattagcaccagccaaaagtcccaattttaatttattttatgttttagcccctaaatgatgatttctcattcccaataattctgatcccctcccccccctttttttcagttggacttcttcttacagtgccgtgccgggaaaccatcgctgttggtcgcgctgcatcgcttccaatcgactttctgccacaatacgcgacaatgtctgttggtcgttcaccagtttttcagcatgtcccccaagaaagtgaccaattttgcgcacactcccttccaagtcgttgagcatgtcctcgtaccttaaaataattttataaaaacgacgaatttcaaaaaaaaacttcagcaaaaataggaaaaaattttttgaataaactttgaactccaaactgacttcagaaagagcacattggcatcactcagatgcggcaaccaactcagcagatgctcaaaatagtcgccgaatgccatcagccgaccttcaaggaacagctcgaaaaagtcgtcgaatttgccgtgagcccattcgtaaattttgaagttgcggttgtggtggaaatagctgacgcagcagtccttcgggttgcgcaccgcgaaaatgtacttgggctgagcagtgccatttgttgttgtcgctgactgttgtaaatgccgttttggcaagttggcccaagaaaagtgcgttttcagcagtcgcgggtacttcaaactgtcgcaaaactcggcgcccaaacgctcgatcattggcgaagtgaagcacagttctttaaaattcaaattaaattgagagacgaaattcatccacccccacggttaccccacatttgcggtccggatatttgcggccccagccaaaatcggacatttgcggcgcgacttttgcggcccgacatttgcgtcccggacatttgcggcccatttattaagggccattttcggacatttgcggcccaattttttgttggattttgcggccc

SEQ ID NO: 8064 - DNA, 1419 bp, Heterodera glycines
aaaaaaaacttcagcaaaaataggaaaaaattttttgaataaactttgatctccaaactgacttcagaaagagcacattggcatcactcagatgcggcaaccaactcagcagatgctcaaaatagtcgccgaatgccatcagccggccttcaaggaacagctcgaaaaagtcgtcgaatttgccgtgagcccattcgtaaattttgaagttgcggttgtggtggaaatagctgacgcagcagtccttcgggttgcgcaccgcgaaaatgtacttgggctgagcagtgccatttgttgttgtcgctgactgttgtaaatgccgttttggcaagttggcccaagaaaagtgcgttttcagcagtcgcgggtacttcaaactgtcgcaaaactcggcgcccaaacgctcgatcatatgcgctacgacattccactagtgcagtttaatgcacgaacgatggcggattaaaaaaataaaataaacacccaaatttttttgccaatgttcaaaataatcgaatgttaaattaaaaagcaattatgaaatctcaataaaacgaatttatgttcagagaggggggaaaaatttgccgccgttcttttgaacatgaatattggaggaaatagttttttaaagaaagacaaagaaatttatccagacaaatttactaccaatttttaaattttttggtaacagtgcacacagcaaagctaattcgcaaatgccttcttcagttgtttaatttgtttaaatggcattgaaagtgttaatcgaactcctcgctgacaaaattttcactaaaaatttttacgcattcccaaaaattcaatcaattaaaaaaaacaataatttaattaaaatagcctggtgtaaacagacatatcactagggagtgtaattatatggatataaaatcgcgaaatatggccataaaatatggaccaaaaatcgcaaaatatggacataaatggcaaaaatcgcgaaatatggacataaatggcaaaaatgtcaaaatatggacataaatttttcaaaattgagtgcaaaatttcttcaaatttattggttgaaattgcatatgagatatatttccaaattttttgactcggtaaggcgctttgacaaagacggctttcgttttgcaattagtcggtcaacattcggaaattggtctcgaattttttcggcaattacgtgcaatcattttaaaagaaaaaaaacataaaagctaaaatttattaatttttttagcgcaaaatcaacaacaaaagcgaaattttcgcttttttgcttatttttgacataatttattaatttttaagaaaatttaaatttattcaatattctcgagaaattttggcgaaaaaatgattttttgaaaattttttcgggtttttgggctcaaaaaggctaatttagct

SEQ ID NO: 8065 - DNA, 6209 bp, Heterodera glycines
  unsure (1)..(6209): unsure at all n locations
aaaaggaattggtgccaaaatatctaaaaagtaaaggatttttattacataaaactaaaattttnttgtttgtttgttttagttatgaagtattctaatgaggaaaaattaagaaagacgaaagaatattttgaaattaaagctaaaaatccaaaaattagcgactcgataattgctacgaacttgggaattggatgggcaactcttaaaaaatggaaaaagaaacttgcctgaattacgaatttgtggtttttttgacgtgctgagccgaacctatatcaatttaataatatttaaattaattattaataacttagcttaaacttagtcaaattaatgaaacatgtggtattgggcgatagctctatgtattctcttgaatcttatgtaattaaaaaatctagcaaaaatttttacaaaaagttataactaaaaatttcaaaatttagattcaataatgtcgttccctaactattaaaaaaattttaaatttaacaaaattttatagaaatctttgagctatctaatcgtattaaggttgtataactaaattgcagtttgaacactatttacatgaattaaacgaccttacatttttgtatgaccttaaaaatatgaccaatttaattccttagtaactttttttaagaaacaaccaattataaaatttgactaagcttaagctatgttatgattaattatttagcaaataaatttaaaatgattattaaatttaaatattattatcattgatactttttaggttcgacctagcaccattttttgagagtgtaatttatagataggatgttccattttaatttggttttgtattttattaagtaacggaaaaaaaattgttttgaaccgaatttatataaaaaagaaatgagacgtatttattttgtgctaatttctttgattttggcacaaaaattatataataaaaacagaaatattgagcccaataattttttatatattaatctgcataagtgcatattgatgtgtatatattagaacttaatgcctaacaaattaactcaaaattccctaattattccagacggcgttttgtcggcagcgcctgactcaaatttattttatcgtaaaaagcaaattcaaattgctcataaatatgcattttattgcgatctctatttttcttattatttctagtgatttacataatatttgtattaaatgaatgggttttaatatcatttccttattatgtctacatatttacataatgtttaacgccatggggattatacattattatggttacatatttaaaaaatattaaacgtcacgggtccgttttgtatattgattgctctagattgatatattcatttccgtattatgcccacatatatacgtaatatttgttgggttttaatattttttccatattatgtctaaatatttacaaaatatttaaatgtttaacgccatagagattattccttattattcaagggattttgtttaatttctctagctcgattatattcacttccttattatgtctacaatgtttacgtatatttatattgaatggatattcctattgcgtcacaaccggaaagaaataatcgttaaattaataaagaaaataattaattaatttccctacatagatatattttcttcaaatacatgcatacgcatataaataatgagttgatgaaaaattttatttattttttatattaatttaatagcatgaaaatatttcattagagagatcagttaattattttaatatattcaaataaaaattttatggctttagacagcggaaaaatatttttttaaatgatgaaagcttttattttaacatttatcaacatctgccttatcgcttcaatgccaagtaatttttgaaaagataaaaaactccttcaaaaacaaccattgtgttttaatttaaattttaaccgattttattttgaattttaaatataatgaaaatttaaacaaaaaaaaaatcgttaattttccctatttgaggcactccgtgtccactttttggcactctgcagcttgagctgaacaatttcttggaatatgccaacgaaccagtcgggtcacttcgtcgtggaaactccgtgaacattcgcggtatgtcctggcaattgagtgccgaactcactgaatcagctgctgaggacggcaccaaatatttgggattgaatttgtattgcaacaataactgcaaaattggtaagtaaattattttaatttttttatggtttatataaaatgagtaatgttaaaaaatgtatgaataaaaattttaaaaattttgccaacccaaaattttacaagaaaaatttaattttggctttatggttataggaaagtaatatgtggttgcttattagtaaaggtataactgtcatcgatctattatgtaaaacaacagttttatttgtagtccataaattttttacctttttaagttcctaatttttaagaattttcttgttttaaaagtctaaaatattttgaattgtcggcctttgaggggaggcgcgatttcgacccaaaaattggcttttagggcgtacccagtcacttgtggccaagacatttgctgtcaagaaatttatggcccgaagattgcggtcttgtctaaggcccgacaattactgtacaaatttaaaaaaaggtttcaatcacccactttgtcaatctttattatttttaaatgattttaaattggatctgtggttcactggacctgtaccaatttttaaatcaggcccttgatggtaatcggctcgatacaccaaaaatttgataggaatacagaatttcggatggcaccggaataaatagttaaatttttttttaaatcaatgttaaatttgaattgaaaattttgcatcaataattcgattaattaagacgctaattggaattgtttctcgatgctggaatttcgtataactgttggacaggttgatgttatgtcaaaaaagcttcccgcaacaaatttcactgctcaaaattcatctctgggaataacgaattttattaaaatccaggtaagtgaaatgaaatgaattaattattatatgataatgtttaatttaaatcaaataaaacattcatttatatatgctaattaataaattttttttttatttgttattcaataaatttcatttgaaaatataataaaagtgttttagaatttggtagatgtatgtcgtcatctaaaagattacactgtccaaattgttgccaatgtaaagccggaccaaccctgtgggactaggtaatcatatttattcaattttaaaaaaaattaaattaattaaaaaattgcctaaaatttccggtgccatggtaatactaattaaaactcatccatatttttaatatcattgcattattttagtctgccaagaacagatgcaattttagtgaaaacaagcaatgatcaaattggcgttgaagtgaacataaacagaaatgttggtattttaaataattattaattttaatccaatttttaaatagtgtcctcgcgctggactggggattttaaaatttcaaaaaatttaaatttaacaaaatgaaatatcttttctacaattttacttttttttcctctttgtcataagttatgagtcataatataatttttgcggcgcattttcaaaatatttataaatatattttgtttaaaaaattaatttaaaaataaataaaaaaagagatgcaaaatgctttttctttgtagcttttggcagcccattctagctcgttcaacgattttttcgccaattttcaaccgccagctgaaagtacgtcctcaacaggtggattgagtatcatgcttgatgccccatcaaccgcggaacattttgaacaactgatggacttgttgcactatggtgattgtgtgctggaaggtaaagttttaagactaaatctataaaatgcaggtctcgaaaatcaaattttataaaatttactcagccttaaaaactcaaaatttccaaaaatactaattaaattcttttcgctatgtctattttgaaccaaaaattttgaatttgtatgaaatttcttagcagattttttaaaaagttaaaatattgattattattttttaatcaactaaattcttttagttttagcccatttttatttgccgtttatatgaaatttattaacagatattttttaatttcaattttgactattattgtcaataaccataaaattctcaaaaatttttgaactgaaaagcaaaaccacgaaccttcaaaaaatttctcctctgaatgtctaataattaataaatgaggaataacctcgtaattcacatatcaatcattcattacgtgtcaattaaactatttttttaaatttaaatattaaatttatgaatttactgaattattgggaccttttcatttatttattaatttcttaagacgaaaatttggaaaatgttttgcgtttggcgcagcaattccatctgcatgatattgtaagcaaatgtgcacgatttcttggcagtacaaattgtaatattcaaacaatgaaaaaatatcaaattgcagacatttatggattagatgcactgaaggtatgggaattttattattttttaaatacacttattatgggttcgatatttaggtttttgcctattttttcctgagctccctatggtctgaacgcaggaaaacattttttgtggttgttaagctatttttcgtgtttcggcctcaaaattcagaaaaatgcacacctaagaaccgtccctaggcttttgaaacctaaagaaatgaaaaattttctcaaaaattcatctccaaatttattaatttattttttgacaacaatttaaatttttaaaattttgtttttgtcttttaagtacaaaaattatctatagtaatttttgaatgttcttattttaaatagaaatgttaaaatatatacaaaaatataaaaatgccattaactgcgcttgagtaataaattaatttttaaaattataataaataatttaggaatttattttgtacaatttgcttcaagaatccgattttgttgcgcaatattttttgcaaaatttggaaattattgagcaattgagcgatggtgccaaaattgcactaaaacaacgcattaaagaactgcttgaagcagctcagtaattactatagtaattagctgaacgatgatagatcgaaacctgagaacattctgatgaaattgttgatgaattaattattttttaaagaaaaataaatttttattttaaagttcaatcaaaaataaaaattttttaagtcttataaatcataactttttggtgagatgattaatcgcttagcttctgcttaatgatagtttctaaacacgtagagctttcgaatgataccaattttgaagaaattaactgacgaacaaaaaagttatggccattcccatttggaattgtacgaaacgccattgtacgaactgctatcgacccaaaattacaaaaaattataaaattcaatacttagttagaatcaataaaacaaaaaaaaactaaanctttttatcaataaatataaaaaaacaataataaatanntaacaaaaaaaacaattttcatnnnttcatttnntaattntnnnaaatncctcnaanaaactccaaaataatntnaaattnattnnnctnnanattanatnnaanataatcatnntcattcaacacattcaacnnaaattanttccnaaccatattcanaattcttctatctnctnccaaatatttncaccnttttttctcanntnacaatccancnatcnaanaattntatttntnatcnncnattttctnttcacttctaanaacatcaatnaaatnccacaacnatnaataacnacaattaaacacaccttncaaacnntnntnctcaacttctncattattcttcntcctcacatctccatccaatatccnttaataaacattccactattccttactanacaactnttacaaccatntnccattanaacaatnacacccaacataattntccaaaancctaaaaaatnattctaaaattcaaaattttattttctnaccaatcaattaagggtcgaaaccccacncaaatttccaaattcgatcctagtaaggtcaaaggattcctgacatcacaaaaggaacgaaag

SEQ ID NO: 8066 - DNA, 4264 bp, Heterodera glycines
  unsure (1)..(4264): unsure at all n locations
tttcccatttaatatcttttattcattacctcattgttttttagaaatactatttatagaattttttgatgatcataaaaaaaggtttatggctcggctctatcatcattttggaatttttatgaatttatccaaattttgccaattttatcgttttcccaaaattttgggcattcgtctaaatttttttcctctcccagtgaccagttcaagtgggacgatgcggcttcacgcgtgcggacattggacgaggcgttcaccaagctggtcgacatgaacaatctgatcaagcagcagccgccggtgccatccgtgaagagcaacaacaccaacccgtttgttgtctgatcactcgctcactccgctcgctgatcaacaaccatcgagaccgactgatcagttttgccagtggtcgcgcgcgcgtgtgtgtgaccgatcaattattgattgtttttcttccattttttgtgtccgtgtcttgtgaatgtgtgtgacagacattattacctatatcattattattattattaattattattttaattttgatttttgtggacaataacaataacgacaataagcttgcgtttaatttaatgtatttgtatgtttttcgccacacaatttcttaacacatacacacagcacacgcgcgcatatgcacatataccatacatacatacatatataaaaatatacagtatacatacaccacacgacatacatatttttctcatcattgttttgttttcactgtctgcccttcttcctgttcgtcatcaattaacgcgcatttttcgaccctcccccattgattgattgatttataattattgcttaattgattgtttgatttggtgtgccacgcgcaaatcgtctgtgaaaacccaaaaccatgcaaaacacacgcacccgcccattccccccattttctatcattgacttaacacatttgaattgattgatttattggtaataatattatgatgattatgataaaatattggcaaaggaggagagaaccgagttttacagtatgatttttatctttttactgtacaagctctcggtacactaaattcgaccctttgttcgaatttggatttggtccatttcaaatttgctaatagacctagattttgcgccaaaattatcattttaaatttggcaaaaaaatgaaaattttttgacaaaattaattttcaaattttaattaaaacggcttttcagcttttcatataacaaaatattttttttacaattgtttagcgcatataaatttaaatcagaatgggtcggaattaatgtcatagaattgtggattttttccaaccacgaaacatcggtaatcaaaatttaaaagtgatcaaaaatattacagaaagttatactagtccgatcatcaattttgtgtgtataatgtgtacaaatgatcaatgaatgaagaatgaatggctcttttcataaaggagagaaatgaaaacaaatgcgttgcatcatcaaaataaaaaataatttttcatattttcacattaattagtggggctgctacgatggtctcgcgaacctcagaaatttgttggcactttctgttttggaatcgcacaccaaaaattaaaaaaaatttgttttcgacaaaaggcgcattttatcaacaatggttgccggcatttatgtccctcctaaaataatgccgtgtgctgtgttgtgaattggcacgctttttttttttggtgtgcgaccccaaaataggaaaatgccagaaatttgttggccgaaactgtttttttttgttaattttttcactggaataataattccatcgggaagtcatggcaatgaatgaatggcctcgtgttctcgcgcatcatttgggaatattcccaattctcgagttttggcagcaaataaatttttcagtctcggccaaaacaagaaaaaataaattttttcatttttcaaattattgcactgccataatctcgtggcttttgtcttccgctgctgttccaccctcacaagctgtagcggcacagttggtggttgtgttgctaccatcatgattaccatgatgaagctcgtcctgctccgtctcctcctccttgtcgtcgatgtccggaacggtgggcaacattgactgctgctggtgccgaaagtgcgttcctcgtcgtcgtcgatgctgaccaccaacagtagcagtagttggagcagtgccattgttgacattggcaccatttctacgcatgccaagcgatgccatcagcagccgatggacctgctgatgatgatgatacttccgttttggaggaggaagcacaatgggggcggaggaggacgacgacgatgccgcaagggttgaggaggagaaggatgatgatgtcgggccaacaacaattggtggtgctgcttggtggtggtgaagccgattgtggcgatgatgccgagcaatctgctgctgctgaacagaagcatgtaagcaaaaaaatttcaaaattttgtttgagaatttcgaaattagtaatgtttgagacccagattctctcgagaacgtttcaattggctattttaatcattatttgcctgctgttgaactgatggggacgatgatgatgatgatgatgatgagccattattattattatgtgcaatggtggacaaaagcctgttgggttgaaaatgatgccgaaaattggagagcaactgtcgcccgccgacggcgccacccgccaatggcattttggtggcattgaaatgggtacaattccacattcttcgaaattcaaatatgcttatttctcaaataaatattaaggaaaggcccggcgcggcctctatttaaaaaaattagtttttttttgttgaaaaatccagacccttggattcgggagaaggggctaacactctaccatttttcacgatttttttttaaaatttttcggtttctgaaggcactccccctgaaaatgccattgatcagaaatccaaatgctcaattaaaactgtcgcgtatttgcctaattgaacagacgagaaagattgatcaaaaacaacggcaaccacctgtgctgattactgcttttttcaacagcatggagcatcgacggtttcttcacaaaatgatgcagacaatcactaccatctccggccaaagaaacaccaacattttcggcaaaagtgccatcatcgtcgtgatcatcattattgtcttcatttggcactaccatttttttggtccttttctccgctcgtcctcctccccatcctcctcttccaacaccaatgccatcaaaatcatcattatcctcatcatcatcgatggcatttctcatgccgattaggcgggaagcagcattgttggcaccacgaccaatgccgttgttgcctcctattctgaacagttcctcggtagatgccaattcatcatgttcgtcttgttcggacggcattggcagacaagcgcgggtcgaaaagcgtgccaacgaagaccgcggtggaggaggaggaggtgccgtccgcttcaggtgcttttgctgttcatcatcttcggcatcctcctttttggtgccaccaccatttgccgtttgtggcaattgccgttgttttccccccgcggcgcttttgttgtttgccgccatcattatcagatcaaagattggattttcgcaattttgtgctagcggcggcgattcttcgctggtgcgatgatggaatggcactgattgtcgctccaatttgcttaattaaaaaaatatatttttttttgttgttgaattagcagattagtaattaagaaattacaaaaagaaaaaaagactaggactcgtaatcgatccgaatcaattagcaccgataatttgaatatgagcccaatttcaaaataaatcaaagttcagtcccggacccgagaaacgagaggaggacgagacagtacagtacaatgatctacagtatatcagagcgcatactgtatgtacgcactttgtttgttggcctgacgccgagtacgtcgctggtgactgttgtggttgtatgggtacggtagttgctgctgttgttgccgtctttgtggcggcggtggcgacggcgggcagtaggccaaagcatgggtttgccaacgaaatgtcgagccgtgagaattcggtggacggcgatggcacagtaatgcagctggcgggtggtggtatgggatagtgatggctgctgctgctgctgctgtacggtaccgcaacgtgngaaaagccgttggagggcatgaaaagcgcgc

SEQ ID NO: 8067 - DNA, 1859 bp, Heterodera glycines
ctcggcatcagtgccaacaacgacgctggcccaactatcagcagcgatgggcggcggcttcttttcaacgagaaccaacgacgacgacgattgggtgacggcatttgctggatcaaataagaaaaattttttccaaaatttttaaaaaaatttaaacgaccattttctatgtatgtatgtcagtgtttccaattccaaataccatcattgtttgatggcacaaaaaaaaaaaaaatttaaaatcccaatatgtaaatgctggggctctaaaaaattttcgatactgtctcatttttgaaggaggaaaatttttaaaatcaaatattttttcgaggaaaaaaaaaaattaaatctgagggaacgaataaaaatgttcaatttcttattgcatttttgttgataacaattttccgaaaaatcctaaaataagcaccaaaatcgggagggattctcgaatcgggattccgtccaaatccccgatcccgatcaacccccaatgaatttaaaaaaagctcgggatggatcccggagtcggaaccccccccccccccccccagaattaatccaacaatgattccatctttaatcccgctggattccgaattgaagacgaatgccaaatttgtttgaaaaaatgccacaccattttggtggttgttgttggtcatcaaaatgggagaggacaataatggttggtgttgtttgggtaacacctggcagttaaaaaatgataaattttaatatgcaaaaaaaaaaaaaatttaaatcgcggtgtatctacatattattattgtactaccacaccttttggtcacgcaacagcttctcatactccatcagttggcccaaaaaattgaaattcggcgaaatggtcggccgaagattctgtgtgaaattcaaattaaaaaaaatttagatgaaaagttcgactcggacttggatcctggcagcctggggttttcctgggtccaggtcagaggcaatttttggcaacttagatttttcccttaatttttcctgggcctcaatttcccttgggttttcactgatttttttttgctgggcctggatttccctgggatgttccttggcctggattttttcacttagtttttcctggacctcaatttccattggttttcccggtactttcctaggcctcgtttttcttggaaattttttgtccacagaaattccagacccatgtctcatcagaggtccaggcataaaaaatatgtcagcgaatgtcgtccgtctctcaccttgacaaatttgtacgcctcgtcactgaccacttgctttgcgcgcatcacataagcaatgaccagggtgggcgaacgtgaaatgccggccaaacaatggaccagcactttgtgccccgaggcgcgagcggcctctgagaaattgaaaaattgtgtgtaaaaggtggaaattcacaaaaaatttttttgggggcttgaaattttgtaaattgcagagatagaggtgtcctgggaaattttttttttgtatatttttactatgagaaattaaattgtttctaaaaattttaaaccggtaggaaattttttacaagaaaatttaaattgcatttttttttgtgtacaaattgccatttacccaataaataaaatgaatgctgaagaaaatgttacaaaaaagtacaaaattcgtaagtcagtaagaaacaaaaaaaattttttttaaattccaataccaataggagaatttttttttttaataaaattcccaaaattccaaaaccgatgaattcaaaggcggcatcaaaatggggcaacagtttggcactgtacgagtctttgattggaatgcgcaaaaaatggtgcccatctgccggc

SEQ ID NO: 8068 - DNA, 1567 bp, Heterodera glycines
ttttttttctcccatgttccgatcactcttttctatacctgttcaatcacttttctctccccatgtctgatcattcttttctcttcctgtctgatcacttttctctatctgtctgatcattcttttctctccctgtctgatcacttttctctccctgtctgatcacttttctctatctgtctgatcattcttttctctccctgtctgatcacttttctctatctgtctgatcattcttttctctccctgtctgatcacttttctctatctgtctgatcattcttttctctccctgtctgatcacttttctccgtgtgccctatttcccctatttctttctgcacgtatacttttaatttattgcatttgctgctgctataaattacaaatttagtcattttgtttttggtggtgtttagcagcccaattgcccccccccctcccatttttccctcgggcggcgttttatttgctcttttctcacacaacagcagcagcatgggagtgcccgtaaaattcttttctttctctttctcttcactattccatttctttctttcttcttcttttccttttagtttacttttctttttcccatttcttgctcttttttctctcaaaaatttcctttttgcctctattttctctctctctctctctctctctttctctctgattccctttgttttcttttctcgttcttctttttcctccttcctttctctttaattcgttcactctcttttcctccagatttctatatttttctcttacctattgtattttcctaaattcactctcttctctactttctctctctgtctctctctctctctccctccatctttttctcttttcttctccacatttttccatccttctgtttctattgggagcaaaaacatacacacacaaaacagcaccacacgaacaacacacaaaactctcacatttttttgtcctcccgaaaaacctatcaacagaagagaagccgggggtgggggagaagctcctccgcttgcttgcttcaccatccatcgcctgcgaaagccaactgcgccacccgtcgatgaaagcgagaaaagagaaagcgggagagaatgagggcgcgggggagaagcggggcttaatacactcttattgttggacggggaagtgattgctcataagcaacagaagagttgtgggaagaaaacagcgcttgatcagtgtgctaatggtttgataataattgatcagctgccgctgttgctgctgatcagagtgccggccgaacagttttgtttagttctgatcagcggcttccaatcagttgagattggtgggatgattgcaataatcaatggctgatcagggagggttccgttctgatcagctgctcccggtcagctcggatcaattaatcaaaatcttttactgattgctgctcatgttttcgtttgctcagctggtccattattatcatagctgatcagtttctccccgtacactttctgatcactttgcttaaatgggatgaccaatttttgaaagatataaacacaaattttttttaaattaaattttt

SEQ ID NO: 8069 - DNA, 3197 bp, Heterodera glycines
catcacatcacatcacatcatcatcattagcccataaaatctcatctgtgctcaatgcatgaaattttttatgtttttttgagtgagcgccattttctgctggtgctgttttggcattcgtctgaacagcgagattttgttttctgatcagactttcggacatttttcgatgtttttgataggcaatgttgatcagaagaaaactggtgtattggtctgagcaaaagccaattctttcttaattctttttagatcagagcttttctgccgctgtttggcattcctacgatcagtgagtttttcatgctgatcaaatttttttttgtccatgcgatggtccttctgatcaattttctttggtgatttacaaacacattactgatggattaagcgaaatcctttctggcaattttttttggtctttggaatgcttcacgttctgatcagtgtcttcaagattggattaatctgatcaaaatgtctttcctgatcagcattctgttcttgtgatgtcatttccgatcaaaattgtgccttttccttaatttaatctatttaatcaacttaattacattttcttctgctgcttcagatcaatagtcttgggtaaacaacgataataacagcaaaagcgctggctgtgcgcaaattgtttgttgttgcttagcagctgatcgatcagccagcatcgcgctggccagtgatcagccagcagcagcattctgatcagatcagccattctttcatttccaatcactatctgatcagctcccgtctgtaattccatcgaagccggtcactgatcagccattgttccatcatcgatcaactgatcagcttccttctataaccgtcaaagcccatcactgatcagccaccccactcggcgccctcgtttcgaagccagacattagagcgcgagcagttcagttccaatttcttgttgggcacaaaatcaacggcgggccgacgcagcaccagcgcccagcgaagcagcagtcgatttggacgacgatcgcgtccgcagctccaccgcaaccgggattactgtgcccaggtactgtgggacaccggcggcggaagcagccgcagcctcagcagcgccggcggcggctggcgctgggccggcagcggtcggatggccatttcagcgccgggcgcgccagtgccatcagcagtttcggcactgtcgtcaatgagtcgctcacggctcagcacgtcgttggagcccatcggactggccgggacgaggtgagtcgacgagtgccaaccggggccgggactcaattggcgggcctaaggtcgcgagagtaatcactaattacccacgcattattactggctttgacccattcttgcgtcccgatcagttggaattcgattcgctgggcgcgcccgtcggcgggcgccggctaccgcaccagtcggctggccagtgcatttgagactagcggcgccagtgccggcggcgccacgtccgcctgctcatcatcatcggccgcctccaccgccgcaacggcaccgcgaacgcattcaccgccctttggctatgccaaactgcgctcgtccgaccgcgcggcgtccaccagccgtccactcaatgatggcaccgtgatcagagcgtgggcgcttttcctctcaatccgatcacttttcggcacttttttgcagtaactcgcgctacggcaccacattgttgagcagcagcggctactcgccaatcaatgcgcgtgccgtctcgcagcattctgtcgccggtggtgccggtggcggatcatcgtcgttcaaatcgccacgacaaaaaacggcgacgacgacgacggcaccggcattggtcgcgtaccggccgatcagtggcagtagcagcatcagtcaaccgcgcgctgcactgatcgacatgcggcaaaatttgcggccggtcaacaagcggcattccggtgaatgggggcctgaatttgagtctcgcagtcaaattagggaggtcagcatacaattcccggcaaaatccctcaaaattcgcgtcttaatgccgggaattttctaaaattattttttgaatgtttgcgaaatttcaaaaaaaatttccactaaagaatcatgcttcttgggaaatcccgtaacaaaactgtcttctgctgatggcttaataacaaataattatgccgctttaatcttggcactgactaattagtggccattaattaggccgctttaatcttggcactgactaattagtggccattaattctgccgctttaatctcggcactgactaattagtggccattaattctgccgctttaatctcggcactgactaattagtggccattaattctgccgctttaatctcggcactgactaattagtgtcccattaattattgtcagtaacggaccaccatctacaccattcttcttcaacaatgccgatacgaacgtcgtccgcaagcacactgttgagcaacagtgtccgtgccgcgttcgccgcttcgtcctccgccatggcaccaccgcccgctctgttcaccaatgtgtcgccaacatcctcatcagcaacaaagtgaatacaaatttttaaaattaataaaaacaatttttgcttggccatttcggtgccgctgtttgagttccataggcttttttcggcgcctttgatctgatcagcttttcacatttggcactatttttctgtccttgttgatcagggatactccagacaatttagcggttcattttcggggcaatgatttagaaattctttgaaatttaaggactaacttttgtgccacaatttggcgtttgattttgtaggcctaatgattttcaaaaatttaccgttcgccttaatgaatgttaattaggtaattaattaattaattgtctgttccttttcgtatagtagcaacattcttcttcttccttcatcctccttctcacattcccacacttttctcctcttcccatccatcaatcattctcatccattcatttattattgaccaccgtccgtccgcgtccgtcccattcattcattctttgtttgttttgtttgtttgcttttttgtttttgtgctgtcattagcgggcaggaaaagtagccaaatgctgatcagcagaggagttgctggaaagtgatcagcagccacacatcaatcaatagccgctgcttaatcccggtgtgggatggggcgggagcg

SEQ ID NO: 8070 - DNA, 1122 bp, Heterodera glycines
gggggaaatcccacccatcccgccgctccacgcccattgtttgtatgtgtgtatgttgcatgatgcgaaaaagcggactttcccataatcctttttgcaataggaagctttactaatccccgacccttcggggacaacgacactttcggggatttggtatttcggggattgggggggagggcggggatgcagacagaacaaacactgacatacaaataattcgctatatagttggtgacttttggggtgtgttaaaggaatgctcatgatgtgcccctttttctgtgcaaatgttggacattggcatttttctacccttttgtttggagtgccatgactttggggtgacaaaagagggacaacggcaaagtcatttgtcatggtcctgattagagaacggacaagggtttcgatcagtttttttcgataaaagatccaaaaaatattgaaaaaatgaaaaaaagcgatcaaaaaccgatcgtgccggtctctaatcctgatcactttaccgaaatccctggcaccgaggatcaaatgctgatcaaagttttttttctgactttgattcaatttttaacgttgcctttgttcttttcattgttttgtctgatctcggtccaaatttatttagaggaatcgaattttttgactccatttttggaaattttaaaatttcggaaattttgtcgaatttttactcatttttttaaaatttcatcgaattttgactccatttttttgaatttttgaatttgtctgccgttcagcaaatgcgtcacttcgccaaccatgtcgcgctcctcctcctccgtcacatcaccggtcaccacaatggcgccgaggccaatcccgaagtctgagcgaccgtggcgacaaaagttggctgacgcgcaacgattacggtaaacttttgtttgttgggttacggtgctttctcaaaaaaatgaaaaattaaaaacttggccaaaccccccaattatgttgctcatttttgcgctacgacatttgtggcccaagccaaaattggatttttgcgactaacagaacgccaaattatcagtctttttcaatttaaaaagtagggttgaaaaatttgttgaaaattcaaaaaataattgtaaa

SEQ ID NO: 8071 - DNA, 2685 bp, Heterodera glycines
aaaaaaaaaacaataaaatttgcttatattgaattggacaaaaatttttgaggtttatattttgattggtgtcgaaaaaattgggccgctaatatcttttattgctgattgcagcaaaagtttgaccacaaatttcgaggcagcaattttacaaaaggagtggggccaagtttagcgacgattttttgcttgtacggagaccaaacaaccgttatcgccgacaattctttgccatgtttcgaggccggcactaaacaaaccgaatggaatgcaaagaatggaaacggtcaatcggacggactcatcggcgatgccgcctttgtcaacggccccgatgaagtggcttttgcccctttcggcatacaaattgaagccgaattcctcaatgggaccgaaagcgaagaaatgcgccattcccctaaaaattattgcttcagtagcacccattttgtataatattactattttaattgattttggaggtttggaggttcacacattaatcaaaaatataaaaaccgaacattgccccccccccccccgaaacccaaaactctcgcagacccaaactcgtacttttttgatcagtgcgcacttcgcggcttcgatccagcggcctaattatttctcaattatttattagaccataccctttgatctgtgcgacctctgcagttgtgccggagttggtccttcaattggagtgcggttgtgtcgcggaattgtggccgtactgtaattaccagcaaagggaagcgcgggagtggcgaaggcgaagaaaattcggaggggacggggctaacaaaaaaaaattaattatgctcattaagaaaagggcaatcaaacaaaattgtccaaataagagaaaggcataaaaatgaatgccaattgcggcggtcaaatgctcatctgttggcattcgaaggtgcggttgtgccgtgccggtgaaacaaattccgcgtgccgtcccctgtttactccgtcccaaaaatgagagatgaaaccaataaatagatagtgccgaaaatgaagcaataaatagagagtgcagagaaaaatacacctctcatttcggcgtactatttcaatatctctgttaacagagaaaaacagaatttatttctctccattaacaatttttctgtatgtataatgttcaccaattttatataacaattcagaaaagcacggcatttaaacccagttttgaatcggtttacatatgtaaatagcgaaaaatagagccgaaaatcaaccaaaaaaaaaactttattataattcgaagactcgtgatgaattaagtcgaaaaaccagtggatgaagtcgaagtaaagcaaactcagagtttttctcaagagttaaaaaccgaagaaaattttaattatttatttaaatttaaaaattaaattttttttattgcgcttaaaaccagcgcacattcgactacggcggccaatagttgggctgagactctgggtcccggataaagttctcgcgtgatccgcaggcggttgactgattgattggcgggggcccttcagaccaccgcagtcaaccgcctgtggcgctcgtcagattgggtcgtccgccctccgtctcgttccgtttattgcacctctgtgttcagaggtcattcttcagggtgatcagtgatcaagatttagcaccccctaggaccttaattttctctaacaattttttagcataataaactccaaatcctccactgaaattcatgcacagacattctacaatcatttttgattttgaaaagaagcagacaattcagcaacattcgtagaaaaattagtgccattcaaaatgccaatgtaataaaatttacgcaatttttgcagagctttttcaaatcgaaaatgattgtcgtatgtctgagagtgccgcattatcacacctttttctctcttccctccgtttccctctcctctttcctatttctcgcttcctctctctgatcgcttctctcgatcccttatttccccctccgctcatttttgcagcccggacatttgcggtccggacatttgtggcctgctgataaccgggcatcgattgtcaatttataactttttttgtaaaatatcgaagaaggtaattataataaatgttaagaaatagaggaatacatatgttgttacaatataaaacgtcattgcatatttattagaaaatttattagagataattttaataacaaaaatatcactgtataattgtaattattcaaattgtaattaaatttttgatgtcttgtgaaaagtgaaccgcccacttcggcgccggccttttcggcgccgttgctaacaacttttttcctgatcaaccaaattaaaaatttttgttatcattcgatagctcttcagattctctattagcctgtaaaatttcaaaaaatttcgtcagtttacaaaaaagttatggccaaaaaacctcaaaaattaactttttcttggctttttcggcgccgcgtggcataacttttttatttttgaatcattcatttctatttttacatgtaaatatagagcacacatagagctttcaaatgatgccagattggctaaagctaactgacaaataaaaaagttatagcatttcaaaatttgcggcgccgaaatggtccgcgctgaagtgaccccgaccctgtgaaaattataagccctacaa

SEQ ID NO: 8072 - DNA, 2288 bp, Heterodera glycines
aaaagagatacccatttttctgagaattaaacatcaatttacgcagctctagcggtaatagaaaaaatttagaagaggctctgcggaatggattagcatcggggttacgagatagaaaattgtcctaaaaagagatagccattcttctgagaattaattcacaatctccgcacactcttgcagtaatggacaaaatcgtgacgagcatctgcggcctggagaagcatgggcattgcgagatagaaaattgtgttaaaaagagataggcaattgtttcagatggtataacaaatattctcgaactattccggtaagcaaaagtcggttccacgaatgtcccattatcagcagaccgcaattgtccggagcgcaaatgacttaacacgcagtgaatatggaagaaaatgtgcaaagaatggaattggcgatggattaatggaaacgatcagctgacaattatgtcaacaatggcaaatggaaataatgaaaagaagaagaccggccgtgaggggatttaaataagtgacattagggggggggggaaggcaggaaagcacgtatttcagttggaagcatccaattgaccaattatcatttcctccgtctttttccctttgatcggtgttctgtacttccttatcactgctcagcacagtgaacgctctgaacatcttcaaattccccaatcagtggaccaacaacaaacatcggccgggagcaggaacgtcaaatcgcggatcgttagcacgtataaggaagctagcgattgacggattgaatcattattgctaattaacggttaattaattggacacggcgaatttattctcctcacaatttcttcggtgaaaatgattgtttaagaaattagccatttccttgtactataatgccatgcctaacgtgatgtccaatgggaatccgattccagtgggctacgccaattttggcatagtcagatggaattatgagatctctgctgaagcaacattttggcaccaaaagagcccccctcctctggctatttgttctcatcctcctcttcatgttccgcctcctcctgcaccgtctcctccgcctcggcgcttcttctcctaccgacagtggattcggctcacccgaagtgaaaatgccaaaatgagcgggtgaactttaaaataaaagagttccaatccctatgagttttgctttgtgattgctttctgctaatagcgaatcgctgattaaaacatttccacttgctgattctcgtttcatgcccccccttctttcattaaattttgcaatttgaaactgatgactaatgcgttgcatgccgactgactgtacgcgttgcgacagagttgagcgcgatgaagtgaccccggcccgggcgacggacaagaaacagtcgattttgacgagaggacgaaaaactgagcgtttggagaatgaataatggggtatttccatcattgtttaggctatcgccaagcacattctcccaccatcattattataattattatttatttttttaacattgcaatattatattgaattatgtccgaaaatggaacaatgcccaagaaacgaaaaaattttcattaataaatcaacatataaattaatgaaatactgccaacattaatttcacaaaattctcaaggtgtgatgaattacaatgatcagagaaagttctttattgaaacaaataacaatacaaaatatgtgaatgaatggtttatcataaattaaataaatccagggctggggtatttaatttcaacaatttttcccattaaaaatttctaaaaattcttaattatttcctccctgcagattgatcaatctatgtatttcggctttaaagctttcgaagtccctttgcctcaagcagcggtaatactcctgtcgccacccctcatcaagcgtgaccggcgcgcatcgcatcccgcggcgcaaaatcaagttcataaacagccgggcggtgcgcccattgccgtcaaaaaatgggtggattcggaccttagaagcaaatactatagagcgtcttaaaaaataaataattaacggtattccgaaattttccgggagtaggactgggaatccagtaaaaatcccgtccatttttgttagtcccagacaggagcgtttaatgaactaattttgaaggggaattattttacgaaagaaaaaatgcatctctcttttctgttgcgttttttagatgcattcccagccatttttgggcaaggtgggggtggttaatgagtatgcgtcgccggagtaaaatagaaaaatgaatg

SEQ ID NO: 8073 - DNA, 1137 bp, Heterodera glycines
attcgggtccggggttcgggattggcaacggattctgaccagcgattccgaaaacccctgggaacatgttttcgtgacttttgaaaacataaaaaaatttcaaaaaaagggtgggggaggggcaaaatttactattaccaaatttttaaccgaacaatcctcaaaatggtcatttttgaggtaatccttcggagttttttaggctaaaaaatacgctgtgaccacaaatccgagctcggattttgcaaaatcattgttgatttttttttttacaaaatttttcctttctaacattttttggcggtaaatttcagggcaattactttgttgatactaaacattttcattgcttttgttatgaatgtcattttttagttttttttataacatacttttttgcgtgaaaaaggaaaaccaaattttagaaaacaaaaattttcaaaagaaaaatgaagtaattgatgaaaattcccagacaaaatcaatgtttttgcaaaatccgagctcgggttcttgattagtgcattttttttaccctagaaaagttatttttaagaaaatttttatatatttttttccgtcgagagaccaattccgaaaaattaccatttttgatatgaaaaccctgttaataaaaggcacaacactaaatggccaaagataagtgcctaatttgggaaaacttacacttaaaaaaaagtaattgccttgccaaaatcgttttttgagcaaattatttttttttaaaaaaaatctgaaatagtagcgcccatgaatcgtaagtaatccaagcaaaaaagtgccagaaaatgattaactaaccgaaaaaaccaaatggcattcaccgcccagagaagagggagacagacgaagcccacatggaaatatcgacggcacagcagcagccgatcggcaccactcaacttttgcagatcagccattaatcaaacaaaaaaaaaatagtgaaattgctgctgaaaaaacaaatggaaaaatttggggtacttgtgcagtttacatcccataaaatttttttttatatatataaattttttaaaaccaatttttatagattttcggggtcgctgatcacgaatctgaactcagggtcgtgttatttcgaatcccgaacccgaa

SEQ ID NO: 8074 - DNA, 2626 bp, Heterodera glycines
  unsure (1)..(2626): unsure at all n locations
taatatgtcgcgggcattctgatggagataccataattcatctcatgtcattctattagactcctcagccccccccccttgcctacgcccttggccattatggaatattgaaaggatttgtgaaaaaaaatccaattttccacaaggtatcgcatttctcaattttgttaactttgccaacggtgtcgcattgtacatatgcattgaccaagttagaaaaaaagtaatggcctaagaaacgggggatttgtcttttattggacgcataaaagaatggttagatgctttgttttgtaacacggtaaaccggaaaagaattaaggaaaaaaagagattttagattctgtaacaaatttttgtttataaagccataaaaagatgttccgagagtttttggggtcgctgatcacgaatatgtcattcattttggccaatttcgaacagtagacccgaagttgaagaaaagtagaaaatccaaatttttaaaaattcgtttcgaaatgtacttcatttctaacttcaatcagtgaataaaattgtttgccttcattttaacttaggtatttacttagagaaaacagtaattttaataaatttcaaccctacatttgaaaattttttgcccctattttcgcccctatttcgcgaattttttgcccctatttttaggtccctattttgggctttttcgcccctaaaaatccgcgccctaattataaggttttcgggtcgctgagcacgaatatgacatctatttacccaattccgaacccctaacccgaattcgaacaaaaagtcgaaaacttgtcctttttgtaaagtgttaaaattgtttccaaacatgtacagttgggtcggggtcagtttggcgcggaccgttttggcgccgacaattttgaaatatgataacttttttgtaaactgacgaaatttttgaaattttgcaggctaatagacagggttgccagattaaaatttaaaaaagcctcatttggcaggcaaaaaagcctcattttgggtcaaaaagcaacaaaatgtattctaaacacgtttaaaatgttcaaatgttataccgtatatgctctaattatagcccagtctctattaatcccgtagtctccaattatcccccagtctacgaggtgttttgaaaaataatccctctatcataatcccccagtctctaattatccccccttttctgaggaggttgaaaaataatcccccatgggctataattagagcatatacggtatttttattgtccatgatcaatagggagtccaattatatggaaatccatatttgttcctggactctgggaggcctgaaacgaacgaaaaacatgtttttagctcggtttgaagcttctaggatagctttctatatccatatttttccatatttcgcgatttatgtccatatttccatatttttccatatttcgcgatttatgtccatattttatgtccatatattggcatatttccaaaaaacccctattagaacggcccccatgaggtaaatcggcctttttgactcctaaggaccgaaaaaatttctgaaaaagacattttttagcaaaattttgtcgaaaaaattgataaatttaaattttattaaaaattggttaatttatatcaaaaataagcaaaaaatggaaactttcgattttttggtcgattttctcaagaaattgctttttttcttctaaaacgagtttttataccgtatttagccatttctgaaagtgttactttgtgccaccaaatcttgttccctattataaatttgctccccttacctcggttgatgttgagcgttccttttccatttataagtcaacccttgccgataatcgaatgcgtttttcaccccaaaatttggaaatgtatctcatatgcaatttcaaccaataaatttgaagaaattttacattcaattttgaaaaatttatgtccatattttgacatttttgccattttatgtccatattttgacatttttgccattttatgtccatattttgacatttttgccattttatgtccatattttgacatttttgccattttatgtccatattttgacatttttgccattttatgtccatattttgacatttttgccattttatgtccatattttgacatttttgccattttatgtccatattttgacatttttgccattttatgtccatattttgacatttttgccattttatgtccatattttgacatttttgccattttatgtccatattttgacatttttgccattttatgtccatattttgacatttttgccattttatgtccatattttgacatttttgccattttatgtccatattttgacatttttgccattttatgtccatattttgacatttttgccattttatgtccatattttgacatttttgccattttatgtccatattttgacatttttgccattttatgtccatattttgcgatttttagtccatattttgcaattttatatccatatttttggactccctaatgatnncattgagcattttttttttgtagaataagcattttttgggatcctgacatgaaaaacgaagttgattttttgcggcgttttcccaaaa

SEQ ID NO: 8075 - DNA, 3714 bp, Heterodera glycines
aattaatttttttttccaatttaccaaaaatttgcttgggcatagaaaattaaaaaaataattttttttttaaaattgttaaattttctcattttttggataatccgaaaagaggtttttcatttatttttttaaattttgatttttggaaaattaaaatttcaaaaattccttttcgctaattaatctttgtgcttaatttcattttttaatctaattcatcgccaaaaaattaatgcttatatgttcactaaatattaatgaattctaaaaagtttcattatttgctatattatcccttaattaataaattatattgcctaaaatttccataaaaccgaccataattggtcttgtgaacacgtccaccttcgtgccaccattttgttcatctccaataacttggccactttcgttttgctgtgcttgtgcaacgctgcgcacctttcgctgccttttcgacttgcgtcttcgagtggtgtactgctcggtgacggtgtgccgtggcacagttgcggcacactttggcggtgttatgccagcgcagccattgtccaactttaggcacaatgtaatttggcacttaaaaaagtggacaaacgaataaatgaatgctgaattaatatccgaaaaataaaataggcaaaatgttagtaggcgcttcgtgtgggaaccgaaccttactcctccatccattcccaacagggctgcttggcgtaattacggattactggaaattacggcgtttttggaccccccccccgtcattatggattacggaattcggtaattgagaaactaatgccaataattacggattacgggtttccataactggaaatccagtcacgcccagccatgtttctcagtacattcacaattttttatagaattgattttaatttgccaatataattttcttcttgaacatttattaagaatttacctgaaactgtagcacagggcggtctgcatactgtaggaaggggaatcaattactggtaattaattggagattaaaattatgtaaaaaattaccaataaagattgacattaaattgctaaaaagcacttatagatacttaatttagccgtttttaattcatttagcctaattttgtgagttggacgattcagcttcaatttttccaaaaaatgtaaaattaccaacaaaagaatcttgaaagtaagcgaaagttttgaaaaaattacaatatcttgaagcgactttcctttcttattttatgacgtgccaaaatgtgtgccattattttcagccttcaaataattggcaatgatcttggactaccttgaacacatggtattccttggtggccagcctcaatgtgctgtcgtagtcgggagtgcgcaacagtacggcatccaagccacagccacgcgagtcgagaatgtccacccgatcaccgaaaccattatcaaccgaaaacaaaattgacttgcagaattcaataaataaaaaatttatttgctggttgttgttgccaatcaaagttgcagacaatgatcaaattacattataattagtggggtaggtcacggttgtttaaccgaaccaaacctcgaaaaacgggggcccaaacccggcctaaccaaaaactggtgataacggtttttcattttaaaaaaattcattcttaaaggtcgtggttattataaatgtaatcaaaaaacggaatgtttaattaatgttaattgtccaattaatttttaattagaaaaacttacaaaacacgagtggacaagcattccgaattgatcaccgttcagctcctccacacattcccacctatggaacacgctttgacctacaaaaaataattaaactaattagtttatcaatgcatcataatgatagacagttttaatttttatagattgtttcaattacagaaatttccaattactgcccaaataattactgtaaatttatagtgctcgatcgccttgcaaacttactgatacttaaataaaactatttttttctatgaaaaaagaaaaataatgagttaccaaggacggcatactgtactaccgggccatttgcatggtccttgcgcagtgtgtattcacagcgtggcatttggtacacttgttgatagaattgggttgtgatttgactgaaatgcaatttcctttttattaaaaatataaaattaaattaatttataaaatatttcgcaaaaatttatttaaccataattaaattatgaaacttctaaaaaaaattttttgcctgacttccatcggtactttgacttctttctcagcctccatgtaaaagcattgaattttaaccatttggtcaacttttgtcatgaaactacaaaaattgagcaataaattgtgtgaatttttaattaaattaattcgtttaaaaataaattgttttaaataaattagaattttacactggatggaacataaaaacaacctaaaaataataaaataatttattttttttcaataaaacttttaaaagatttaccgccatctctacaaaaattccacggggattaagctgaaaataaagccaaaggaattgaaaattatttataaattaattaaaatatttagtttagaaaataaattcttcattttaccgatcgatatcgacgcacattgcaatttctgaatggcacggtgatgccaatgattctggaaaatgccatttttatgaacaaattaatcaaaaaatggtgccattttacccccatcattcttaaaaagttaaaattaatttttcaattaaatactttgggtcgggaaagtgttcaggtcccgcccggcattcggcacgatcaaaattgtcttgcacaaaaacaatgccatcaaactgttttttggtgcttgcgcgcacaccaattttgtccggttcacaaattatttcaggcgtgccagggtcttggaaaaatatttttaaattaaaaaaaaaattatggcgaggtaattcaaagagaatttttgtaatactgaatactaattaatatatatttaacatttttactaatttttatttgcgtattttgtttttgttttttctctgttcattacgaactgaggaaagaaagtttttttttttataagaaaattctaagaaaaatttttttgatgtattttcagcgattttttggaaaattttttgaaaattctttgtaattccccataaaaatttcgcaaaaaatgttttttcatatttgttagaattttcttataaaaagtctttctaagacttttttttcttgatgccaaatttcataaatttctcagatacaaatatggaaggttttatggaaagcaaaatatacacgcaacaaaaattggcaaaaaaaagagagagaaagggaatggggaaggagtttggtgaaaagaaacaattttttgagtatttgttttccccgtgttttctttatcagaaattttcatggattttcccaaattatccgtgcaaaatgtgctggtgtcaaaaaaaaaatccggttactgaattcagattaaaattctgtttgttcaatcaattttaaaaatttgtcgaaatgtttacggaattcggtgctgcacatgtgccaagtgattgagtcggccaacgatttgtccaactgatcaaacggggggggggtgtgcacgcgaagcgcataaacagaagaagagaaaaagggggcgaatgttgaccaaattggtgacaccaattgcgta

SEQ ID NO: 8076 - DNA, 2512 bp, Heterodera glycines
  unsure (1)..(2512): unsure at all n locations
aaagggcgccaaattaaattgaanaattcgaattgcaaaaaaaacttttatattttgaataacaaaatattttttctttaaagataaaaaataaataaatgtttttaatttaaaataaataaatacttttaattaaaaaaatacttttaattacatttaaaagaagttaaaaatcaaaatatatttaatacatatttattatataattttgaacaattttttaatattttgaattgtattttaaaagaaatattttttatatttaattttaattaacaaaagtaaaattcacaaaaagaattatataattatatttaataatctaaatatattacatattttttatatttaatacaattaaaaataaataaaatttttcaatcataaaataaatttatttgttgatatatttttttcttatcaccttaatgcctcccagatcatccattcccttggatttgttactttcgagcaccgaatatctgtaaaaaatattttttgaaattttttgtaaattttcaacccccccctaaacctacaaataaaattcttgggacggcgtcctcagctgttgtccgttgtcatcctcggttcccattgttgcgttcagcgattcacggcactgttgggtgttccatgtgttgttgcagcgttgccacggcacttcccactaaaatttgtatttttttggcattatatttttcaaaaaaaaaaaaaatttttgtttgaccccaacagagctgatgaagaagtaaacagcgtgtgcaatgactgtgttataaaagcaggagatgaacgtgcagatgaagcaaatcccgtagccaatcccttgaaaaatatgaaattttaataattaaaaagaaatttaattttggaaaaatttcaaaaaaactaaaaattaaatttattagtataatcggaggttagacgtaaatccgaggaaccaaaaaagagagaaaaccgtcaatttaaaaggatcgaagaaaagaaaatatagaaaaaaaaattttgtcacatttatttgtaaatattttaaaatgggagaaaattataaataatcgaaggttaggcgtaatatgtggtattattggcggatggcgtaagtgcaaaagatcagcctgcggtgggattagaacccacgtcccttcctttccgtggaatgctctaaccactgagctacacagggcgcctttgcactcctttcaatcccaactttaggggaaagaaagctctcttcattagtttgagagagtcgcatatcacaaataaatagggaaaaagaaatttcgtcaataccgaaaagttaaaattgctaaaactggaaaaaatttttaaaattcgtaaaataattttttcaattttctaaaattttttgaaaacgaatgtaacaaatatttaattttaggaactttagcaatcaaaattaaacaaatttttcccggacctttgaacattggacaaattttcttccaaatgctcaagcagcccgaccgatggaattggcccaacgccaattccatgtaaaacattggcagcccgccaaccaacagcatcacaaggtacggtatcagaaaggcgcctgtagggaaaaacgatttaataaatcattaattaattatttaatttattaattggacttaatgtaattctggtattttaattacataaatgaaatggaagaatttcaaggctcccttacattggagctgctccaccctttttaattttttccgaaatttttttcaaaaatagtaataactaaattacaaatatttgaatttcggattcgtaaaatatttcttaattgaaaaaattacgggtgaaaaatgtcaaaattcgaaataattattttaaaaaatgatatttttagatcaattttataaattgaaatttgtttttacctccaccatgtttgtagcagaccttaaaataccaagaaaaatttcaaaaaaaaaatcggaatgcaaaatttatcgacaaaccgatggaaaacgccaaatattgccaaggtcgacggcatagcctaagggggcaaaaatttttggaaaacccacatgggaaaatgaaatttttcaccaataacagcaagcagaaattcgagtttgctggcccatttttcacgtacaaaagaggaacgccttcggcgaattagggctgcctttaaaattttggaaattttttgccatttttttccataaatttttcaccgccgcctgcaggctgaaccgacgtgcgtttccgccgtccacagaatcgctgtgcggcacaattagcagagagccgcgcccgttctgttgcagtggaaaatgtaaaaataatttgctgggacattttatcacaaggacaaatgatcaccaaaattgttggacaaatgatacaatttatcattaaaaaatgtttacagtagccaactggcgagtttgtacagtatagcccaatttattccatgtcataatgtcgctttttgtgtgtccaaaatgtcattttttaaaacataaaatggaatttgtgt

SEQ ID NO: 8077 - DNA, 5478 bp, Heterodera glycines
ttttaaaaaattggggtgccaaatcaaaatttggtccctcgattccggaccaatgtgtcaaaaacccgggacagtttgagtcgagatatcgagactctcgagctctattggcccttcaaaaaatgttagtcccctcacattcggtgccgtgcccgacggtgaacccttcgccaccgccgcctccggcaatgccagtgccacttttttcctcctcagtggtggtgttctcgtcgtcatcgatggccaaaaggttgccataaccgcctccagcagaccacgaatttgccattgctgggccagtgccaaaagagacgaaaaattgaaaaaaaaattggattttcgccgaaaaaaattcaaattttttttttttttgcacacactttggcacaacggtgacggtgccgtgatgctgttgtgaaaatttgtgctcggtgtggcattattgttgtcattgtccaacattatgcctggcgtcgaatatttgcgtcgcccgcccttttggggatgtggcgatgggaaatttttttgctcttaaaattaaaaaaaatttttatcggaaaaattttcattagaaaattgtaacaatggaaaagtgtttttatttattataagataaataaacagcaactcaacagatttatggcttcaaaaatttttaaataaaaataatttttccgtttcttttaaattggacattttgtaaaattttattgtgttaaaaatttcgatttccgaattggggtctcgcaattttcgaaattccaatttgcaatattttttttacgccctgaaatgattttctggtaggtttactccccgtccttcggcggggattaaaaagtcggagattggggagaaaattccacgacaaaggttcatgaaatttaaaaatttcggggaaaattacaaatttttttggcatcggaaacacttagaatagattcaagggtgaaaatcaactaaaaatttgctaatttcttcctgaaattaatatgcagaacagctcagaggttgccatgacattacctaactattaaaaattccaaaaatttttttttgagccgtcggaattccgatttccgtttggctaaatttttgagggcatcggcacatatccctggtgcatattcccttgaaaaaaaaatttgaaattcccaaaatcttagcggggcttactcttacatccctgggttttcgcgtcctcccccctttttgtctacactttttgatttgtcccgaattttcggacgagagacaaataaatggttgtggtggtgatatcccatcatccacgataattttttgttggctggcaccggtgattttcatatgtaacagaaaacacatcacccacacggaccggcacagaacaaaatcaattggaaaacggcacggatatcgccccccccatttttggccccggggggggggtaaaaaatgtaatttttttttttttttgcattctctcaagaaatatgaacggtgttttgagaaaaggtggcccgcccgactgacgaggtgagtgaggagtggttgtggtgtgaaggtgggaaaatttttgagaacataacattattttgtggtgcggcgccaaaaatgtgccggtgccaacaacggcacacccacccaaacaaatggatgtggcggggataaattaaaggggacggcaaaatttggcagtatattttaaatatatatatatatatatatatatataaatttgagcattatccaaaattcagggcggctttaatagggggacggggagggaccgaacgataggtctccgatttggttaggggtcaggatttaaaataaaacaaggcttaaaaagcgttaaatgattaatatttatgtgaattttacatttttttttaaatgggtaattttaattttttgattgatttaaaactgatttaaagcatgactaacaataattttaagcttttggataatattagcttttccctcctttattgagggaaaatccttaaaaaaatttagaaaagaagaatttcaagactctctgtactacagaaaaattgaaatttacgcaatttcgaaatccctaaactcggcactgaacgacttgaaaattcccattttatcccttaggggaaaatacaaagccatacaccgaccctggccaacaattagttggtgtcgttgttgttgctgtttttgttgtaactgcagttgtactgctccaacttctcgtggttgctgctgctgctttactgctccaacttgttgcccctcacttccgcatctaccacgggcgtttctgtgccatgaacgcggctgctgctgttgttgttgcggctgtgccgtcgttgtcgccagccaatagctgcgccggcgatggcgcgccgccatgtcaccaaacattggctgcgccgcagccgctgcgcccgcgctgctcccctgtggcactgacgcgaccgtcgatgaaccaccgccgttgtcgccggcgccgccatgcattattgccattgtacgaagatggaagcaggagcggcgctgctgttggtggtgaagttggtgatggtggtctaaatagccatgagggactcaaatttgggggaggtgtcccaattagcaattttttatatgagtgtcgaactttcagttttttaaatttatgccgtatttttttttgtatacaccgtatgcttacttaggtaaaaaaagagaaaatggaagagactgaggcccaaaaaaggagaaatccctcgcttctcgaactcgagtcttggtatctcgaacagcactagtctttcaggcctgaatttttcctagattcagactcaggccattttccaaataccaaaaattcaaaaaaaaaaaaaaagaatttttgaaaattttcggctctggtgggcgccctcatggcctttgtccagcagcgcttacagaaaaaaatgttgtgcaaaagcttggcaaaatgttttttttgtttgtcaaccttggcacattgtcgacacaacgccaaacggtgaaaatggcattggcatttttcttctaacaatgctaatccctgggacccctatcaatttcagttttcatcactcctttagggggcgggggagtaacattttttggccaattagtgattggtgccggacgggttgggtcatcaattatgcactcagaaaggtgcccaattagctttgtccatgtgctcaatgtctgctaatgtttggcccagtgaaaatggatatttttgtggtggaacagttttactgaattaagaaaagcgagctttggaggcggctgtgcaacacgataaacacctttttgtttctgtgctaacttttacttttttgaagaaaaaacgtttaaatttttgagcaaaaatgcaccaaaaattatgtaaacaaagaaatttcgataaaaatttttctttattttccgaacaaaaatctttgtgaaatttttttatgataatttttttttttttgtaaaaataagaactttttgccttcaaattaagaatttgcaaaatttgcgtgctgagtcgtttcgtaaatccgccagggcgtttcgtaaatccgccaacaaaaatataataattcatttaatccaaaaattttcataaaaattatatttttgaatttcatctatagaacatttgtcggatgcataaataacagtctagacgacatatttatgaattcaacaacattttttttaatcttaatattatattgttccttcaaaattgttaataacattagatttgaagaatttatatcaaacgaaaccacgatgtatgttacataaataaatttcaaaaacgacttgactgtgacaaaagattttgcaattgcctttatgaaagcgctgaatgttctttaataaaagtatgtttttccgcattttttaaaaagttatatatgtatttagaatttactttgcatctctgttaaaatattgagtcaacgttttaaagaacagtgcaaagaatttgatttgattttttttcttaaaaaatgttaattttctgcatagaataaaaaataatgtgcatatttttcctattatatttttgttggcggatttacgaaatgccctggcggatttacgaaacgcccatagtggcggatttacgaaacgcccacgttggcggatttaggaaacgcccatagtggcggatttacgaaacgcccatagtggcggatttacgaaacgcccacgttggcggatttacgaaacgcccatagtggcggatttacgaaacgcccacgttggcggatttacgaaacgcccatagtggcggatttacgaaacgcccatagtggcggatttacgaaacgcccatagtggcggaatttacgaaacgcccatagtggcggatttacgaaacgcccatagtggcggaatttacgaaacgcccatagtggcggatttacgaaacgccatagtggcggatttacgaaacgcccacgttggcggatttacgaaacgcccacgttggcggatttacgaaacgcccatagtggcggatttacgaaacgcccatagtggcggatttacgaaacgcccatagtggcggaatttacgaaacgcccatagtggcggatttacgaaacgccatagtggcggatttacgaaacgcccacgttggcggatttacgaaacgcccacgttggcggatttacgaaacgcccatagtggcggatttacgaaacgcccacgttggcggatttacgaaacgcccatagtggcggatttacgaaacgcccatagtggcggatttacgaaacgcccatagtggcggaatttacgaaacgcccatagtggcggatttacgaaacgccatagtggcggatttacgaaacgcccacgttggcggatttacgaaacgacctagcaccaaaatagaggtcgtgaaatttaaaaaccaaacaattgtattcaataataaattaattaatatcaattaaatataattatttaagaaattaaaagataatagaaaaaaatttcgaaaaaaattatctttataatattaattaactgagctaatcaattttttagaatttgaatggattgcagaataagcagaggggcggatctagcaaggtattaattcaattaaaaattattattgataaaaaagagattatcatattaaaaataaaataactgagaacagctgaacattcatttattaattttgaacattgatcaattataaattttcaaatattaaaaaataaaaaacatatgagggctgaagccgaccatatgatgcgtcattagatgagggggacaagagtttaatataaataaaaacagcgaaattcaaaattataaaaaatgatacaatatttaatataatatgtatatattaataacaataaagaaatgaaaaaagataaaatgttattttaaaaatcattcaagatataaaaaaatccaactaaaatacattaatatcatatatttttaatagtattatgatatgtaaaaaaa

SEQ ID NO: 8078 - DNA, 1691 bp, Heterodera glycines
ctcattgtcagcagcagcgggaccgtgtccgtttggtgccgtcctatgaaatgctgcgggtgagcaaacaattaattgtttttcaaaattaaaatccatttctggctttttgtctaattgatttcattattatgtgctaaatgggtttcttttgttgctaaaaaggaggaacttggctctccttccacaagttgcgcctctgaccaattcattttgctcccattttctttggaagtgcgtattgaacagaattcgtcccgtttcccattgcttcgcaccgtcccaagcactccgcgtttcaaagtttcataaaattacaattttcactctaagacgcttattcggtaatattacagttggatgttcgatcacaacgcattgaattggagttgaacaagcaccaaattgcacaaatccaactgttggcttacgattgggcacaatttgagcggtcgcgcccccaccgaaaatggcgtccgcttgtctctgtgcacgaaaggtttaaaaaacatttattttatagtacagtcagccgtttaattaattgtaagtcattaatgaaaaattcaaaaaaaaaatttgtgtcacttttcagtccaaaacagtggtggcgttttgcaattggccgcacgcttgacgaagtgcgtgcgcggtgtcccttctttccgcgtgtgactgtgttgactcgagtgcgcttggtcaacggatatgcgcgagcttatcgccggaggctaaaaatgtggttggagttgcacagcgaaagtgccgacggcacaaagttatttttttaaactgattgtaagatagggaggggtttataatttaaattccgaaatttttattttttttaaatttattctttttaattcaatttccctcccatttagtgaccatttttcatgtccaccgcctccaatttcccacgaagacattgcattaataaaacaaattgagaacggctcggaattcacttacaatgtttggaacacgaaagagaatgtgttcagtttgcttttattttaggttttacatggccttagggaagctgtctttcaacaattgttgctcaaatccaatatcggcaaacacccgtcgtgttcgcttaatgaaagtccttttgagattatcaaatcgggtaattactagtgcaagtgtccaaattaaattaaattgacattagacactcggccgattacggcgcaaatgctggcaaaaggttcagcaccatcaacagggtggtacggatggattacaaattggtttaccgaagaagggaataatgacagcgaggctcaaaacggtgctaaaattatgagattcatttaattagcatcattttgtagaactcaaaaactgtggcaacgatgtgaatgaggcactgtatttgagcatgaagccgcccaaactgaaaaagcacaaattggaccccgaattgaaggcagtggaaagtcgaatggaagccgaaatcctacaggtaaaactggcaaatgattattagaaaatgagtttcaattggttgtttctgcagatgcttaatgagtcgtgggatgagtcgaccattttgcgcagggacaatttattggcagagattgtgctgaacgtggccaaagtgttcttcagacttagcgaagatgaggaagaaaacgaagccaacatggagcaaggaaagatgagagggggggggggggggg

SEQ ID NO: 8079 - DNA, 4838 bp, Heterodera glycines
tatcggcaaacacccgtcgtgatcgcttgatgagagtccttatgagattatcaaatcgggtaattactagtgcaagtgtccaaattaaattaaattgacattagacactcggccgattacggcgcaaatgctggcaaaaggttcagcaccatcaacagggtggtacggatggattacaaattggtttaccgaagaagggaataatgacagcgaggctcaaaacggtgctaaaattatgagattcatttaattagcatcattttgtagaactcaaaaactgtggcaacgatgtgaatgaggcactgtatttgagcatgaagccgcccaaactgaaaaagcacaaattggaccccgaattgaaggcagtggaaagtcgaatggaagccgaaatcctacaggtaaaactggcaaatgattattagaaaataaacaaaattaaatgagtttcaattggttgtttctgcagatgcttaatgagtcgtgggatgagtcgaccattttgcgcagggacaatttattggcagagattgtgctgaacgtagccaaagtgttcttcagacttagcgaagatgaggaagaaaacgaagccaaaatggagcaaggaaaagtatgaaagaggggtgggggggggataaaattctatatgggatttagggatgcgaaaatggaccaaaataaatgtaaaaaattggaaataaataaaaaaaactgcgaaaaaattaataaaacatttagactctatcataatgggaaatatcgcaaatttccacttttactatcaacgaataaaattcaaaaattaaaatgtgttttttctatccgtctttttcccatttagccttcctcctcttcgctggtcagtgaccgcggcggtgccggcgttgagacggcgtcttcgtcttccgctgctgccgatgttcagcagttgctcaccctcgacctcagtcggctgtgcagtcgcattaatctctcgccgaaagagcaccgcacggagctgtcgctgagtgtggccgacctaacggtgcagcgagtaaagcaccaccagcagcaacaccaacggcacaggacgacggaatcgccggcagaaaactgtggcgacggagcagcatcagctgacggcaaaagggcacgcttttggggagtgccattcccttacctccccttgccctattcccatttctaaaccatttttgcatatattcgtccctttttgaattgtacattattttttcagaagactgcggaaaaatcaccacttgataccgatgaattgggcttctttggctctgatgagtttgatgaatcactgttctacgggtttcaacagaaaaatgtacaaagtacgcaccttttgctggccattggacgaacatacggcgaaaattacgcaaaagaggcaaatggaaagcaaaaaaggtcgcaaatttgcagcatttataaggaatgggtcaaatgattcatcgggataaaagacattcattacatatcggacccttttttatttcagaagtaaacggtccaatttgcgtcaaaaaggccaacaaattggtcgtcgttctgctcatagtccatcatcatctaccgctgctgctgctaaaccaactgattatggtcaccaagcggaggacaacaacgcgatattgcgcctgttctacaagcgacttgcccccaaattggaggtgtaccacgagctgaacatctcctgtgctccgctgtcaattctttgcgatgagtgtgcgctgagcggaattttcgagccattcacacaaaaggtaggcaattaacatttgataaaacaaaagcgatcaattaactgcaatcaaaaattaaaatattcggctgataaaaattatgtccgaatggtttttttgattttcctaaaatgtcttttttccgccactttcaccgcaagagaacgatgtgtccctttctcattatgcaactttctcatatgtacacgccattctctgctgcccatttcttcactgtcgttacaatgtttttcgcatttgtgtctctgtccttgcccagcattttcatcgcgtctctcaactctcccgtgtcgcattgtcgcgctgcgaacattttgacaacgccaacacatgcggcctgctttgccacggcatagttttcctcttcgttgccgtcatcgctaccgatggcaccgcgtttgtccaactcgtcgaatgcctttgctgccgttacatagtcttcagctctgtgtaaaaatatattaatttaattgtagtgggaaaagaaaaaattttaaaaatcaatttgttcaacagaaaagcccgtgtaaatatttgaatgattaacagcaaattaggttaattagtgtagttaatagctgtaattaatgtgctctttgtctgaccgataactgtccatggcgaccagtttgagcaattgttgcgaattttgaatgtgtctttccttctggtacaagctccatgccgctttgccctttttgtttgcaatgtaagcacgggcaatgcacagacaatgggtcaggttggagatgatgctgtgccctgtgaccattcgaaacgcttcttccgcctcggcgaagtgttcacacagcaactgattctggccatagttaaaattaaaagtgtcgtcgtttgtgaagaaaggctgtgtagaaaaaaaaaataacattaattagttgagagaataatgatttgaaccttaatggaatccaagtacaccaaaacttcgacatattgttgtcgaagaaaataagccgaagccatgctttggcggccaatgattgtatcgcattcggccggtgattcgcccaccactttgaagcaatgggccgctgttttccgcaattctttctgtgtttaacgctaattgattgttccatctgattaaaagtcggtgtaccgaattttcttcgtttccttttatgcaaagtgtgattgccttcagcaagtactcgtaggtgctctgtggctccagatggttcatcagcacatgggctgagtcggtgtcatttttcttcaaatggtaaatgaccaaattgaggcgtgcctccggcacaacgtcaaccaatgttggcaacaactgaagggccccgtccccatttcggaatacaacctatgtaattaatgcaatttgcgtttgatgttgttgattggtcacaccttattatgaaggattacatcctttgcaaagcgaagttcactgctcgacaaatccttcagcactttgagttcattttctgccgccttcgaattgtaaagtctgtactggttgcaagccttcaaattaacggcatttggactgtccggatatttgtccaaatagctttgcagcatttccaacgacaggtcataataatccaatttgtagtagcaaagtgccaaatagacattcagcgccataaagttcttgttctttgacaaaatcttcttgtaaatgtcaattgcctgttggaaatgcgctctgaggtagtgaatggaagccaggcacagttggtcttcgattgtatctttcagttgagaatgatgggacagcactaaatgttgtaagctcttcattgtcttcagcagtgtgtttttgttttacattttttctcgtcacttaatttgtgtgcaatatgaaataacaaccgattctgtaatggatttttcggtcctgaaattaaaatcagaatttaattcgcgtggaaataattcacctttttcgcccatttttctcgcattttcatgcatggccaaaaagaaataagcacagccgaggtacaagttcacttcagccgggcagttcttgtccccgattaatgcttcgtaggcttcgcaagccttgcgaaaatttgctgcatgaaagtggcaatagccgagccacatggtcaagttgatttgttggtctgcggcagccgattttcgttcgtgctccaagatggagatggcaccggtgtagtcgcgcttgtccaaaaattggtcgaatttttgaaactcattcgaccaagctttgacatcagtcgcattccgtctacggccaggccgaaatcgggacagaagcatttcctccgctaatgtgcgccttttttgttttattgaactttatctgttttagtgaaagtccattgatttggaattaccatggaaacaaacagtccaatgggaatgtaatgcttctgggtatttttatattaacagctgctgggccattaaaaatagaaatgcgctcacaattttttttaatgaatttttacatattttaaggttcaagaacgctttgaccagaaacaacagccttatgtgcaagaacattcggagcttggttcctcgccaactgatgcagtaacgcaccaactttttgcttccgtttccattcccgaggtcgaatttgaaaaaagaattatttttaaatcatttatttgattttcagttgcttgtacagttgggaagccaaaaagcatcgcaaggttatttgatgaatccaaaaattggccacattgaaccgtccacttcttccactcaaagtgaaagcgaccaatcagtcacttcctcatttgtgcggagcagtgtccgctcacttcagatatcatattcgagaatagattcccaacggatcagcaagtgggagttggactttgatgacgttttaatttggcttttggagaaaggcaaccgaataaaaacgacgccattccttcgactaaacattcgtggtaatttggcatcactgattttgacttttttaaatgattgataatgctttctaaatccgtcttcatttcagacttgaacgtaaagagcgcgtcgagccgagttaaagccttcctcaacctgaccatcgactactaccgattgcgcactttgccc

SEQ ID NO: 8080 - DNA, 1870 bp, Heterodera glycines
tttcatggaaagggcactcgattttgtagcgcattcgaattcacttcagcaaattatgtttgcttctgatcaagctgatggattagaccggttgaggtggtgcttttactgttttgaatttattattgactcaatttgcgttttctttcatgtgcctaatgaaaatgaagataatttgctaatttatttatttttacattttaggcatttgtttcaccaacaacgtcaaaatgccccaggcaacattaaggttggtgatgatgccttgattggcagaagggaaaatttgtctaggtatacgatcatcatcatccttatgaaaccgatttggagtcgggtttgacaagtgactttgatgtgcagcttgaacttgccgatgggtttgctatttctttggttggcattgtggacgaggaaggggaaagtaaaggactgaagcaggaggaattgtgctatggccgattgagcggcatcaaattgaatgttggcaagttcaaagcaacatatcgcatcaattgccatatcgactcaattcaggtggtcatattctaattactaattttttaaattattatgtccctaatttaaattattcgcattattattgtcccgtacaattgcagatggacaaccaaatcattggggccgaccgttggcattttttgttctgtgatcccggtgcattgaaggacgaaccgatggtcggactgccagcattggcattcgaaatgagttacactcccagcgagtttttcgatgtttacgaggcatgcccatgtcctacattatttatatgcagtgaattaaagtgtgatactgtactttcagtgttttcggctcaaactgagcaatgcgtgcattctgttggatgagcaactgttgtggcgcctcgtgcacttttggcggtgtgttttgaaacgttggcaagaccaaagcgaccaacagcagcgagagaatgtaacaacaccaacagcagatgaaacgaaatgcggcacggaatcgccttcctttctgcacaacaactgctactttggcactttgcaattggaattcggcaacatttctttgtctggtagtcactttgttttgtttctgtttgtacttttgtccaaaattttctagttttaactgttgacaaaagtgtgctctgtcgttgtcaattcgtcaactgaaagattctttcagcaagcaactcactttgttcagttttgagaatgcccttgtcacattggcaccgttctgttggctccgttacttttgctcattgagccgtttgcttgaaacgcttggaaatttttatcttagtcagtttgctggcattttgtgaataaaacagagaattctattatttcatagacaaattgaagcgacaaaaattgaacatcatttttgcgatggatgcttttggcaatccaatggcacttggcaatgagctgaaggagggtctccaaggactgatctttgagggcgacttggccggctttgcctttggcattggatatggtgctgcgaacagcttgtcaaaggtggatgatttttggcttctacaaatgctcagcagaacaaaattttgtattttaggtcacgtcttcaatggcacaaggtaaaatttttattattaaacaaaaaattatttgagaatttttccctaaggtgtcggttcactaacatttgatgaaaagcatgtagaattacgtcgtcaaatgcggcgcgccaagctcgaacaatccggtccgttgactcatttgtacggcggcatcaaaggattgggcgtcggtgtgttcggcgaattgaccgcaattgtgaagaatacggtcaccgcaacgcagaaaagtgggctcatttccgtaagagacactgtagaaatact

SEQ ID NO: 8081 - DNA, 6161 bp, Heterodera glycines
  unsure (1)..(6161): unsure at all n locations
acattaggctaaacggcttgaaaaataaatttccatcattagaaactcgagagaaaaaggcataaaataatcggcatacctaataaactcaagaaaatactgctaaatttgagataaaaatggttattaagagtagtggtgaagagtttcagataaatgtcggaaatttgccatttttaattgcttttccccatgaaaaggggggggggggttccaaaatttcaatcaaattttggccacctcttctgacatttggcaatggtttgggtccgccgggcgccggccctgcgcttcggttgcgacggccaacaattggttaagcattggcacatttgtgccagcggcggacgcggaattttgtgccgtattgttgctgctgttattattgtttgttgaggacattcaaaaagcgaaaaaagaaaaattttacagctaaataatttgagtcaaatgtcttaaatgggaaccatggcaaaatatgcattttttttttgcactttgcctacttttctcggctcttctcgttatatgattttaaaaaaaaattttatgcagcgaaattttgaatttttttaatttgaaaaaattaatttttttgtgtgaccattcaaaatttgttttttttttgtcaaaagcaaaccgcaaaagcgaaactttcttaattctaactgaaaatggttaaacgcctcctctcttttttccacaaaaaataatgattttaaatatcggccgactgttaatttttgccgtttttataaaaccaagacaaataaataaacaagtatctctaaacatttaaagtcagtcaattttgcctcgaaaaaaagtcgaaaattcatttttcataatctaaaagatctaacagcagctgtgaggaaataaaatgcgttaaaaatgcaaatcaacggaagacggccaacggattttgaatgggagagcgaaaacgactagcaaatgtccatttcgtgcattttcatcgattttggggcaataaatgtgatttttggtgaaaaatgaatttttgacatttgtaaaaagtgaaaatgtggggcctaaatttaaatttttaaatacctaaaaataaataatttagcttattgttagtttttaattaaacataatgcctttgactaaacaacacgaaaaagacgaagaggaagcgaattcaccaatgaaaacagcgaagaaacgccaacgaagcgaagcaaaggacgacaacgaaaacaacgacgacggcaccaaatcaattggcacaacatcaacaaggccttcatcaccaccagcagcagatgaagtgcggggacgacggtttagcgaacggttgcaccgcaaaacagtccgaggccaagccgaacaattgcagtattggcagtgccatgttggggaagaagcgggcggcgaaggacaacggcggaatgcaaacgccagcgccaccaccaacacgacggagaggacgacgaggaaaagggtggcggcggcggaatcggcgccgacagcaaaagcagtgccaactccgtcgtccaacatcaacaaaataactccgccgctcgccaccgccgtgccgccgccgtccgaaaagcggttgcgcctgcagacttatcaacagatcgctgacgactttggactgcgtcttacggcactttggtgagcacagagcatgaggggaaatacaaaaaattttgaatcattttaagcgagtttttcaaaatttataatgaattacataaaaaatttttcaatattttctttcatgaaattttcttataaaaaactttttcggggagggtggtggaccagttgctccccaattcttacaaatcaattctcattaacacttcgaaaacctttccctgcggcgcttttcggcaccgcttgaaccccgccgttcacaattttttttttttttgaaatttggcagccttgacatagagaaaaccttgtaatacctatttgtttttttacagtgaacaatactttttctcattgctcaccaatgccagcgtttgcctcgtgctcacaattgaccctcgtcaacagatggccaaaatttcctacgaaagggccttgggatggtgggtgattttttgcaaaaaaaaacaaaaattttaaacgccatccgaacatacgttcttttttgaaactcagaaatttaaaggttttattttgaaattcatataagacacagccgataaatctctataaaacacgtgaatttacacttcaaaatcaaaaaaaaagtgcgtccggccatcgattttttttctttacccccaaaaaaaaatttttttttttgaagattatttgagtttgttaagcgctttccattttaatttcttttttgtttgccaataaaactataagaatgccattttaagtggtgcactgttcagccaaccggtggaactgttctccttcgtgtggccgttgactgattggcaccaatttttgtggggtgtccgtggcattttcctcctcttttttgtcggctgtccccgcattcgcatggagaagcgtttggcaattcaaaatgtcaacagtgagcaaaacatattgtggcattttcatatttaaaatacaattttggcacgcttttttgcataggtgggactcaaatgatggcaaacgaaacatcgtccattccgatcgttgaagaaccgccggaagaagacgaaaatgaccacgaacaacaacaaaataaacacaccgagggagaggaagaaaaagccaacggcactttttcagtcaccgtctctcacccgtaagtttttgggaacaatttttcattcttttttgaatgtctcaaacaatgactccgttggtctcacacacctctcattgttatttttttgttaaagtttgatagctagtcaaaatcaaaaatggtatgccatttttggcattttgcaagttcattgatctttgggtcattcgaaagtgatcccttagttcaccggtttttttaacccaatttcacaatttttattttattttaggatttttaacatctaataggttgcccctttacagggatttgcgattggaaaggattgctggcgatttgctgctgcgtttggccatcgttcccgggtgtgtgatgcttttggcatttgcgtaaaaaaaattcatttattctttaacggcattatttcatttttattttttctgacttatttatttttaccacaattttggcactttcacagaaagcgtattcaactttcaccgcttgagcaacaatacaccaaaaagaatcggacgaagcaaaagggcgacgaatgtttgacttttgaggacttcaatgtggcgaatgacgacaggggatggatccgagtgattgaggggggcggagtcaggaagaatggacaacgcaaggtggaaaacaattattaataattaactaattatataaacacaccaaatttggaacatctaatcccattatattcgggtcattttgagcggaaaaaagcatttgcaggcacgcggactcgaaccggcagcactgggtagtgtggtggtatcgtgctctcggactatgtgggtccccaccggttcgaatccgcgcgcctacaaacaatttttttttgtcaacacaaaaacctaatcatgagtgaaaacgtctcttttactaagaaaaatattttgttaatttttattcatttttttccaaaattttggttgaatatgccaatttcaggcaacccggacagagcattggttgaagatttctcgggaattgttcacatatgccatcattggtgagcaatttgtaaattacctaattaatattaactgataaatgattttttgcaggaaaaagtgcagcagtttttcaagaaatttttccacgtgcaacaaacggcggttgacgacaaaacatcagcagacagatcaaatgaagaagataggaagagaagaatggaattaaagaaataattcatttaattgaccataaattcattctcaaaagcatttttactttatttaaattgttttgttgttataatactttgactttataaaatattataactttgcttttaataaagataaaaataattgaacgataacctcttaaataaataaatgtagtctggaattttggaaaatcagagcgcccgggtttccgtttttttggagtcagcaccgtaaaatatttgaattttatatttaaaaaaattatggcaaaatgttttttaaaaataaaaattaaattgaaaccaaaaattttctgttagtaaaaatcagtttaaaaccacaagctggtacctttgtaaagccgatcccgtttatttcaatgattatttcataaaaagtttcaatttcatggccaacacaaagaaacattccaagaagaaggaagacgatggagaagcggaggaaaagcattgcatctgcgattccaagtacatttatttgcataattttagattgtatttatattaaattgtcccagatttacaatttccacaaattttaaaaaattcggattggatttaaagcccgctttcccgaatttaaatcctgattttgtcggggttccgattccgtttcttttttcaaacaaaactgggatcggtaacccgggaaaattcccgtccacgttctagtgcacgaaaaatacattcgatgcaaaatccattacaattttcaaaaaaaaaaccccgtttttggaaactccttcctgtttatcctgacaatttttatcagcgattcaaatattatgttataaaataaaaatttttatagggattattcaacgttgatgatctgttgcgactactgtcttatttggtaccacgtcgaagggtacgggttgtgttgttttacagtgtcttatttttattgcaataaatcatcatttttgtgtcctttttacagtgtcaaagtgactgaaactcaagcaaaaatcttcaaaaaatttgcgtgccattttttgcaccgccaaaagacccaaagctgtgtaacgctgcacaagaaatgggccaaggggtgttgtgatgagcaaacatcgggggcacaaaaagcggcggaagcgccaaaaacaaaggttttttttgttgttggcattattgcaatttgctggaccaaaaaaatacttttacatctaataccataaattcttgatatcatttgatagccctgaatgttctctattagtctacgaaggttgaaaaaaattcacccaagattcaaaaacatatgacaaaaaagtgtaattttttaatttttggtcataacttttttgaaacataacgaacttctttgaagttttacaggctaatagagagagattaaagctatcgtatgttaccaagaaggtttaatttggatgcttctagaaaaaattatgatactttaaatttgttaaatttctattcgtgtgaactacgacagagccggttttttatcaaattttggtcataattaaacaaaaaacaattcattggggttttaaataataaaatttggctaattaattaaattaattaatccaactcccattttagagcaaaattctggcaaggaaaagaagggcgaaagggagacgaaaagtggtgggacagaaaaacgacgaagggaacgggaacgaagcggcgaatcgtcgtccaaaacagcagcaacaacaacaacaagcggtggtggtggtgccaggaaaagcaacaggaccaagacggacggcgaggaaagcgaagagacgaggaggaggagggcaacgcccgaggcaaatgccgtgccgccggcggtgccgccaccgcagctgccgccgttgacggcacagcagaagcaccagctggaactgcaggaggccaaccagaatttgcggtgcaaaaattgcatcggtaagcggtagggttgggtcaatatgattgcggcaaaagtgagttcccccaaaaagtttccatgcttcttgaaataaatgtcattttttggattttcgtttagattttggagtggaatgggaccaaatttttgtctgatgagtttggtcactagtcctacaaacctcaaccatcgggtgcaccgtgcacccccgtcgtttcccccacaaaatttttttattttccaaaatatcctagataattttttaagaaaattcaagaaataaaaagtggaaaaatttcaaaccattttttttatttttcccaaagnnacctgca

SEQ ID NO: 8082 - DNA, 959 bp, Heterodera glycines
tttgttcagctacgactgcgtttgatccttccgcaacggttcaatgccttttttggccaggcgccgcacacgcagacggagaacaacgcgcacattgagcagattcaggagcaaatggcggacatcaacatcagactggacgagctggaccagtggaagaacaatgtgcaccaattcatggtggtgttgaagagcaacaccttcgacaacggcaccaccatcgccatggacaacgacggcaccatcgctatgggacagcagcaacaacagtcaacgacgacgacaaaacgatcgccaaatggtggtgccgatgccaatggggacgacagggatggcggaaatgattgccatgctgcagaaaatggaagtgaggagaaaaagccaacaatgacgacggcggcagtgaagaatgaggacgagaatatggtaagtttttggagtactgcgcgagattctcggccttttgggtggtcgagaaaagcatccgaatacagacagacgccatcgggaattttttttggacgcttagcttttcaactgattgtgaacagtgttgcattctgttaaatgctaaccgaatttggtttaaattagttctcatttggttcatgtttcagctggtcggatgtccggtgtgccatggcgaattccaaatgcgcgaaatttgcaaacacgtgcacacatgctttgtgcgctcggagcgtcaaacaacgtacggcacggattaccaagtaagtgaggcgcaatcagccatgccattgagttatatttccttggctcattcaaattttgaaaaatgccaatttttatttgaaaaatgcatggtaataaggggtgcacttcaaaatctcgccgccgaaatctcgccgagacaaaatctcgccgccgaaattcaaaaaaaaaaattttcaaacttagaaaatttttcaggaggaaaaaaatttcttgaaaaaattttt

SEQ ID NO: 8083 - DNA, 3493 bp, Heterodera glycines
ctgtattttcttgatgttcttgtccaacacgtggcggagatgttggtactatgacctttttagtgacatttggaggtgactttggtacaatacgtgcactaggaggaaatgtaggctcaactgcacctctttttcttcttattggtgtattatcttttataatagattcgagagactccgcgtgattctttagagttgctgtaataaattctctcaaatgttcaatgattgtgttggaagcttttgggacagccactctaacaactctaagcttttcattttctaggccatcagtaaaatggatgttaatccattgatcatccaaggttccaattgtggagggccaagaatatgcataatttatgctgtgtagtccgcaaacccaagagccattgaaataaattggtttcgggagacggactcgaaatttatttggggcattatcagcatagtctgggctattactgggcaaatggacaaaaaaagtgttagacatttatacaaattaaaatgtgaagccaatgctgatttacaagtatttatacaagttgagtctcatgaatccattctctctcaggtatcctacaaatttcacgagcacttccattgttccgtcgggcattttccgtttccgaaaaacgcgttcaattctgtaagttgtttcagcatctctacgtacgggagccaattcttccggatagaaaaatcctttgaacttctctccttttgcatcgcgtaacttgtattgcattggtttcttgtggcgtttgacttcatcaatttcaagaatttcatcgccatagtttggtatatatcctttctcgaattgtccttttgctatgctcattctcaccgtttgtcctggcaaaaatttggccctttttctgtgctttccaaaaagggccctatgctgatcttctccgaacatcttttcccatatttgttgtgaatttttaaagttcacatcaatcggtcgcatcccatgcactcggctcggtgatttattaatgccatcaacaatttgatcaattacgtccacccaattgagggtttttgtttgggcaaagtagcgatatacacgatttttgatttgtcgtattgcgcgctcggctaatgctgctttcttctcagaatatgtgctctcatatttctcaacttcctcttcatcaaaaagttttttcagctgctgatttctgaattctgtacccttgtcggagaaaattctgtgtggtttcattggcatagttgaaaacactcgtttaaagccttctaccatatcatcggatttcttggtacgaagaggtgttacgaaaatccgtttagaaaggacatcgattaccaccattaaataacgattgccgctgttgtgtcgggaaagtgcttgaaaatcagccaaatcaacctgacagtcggtcataaaaccggctgcagtcgttcgagcgcgcagaaaatttacgcgccttgggcgcatcaaagtgtaggtgcgatgtccctccaagtaatgttttacatcatttttacgaattttatttcctaattcttttttggcttccagccacagtctgtcaacaccggcgaacgcagcaggggattttgggtcattgtagagaccttctaacacattttctattgatttttccatttttgtggcctgagacgttggcttttggttggggtttccgtttctactgttggcaggaccgtcgacttccgcttgactcccctcgttgggaaaggaagcatcaatccttcttgctccctgaatctcgcctgtctcattcctctgagtttttgtgatttttgctttaattctggcgcttggtctgtttgtatcaatttccgtttgggtcctcttggtggtactggtggagccgtccatgttcgcaaaataaggtctcggttgattcgatctcgaatgaattttgttcctggtggctgtctgaattgaggaattcgtccctctctgcgttcgataatatagtctaatgcttgggcgacactgctgtcggttattgggtttcctgcgctgttcaaaatggtgtcaccctgaacaccgtacttggcggggtttctattaaatacgaactgaagccgtcttctcttttgctcattggtaagttgcgaatttggaatgctgaaaagatgttgatcctctgcaaactgacgacgctgctcttcggagagtgcatcgctacccgagttcttttgcctttttggcagatttttggtaacacttggtgaagataatctctttcgagaaccaattctgcttctttttctttcggtatattcttcttcagctttgttggttttccgctttttggttctgctaagcaacgggggtccaggtgggagaggctcgacttgagccgaggtcccgggttgttgtgagagttcaaagtcgtccggcaaaggggcagaggctgcctcttccagtaagtccctctttcgagagtcaattctgcttctttttctttcggtatcttcatcaactttattgcttttccgctttttggctttactaggcaacggaggcccaggtgggagaggctcgacctgagcagcgaccccggggctttgtaagagttcaaaatcatggccatcatcgtccggtaatggggcagaggctgcctcggccagtaagtccctcggaggattacgcagttttgccaaggccaatgaattcgaatgctgtggtagggttactcgggatttgcttgtccttttctgtttgaaacgtagggatgcctcttgttgaagcgaaggaggtcttagctcttccaagccaataagactcttttttgattctcgaacatcattcaaagcatgctgtgccttccgttttctgttaagttgtggatgtataggaatagacggttgtggggctggctgaaatggttcttcctgctgaatgtcagcgggaatttgttcttcttctcttctccatgaaactggaggcagttttcttcttctttgtctattagcaattttagatgaagaaggaaccggtgcatcttcgtggcgcaattgtctctttgcgccctcctcccatgaggaataaaattcatttgctttccgtttttgccccctattttcaacttgaagcggtggagaaggcggcattaatggcatttcctcatcatcattgtaatggcgatggcgtcgaaggcgtctgcgactttgtgaagcggggcgttgggctccatctgaccccaaatcaaaaaattgttcttcttcatcactttgatctcctcttttgatcagtgcttttaacccttttgtaatctcaactttagttggacgattttgctgttcatctcgcaggtggagataacgtgccaattcctggttataatgaacattcttcgccgtcacattttcgcgttttaaaattgttttttaaggtacgttgcacgattttgtttttgccaatgaaccattaaagtgaaaccaattatgaactaatatttccaaatttcacatagacaccatt

SEQ ID NO: 8084 - DNA, 3031 bp, Heterodera glycines
ttttatgaacaatatttccaatttcccaagacaccattttttggaagaaaatgactttttctccatctttttcgtcttccttaaatatcccgcttcgaagcctcagcaaagggtttgaggcagcatgcatatcgatcagaaggtatccatagggtttattggtcgcaatacggtatgccgagagaaaataatccagtttcccgggaaagagttgaactccaatattccgaacagcaagtgctgagttgggggcccgcattagtaccaaatattgagcgttttgtcttgcaactttaatccgtctttcaaacaaattttgtgtgacaaaaacaacggcaaagttctgatggtgcgattttttggtgaataaagcactcagataggcctcatcaatcgatagcaaaaggtcgtcaaggattagaagcagtggtttaggtaagcgtttaattaactcttccggagggactcccgaatacacactaataccacatttttggagggtaggcacaatgctggacatttcaccgaatgcgtaaagaatggaagcgggcttagggccaataagttctgaggactcagcaataaacttgacgagaaggctgctttttccactccccgatggaccagaaataagcataccgaagggcatttttagttttaattctttatctgtgtaaaattggtttccaatcatgatgaatgtttagactaaatcgaacaaacacatgcttttaaatactttattatttacgggtgatcgacgcaattgctgtcatttcctcatcttccatctccttctttactttcttctttggctttcttttctcgggaacatccatgttagtcgttgcagcagacacgctctcgagaaattcatcgagaatttcttggtccgtctgctccttttcctttttggttctagtttgttgttgttcgctactcatccccatcgttgcggcggaaacagcagaaaatagctcggaagcatccgcctggttcggttcttttggctttttaactgtcgcttcagcaaaatcaaaccccttcgtagccgcagaaagagaaactgcgaattctgcggcatcggaatttaattgttctttttggcttggctttggtggtttgtcctgtcctacatccatccccatggttgctgccgagatggaagaaaagaaattggaggcatcaactggctgttgtctcgacttaggcttgggttttagatgttcgggggtcatccccatagttgcggccgaaatgggtgaaaagaaatctgaggcgtctgtcctctgttgttttctcagtttaggcttctcgtttttttgttcaatgtccattcccatggtcgccgctgaaactgcaccaaaaaattctttgccatcgccttgtcgcgtttggtgccgcgcaatgtctaatcccgtcgttgctgccgacacagagtcgaagaattgattggcaacacgttgttccgcgtcttggtgactttcctgctttcttttcgggagctgaggcggtggaggaggtggaggcaaatggtacacgggagtcggggtctgggtgcacgcattggaacggaaaccgtggtcaacgttgaaaacccgtcctttgtttcgaatctgttgagtaaataatttttgatgcaaaaaaaaacacacacacagaaacaaaccttgaaaaatgtgtaaccaggcaaatcgtagatcacatcaaatggcacaaaacgggggctaattttgaagcgtgtgcaccaaatggtaacgccttccttggaaacgcaccattccgtctcacattcggttgccttacattctcgacatttgccaagaatatcgaattgaaccgttcgtggtatcgcaattcgttcactgctaaccgtaatgccgttgttggtttgatttatctcaaccaccggcaaaatgttgtccatgagcgactttttgtcgtggaggttgatactcatattttttttgaaaatctgatcaaaatgaaactaaatttgtttgtccccatttatataccggaccgttcatcctttttttagctttatataatttgcataattttttgagatggcccctttttcttatcagcgtaataaatattgtgagtagatcgagacgcgaacggagaagagcaaacatatgccgtcaacgacgacgagaatgcccttctcattcatttctttttacattttttctgcaaattcttccaatggctcgccaatcgacaattttaccaatctacaaacgacaatcgcgaagacagcagcaacattaccatttcgaaaatgtaaaacaatttttaaaattcaaaaaacagtttatttatttcaggttttggtatttgaaggagcacgccatcgacagttccaacttagctggttctgcatcgcactgatcgtcatactttttgttgcctggttcctttggtaagtgaataatttttaatttacaaaatttctatagttaaattttaagaaagggccgacggagacaatccaaatggtgcatgaaatggatgatgagattgatcaaaaatgatcccaatttggttttttctatttaataatattttaatccatttctctcagggcaaataaagttttttttttatatgatgagttttttaatttatttgctcggaaaatttcaaaatttaaatgtgattttttttcaaaaatcatcctttaatctttttttccttttttttaaattctccattctctcttcattattcctcattctttttcgccgctgctcatttggcctccactccctgcaaaaaagagattacgatggaatgcattttatgcccacaatcctctcgcccccttcccataccacttcggcgctcgcctcttcggtgcgacgctcgggagggtccttcgagacctggacaaaagaaaacaaccccaaaaaaattttcctttccatcctccccccccccctctctacctcctccacaccgacgcgctcaacgcgcagcccgaagcgctgggtcgactctcgcccagtgcgacgcttcaaaaaaa

SEQ ID NO: 8085 - DNA, 1363 bp, Heterodera glycines
aagttgttaattaatattaggatccgaccccttgcaatttgagtaccacgtacaattagaaaaacaaaacaaaccaaggatttacgaggcctcggaaatcggaatcaaaaaatcggttaaattttaattttttcgaaaattttcccttttcctaatttttccccattgtttcgtgaaggcgcatcaaaaaaaaaaaaattttttttttctcaaatcaaacaaaatgacaaatgcttaaaggtcacacctttccatcaacagcgagcaggtacaggaacttgttggtcaacagcaaatagcgcaccatcggatggcccgtggcgtggccaacaaacacttggaacatgcgctgcaccgtctccacgtcgtccacgcacacttgcaggcccagcgcaattttttcatgcccttccagccttaataacgagatcaaaatggtaaaaagaaattgcgggaacacaattcgcagtctcctttttttgaaaatgtgggactaatccctcaaatccggtccgaatccgatcaaccaataacttttgggatttaatcctgcagccgcatccaaaaggattttttttttgaaaaatttctaattgttgagtgcaatttcctttaaaaaatcgttttttcccagcgagttgcccgctccaaataccaaaaatccaaaactcatgttaggcataacaaatagaatttcgcaaaaatttaggaaaaaaacactcacaacacttcgccctcaacgagcgccgtcccggtgtcctccaactcgctgagctcatcgtcctcacgcgttgctgctgaactagtggttgcaccaaacttgaactcggtggacgagctgttcaacgacgaggtggacggcacggcaacaatttgcggctgttggttgccaactcctgctggtactgcttggtgttgttgttgcacattattggcatcgataatgccaacatcatcgccacatgtgccaccacaaatcgtagtggttgcacccgtttccgggtcctccggcacgtaactgcgcaccgactggttctgctccttgtcctgcttggtgttgaggtgttgctggcgtttctgttcctgctcctcctcctcttcgtcggccaacaaagtgtcaaaattggtgtaacttttgcgcttgttgtgcaacatttggtccaaaatgtaactctggaatgggggcaatatttcaatttttttaaagacaaatttttagttttgaaaaaatgtaatagtttttagtttaaaaaacataattttttagagacttggattttcaaacatgtcttattttgaaattgttttaaaataagaataaatacaagtattttcaaaaaaaaaaaatgttttttttattttt

SEQ ID NO: 8086 - DNA, 3429 bp, Heterodera glycines
  unsure (1)..(3429): unsure at all n locations
tgcaggtcaaatncnnccaaacaaatggttttngnntaggtttatggccaaaaaaaacgaaccaaatgactttggtagtgccgcattttgtgccggtgtcatgcgtcgccggatgttcatcggcacatttggcgtttgctgttgtacaactcgaacttgttgcttccgctggtgctgttgttgtccaccagcggtgccattgatcagtgacgagttgcaactgcttgacccaccaattggagacattgtgccgtcaaagaactgtgccgtgctcattagcactgctgttgttgctgtcattgttcttggcaatgcgattggcgtgtcctccggatggaaaacatatgggggctaaaaaacggggttattttccatggtaaaaaaataagaacttattcggtttgctgggacatgctttcagcgtttttcaaaagaaattttcagtgaaaaataagaaaaaaatccaaccaacccatcatcgaaaaaattttgttttttcctagcattggcaaaagctaaaaatttactatgtgcctcaaaaacaccaataaaaatggcccaaaaattcgttttgctcgcctcgatgttgaactggagttcggtgagctggtcaacgcgtacacaaatgcgcttgagcagtgccgtgttgcgcatgcacgcgttgcgctcgtaatgggcccgcttcagcgcgtcagcacaagcgatgaatgacaacagttggaagtgcaaattggccctaaaaagcatgtaatggattataatgttcgatttttcggcaattccatccgattttttcgaaaaaagttttcggtcattcaccaaaaaaaatttttttttttattggaggggtgggggaacgacgtgggagaatgaaatgctcccaatttgaccttctttttacccaaaaatttcaatgaatttatttgcacaagcagataaaagccgggggtcaacctgttcaacgagtctttgagccatgccaatgacagcgcgcggcggtttcggcacacccaacggacgcgcatttcggcacgctccgcgcttgggatgaactcgcgcgcaaaagcccagtagcatttgtctgtcttcagcaatctgcaaaaaatgaaaaattaaaaaatgaatacattttaattttttttcaagttgaaaatccaattttaaaataccgaaacaaataaattttcggtgatttttaggagtgcatagatatatttgcgcctagagcatttgtacatgaccaaaatcgggtgcaaatttattaatttttttttgaacttttaaatggcatgtaatgaaaccataattagaaaaggcatacagtcgagaatttcacagaaagtcagtcacctcccgccgcactcacaatcagtcaattcggatgcaattctcaacttttgatcgactattaccaaaagtcattccggtctccaatattataataatgaaaatgtcaacttttaattaacggaccaataaaataactcaaaattttttcgttttcaaattgtagcgtttatgtcgccaagaaatgcactttaactctgcacacacacacatttttgtgtgccttttttattgtaaattttgagggtgtatgaatgagcacaatcaaaaagtatccaaaatttggtaacactgacgaaatttaaattgtaataaacaaaacaaaaaaaaacccatgggcgaagaacgcgtcaagactcttgagcagaatgacagtgtccggatgtgccaaattgtacgtgatcgacggtttcgtgtgcactctgcgggaaggacagcaattagtggtgcactaattaacccattaattagttaatcgacactttttgtcggccgccgccgtttgtgtgcccaacgttccgccgccgccgccgttggtgttgagaatttcgtccaccgccccgttaatgctccgctcaatttgctcatgttggccctttgtgggtttaaatgcggcagcattttgtggaaggccaatgggagcgaagtgatgaaacattttttttttaaatgcaatgaatgcaaataaaagttgtaattaaaatagagtaaacaatctaaaaatggagaagaaaaattaaagttcgaacagtttggagggcctcaaattgaaaaaagattgaaaaatgcgaattatataaaacggcacaattttggacaatttgaaaaacggcacaatttatttagtcaatttgaaggcgtctgttgtcataattggaaaagtatttgaaaaaacccaaattaaaaagggcacttttgtaaatgggaaccacccaattcttacagttgggaacccccgaaaaaaggaaggacccttttggtttgaaattttttttgtcataataatacataagtcgtgagcttgttcagaggggtttttggtgtcgatgatcagtgatcacgaataagtcataaattatgaccaatttcaaactaatttgaacaaaatgaaattcaaaaaagttgaattttcggctttcggttcgagttagggattggtcaaatcaaaatttatatcagattttcataatcagcaaccccgaaaatcacagcggcaaatttgcaatgccttttttggatgaagcgaaattgtgggaaaatgacgagaatgaatatacaaatgaaacgagatcagcagatgatcatggacaatggagctaccaaatgtataaacaatgatgaatgacacaaacaaattactttaatgatccaattagaaatgcccaaaaatggaatgagcaaaaacggagggggagttcagctaattaaacaaaaaaagtcacgaaggacggaccaacctcctacctattttaagccatataattcatttcatccgatgaattgtatgagaaaatagaaaaagcattagaatggatttttgtcgttaaattttgctgataaaaatgggacaaaaaaaatcaccggcgtttgtccatgtgctgacaaacgaggcgcatgtgaagaagacctgctgctgctgctaatgttggaaatggaggggcaatgaaccaaatgattgggggatggagtgcggagatggcgtgtgataatttgtggaaatagtgactaattgtgtatgatggtaaagaaagaaaagaggaggagagtgggaaagtgggactgatcgatcaaccgaagataaatcataaaataactaaacatgaatctgaatcatattttgtaaccgtgggtccgaatcccggacccgatttcgaacaaaatttcgaaaattcaaaaattttcaaatttccatgttcagtccagtctaaaatggtttacaatcacactcttggtctctggaaatgtacgaaaacaggttgttgatacacaatgaagcgcaggggaacattttttgtgcaaaaatcctacataattggtcgaaacaagcattattagccgaccattgattttaatgatctaaac

SEQ ID NO: 8087 - DNA, 802 bp, Heterodera glycines
cctaaatgtgggcatttgccatttggccgcccttcgcttttctctttgcgttgaccatttttggcgttccggcatttgtcgttttcacctttgcttcagctaaccctttggcactctcgccctcggcatttgcctgctttttctcgccttcgcttcggccgaccccttggacttttcccttcggtcgccatttcaaatcccattttcccctggtcagcttcatctgcctcgggaaacggaaacattttattgcttattggtttttgagtgttctgctgaatttgaggaccccccttctcttgggcgtaccccctcctattcccattcgctgagcacacttcccatccattaatggcatcaaaagtattgaattcaaactgaacaacggatgaatgaacttggtcagaagtaattttttagatgaaaacatgaaaaaaacatggacacagaataatcgtccgttttgaactcccacattacctgtaaaaggaaagccatttaagtgtgagcatgcaaccattccccgatcacccatttatcactcactcactgtccgtcgccgccctgttgcattttggctcctcctgaacagtcgggaaaacaattagaaaccaaaactttttgatcaaaaactaacctccataggccggaacaggcacctggccaccagattgtgtgatgtagtctaaagaaaaaaacaaaaattaaatgcatggaatttgcagaacggcagtgcacttcgtttcaatatacgtcatttcaatatatgtcatttcaatactaaagcaaaaaaatgaggaag

SEQ ID NO: 8088 - DNA, 931 bp, Heterodera glycines
  unsure (1)..(931): unsure at all n locations
ttttctattaaattttttacataantcctagtctaggctccgtcccgtaaaatttccttaaaaattttaaaattttcaggaaattattgaaaggaattgactcggtgctgcacgctaaggctgatcaacatgtacagaaaaatgaaaaagttttgtcatttgtggagcaggcacggaatgccatgttggacagggccaaactgatgaccaaccaagttggcaagcaggtcaaggacggactgatgctggcatttggccgtgttgtgttcacattcgtctgatgagttgccgccaaattttgatgacgagacagatggccaaggacggcaaaaaaaatttttttaatagaattaaatattttgtaaaataaatttatttaattttttggtaaatatttagcaaaaattgaatttttttgtaaaaatctgtttatgtatagattattaaaattgtcatcattatttttgtttaattcatgtgtaccaaaaatttaaaaaaaattttttgaacagattttaatttatttaaaaaatatttctttgtgttcctatataatttgtaattaatagatttagtttaaaaaacttttaaaagtcatttaaatattattaattaggagcatgcaggcaatatattaaacaaaaacggtttaaataaaaggaaaaaaataagtaggcaacaaaattaaatgccaaatttgtgcgcccagcaacgggcgctaattttttgacttggcgataatccgattagaataaacaaaaaaagtttgttagtggaagattattaactgatttcaagccataagagcaaaatgtgaatagtgtaaattgtattgccttccgagttttggagattttaaacattttcttgcttcaaaatttcagaaaaagtaattttctcaacaaaaaaaaattcgttcagcgatgagtga

SEQ ID NO: 8089 - DNA, 3810 bp, Heterodera glycines
ttttatgcgtcccataatcattttatgcgtcccataatcattttatgcgtcccataatcattttatgcgtcccatgacattttatgcgtcccataatcattttatgcgtcccatgacattttatgcgtcccataatcattttatgcgtcccatgacattttatgcgtcccatgacattttatgcgtcccataatcattttatgcgtcccataatcattttatgcgtcccatgacattttatgcgtcccataatcattttatgcgtcccataatcattttatgcgtcccatgacattttatgcgtcccataatcattttatgcgtcccataatcattttatgcgtcccatgacattttatgcgtcccataatcattttatgcgtcccatgacattttatgcgtcccataatcattttatgcgtcccatgccatattaatgcgtctagtgacattacatgatcaaccaaaatttcttaatataaaaacaagaaagtattacggcgcatttcctccaaaatattttgaaatatttttgttttagaatgataacgacgaaatgcgtactgatacaaatatgttggtaacatttctggcgtagttccatggagatgtttcaggctttgctaagagccctccaggtagcttcaattccctgggtgtgtatttgaaggttggcgggctctacaatttttatcaaataatataatgggacgcataatatttcatgggacgcataaaatgtttatgggacgtataaaatgtcatgggacgcataaaatgtcatgggacgcataaaaccgactagaaccgttttttttcatttttaaattgttaaaaattattccttatattgcacgatttgtttgtccatcattccttgtacttattgttcatgaaattcagacaggcaccagcagctcaccagcaatattatacgtatgcgaaatgtgcaaatggctttgtgacaaaacttaaaatgttacacattgacattttatgcaaaattttatacattgccatattaaaaaagtagtttcatagaataatttagtttaatttcttattaagcctctttttgtgtgtgtttatatcaaagagtccattaaacggaaaattttttggtaaaagcaaggacttaaacacacaaattagcagttaaatttaccagacaaagctcaaggacttaaacacacaaattagcagttaaatttactcaaaagtctaagaaataaatagatatatataagcaaaacgaagaattacggaccggaacccgtcagttgggtgccgtcacgtttgggcgccagcaccttttcagctataactttttttctttgtcaaccaaattcaacattgttgatatcgttcaaaaaccctaagtttcctctattagtatgcaaaaatttgaaaaatttcattcaggctcaaaaaaatatggccagaagaattcaaaaaaccagattttccaacctttttggtcataaatttgttcaaaattgacgaattttttttggattttgcaggttaatagagcatattaagagcttttgaatgataccaaaaatgttggatttggttgacaaagaaaaaagttatagtccaaaaacatgctggcgcccaactgacgtagaccggttacggatatataaacattcttttgcatttgatgccaattccctgcccatttttggctatgcatttggtttaatacccattacaaaaagctaaaatttacaatttccaagcagacaaaactcatcaatcgttgtgttcgctgttgcgacaaacaactttcgagttaaaccaaaaaaaattgcgaaaaaagtcgaccgggttggggagggaggaggtggtggcactggcaccctcatctggcccaattcagtccacaacccgacacggggatggcataaccggatcacaaaatgaaaattgttgaatgaaaagatatcgtgccaaaaaataattttatgacagagggcatactatagcaaagtgaaaatgaaaagtaacaaagaaaaaaatggtgaggggtaaaggtgatgtcaagaaaacatggactttacggtaggatttaggaatctttttgtgattttttctaaatgatgctttgcggctttttgtggtttatttttggggctttttgattttttgggttttaggctttttgggtttttttggctcctcagttatactttttgacgaaaaaatttattttttccgttttgttgctctcagctgaaatgccaatgtgtccatctcatctcattcattttgtgattcttcttcctcctttccattgcgtttgttattcttcgacttcggctgctttttcagttcgctttcctctttgttcaattgtgacttaacgttttcgggtcaatggcaactcgcacaaaatgcaaccaactcgtatttacaaaataaagcctaatcctaggcccaagcactaaggctaggccttggcctagcctaaagcaggcttaagcctaagcctggcccaagcactaaggctaggcctagcgtaaagcttacgcttaagcctaagcataggcctaacctaagcgattgtacgagttgcctttatacaacattgtatgaattgcttttgtgtataacactgtacgttgtacgagttgccatgaaaccaaccttttcaatggcattttccaaatcattcattttgatgtgacgcaattgggcaaccgtctcccactggccaaactcatttctctcactagcatcgtgcaaaacgccaaggttcactgtttgacaaagatccaacaaatcatcaaagcaatagttttcggtcctcgatgctaattgccttaatttaaaataagaattaagggagagaattaataaattatcattgttaattttaaatcagtaattaaggaactaatgattattattattattagtcaaacgtgccgccactcacttgatttcttcgtctcttaactcaaaagcatgttgattttcttccacaattttccgtatcattttctctcgtgtctgttggcttggattttcaacaaaaattcgcttggcgaatcgtctgctcgcctctttgtccagttcctttggctgatctgtggccccaattaccaacacatgatacgccgagtttgatgacagtttgtccatttcaaccaaaaattgtgcctttccgcgttgaaccgtcccgctgcgtaaaaatgcgtcaatttcgtctgaacaaataaatggtaaaatgcttaatccatttgctataataaaccgatgaaaatgatggaaggttgagcatttttggccatttgaaaaagcactttgataaaatcaactgattcttcgtccttttttgagataatcactgaggaaggaatgctgaacaattttgtagaccattcttttgcagcagcttttgcctaacagaaaaatttgtttaaataaaaaaaaaactgaaactccgacagcagaatagaaaagatcgggcttggggttctttaaaatttttgtttttgaaaaattcaaaaataactttttatttaaaaaattggcaaatggtaaaaaataaattttttggctaaaatatgcagtgtataatgataatgtccatatttggggatttctttttggccaaatttcaatataattatttgagaaatttaaaccttttcaattaattcttactctctgtctctaattctttcttttataaatgacttacgagcatctcttttccactgccttgagcaccacccaataaaatggatttttgaggtaacaaaaggccttggaaacggtcgggatactgtaatgggagca

SEQ ID NO: 8090 - DNA, 2385 bp, Heterodera glycines
ggaaatcgaacggcggaaaatttagtttgatttgtttatctcacaatcagcaatcagtgatggaaaaaatcagaaatttatagggaaattcaatcattgacggttgaataagggaaggattttgtatccaaattgctcgcagtattcttctcggtctattggccgctgcttgcgcataagtcaactgaaaggaaattagtcatgattattcatttactaaacgttcaaatttagttaggctgattaaataaagcgaattaatgtcaaacagactcacccaccggtttaacgggcggcgatgagcagtggtcgtcgttgtcaatgtgttcgctggtgcccggccgttgctccgtcgttgttgagcattccatcacggagttggaaggcggcgagcaggagccgaagttggcggaggaaagtttcccttcctcctccgtcgtgtgcgaagcgccttgacatcagtgctttgacatcctaaaccaaaatgtaaaaccattttcctttcctagtgtttttgtttctttgaaataaagttgcaaatatatttaatgtgcggaaattctttgctttgacgccccccccccccccccgaaatccaaaaaagtaaattcagcaaattttaacttcttaacaaatcgcattaaaattctgaaaaaatttaacgggggcgcctatcggcaccgccgcacccccactttaccagatttttgaaaaacgaagactaaaatggcaaaaaaaaaaggtttttttttggcgaaaaacggctaagtaaaaaacaccccgtaatacgggatttcaaaaaatgaaaaatatactcctaaaaatcgactgaaaaaagaaaaatgcaccttaatttttaaaaaatgaataattatttttctttagtgaaaataagcaaaactcagttattgttaagttttcgctttacataacacaaaagcgttcaatgcaaaatcgaaaaataaataatgaataattttttaacttgccatagactgaatgtgcgtagccttggtctcgtcataaacacgtccattagattctttaaattcaatatttttataaaaaaaaattttaaatttgcttttatctattattaaattcataataggaagtagaattatatggaaatccatattttttcctggattatgggaggcctgaaacgtacgaaaaacatgtttttagcttgactagaagcttcttgggtggatttctatatccatattttccatatttattgttattccacatatttttgctatttcatgtccatatttcgcgatttgttgtccatattttatggccaaatttcgccattttatatccatatatttctattccctcattacgactgtaccgaataaaacgaatcaaattgtgagggcgggaggagggagggaatatgaaattttctatttaataaaaatatttcaattcacttaactgatcaagtggtaagcggcacacaaggcctcttcaaaaatttccttatttctcgaattgaataaggttgaaaattttctatagtccatttcccgaacaatatccttcgctatgataggcttcagaatggatattgcatttttcagcagttcttcgtccgtcgaactctttatccaattctccaaataaatcaagaccttactatgttttgtatcgtaaatgtccgttgctttttgtggcgcaatgtttgcgagtgccgccgtggcattggccacgagttggggatgtgacgcattgtcctcggacaaacaatcaacgagaaaaccaaaaacgttccttggaatggatttgttgatcagctgttcgtcaacgttgcattttagaatgaggtcgaacatttcacgaattttagtcgttgcttcaagtttctcaacttgtcgcctgtcttccgccattaggacaagctaaaaattttgaattattctttgattaaaaaaagcatttactgaattagagcagtcattaggaattaataacccccccccccgccctgaaataaattcccaccttttgacggggttaaaaataaagccgcacccccataaaattttttttaatcattttctttaattttattatttttattagtagcccggcgggagcgggagtcatgtgggagttttactggagtcccgctccagcttccggataatttttgattaaaaaattgttaaatttctagccaaaattaaaaaaaaaatttcccagtgatgcatattggcaccgccggaccaagaaaatccttaattttattaaaatactggcttaatttcgcaaaaatggttttttttctttaataaaagtattgcccttcaaatttgtgcataaaaaaagtatcccataaaaatttacccaccttctagggatttttttcgtttt

SEQ ID NO: 8091 - DNA, 1687 bp, Heterodera glycines
  unsure (1)..(1687): unsure at all n locations
agagtntcatagcatataatttacaaattcaaatgaaaggaaatagattgtacaaagaattagagaccggacgggatcgggatcctgcgggatttttccaggatcccgcggggattaaattcgggatcccgaccctcaggaaccgtcctgagtgatttttaattcatcgggattgatcgggatcgggatttcatcgggatcccgaatcgggatccgaaaaaattttcacgggttctccgaaaatacggtgaaattttcgaaaatttgacgcgaaaagttaggtcatcgggattgatcgggatcgggattttcgatcgggattctctcccgactattttacctatcccgcgggattgaatgtcacgaataacttttcgaaaaattctccgatttttaattgaagattctttaatttaaattaaaaaatattgtcgattttctaattttttcttgaaaaatctcgtaaaaatcccgaaaaaattttcacgggtctccgaaagatacacgaaaaattttcgaaaatttgacttaaaaagttgaggtcgatacactaaaattttcgaaaatttgacgaaaaagccgatttgaacgaaaacctgagcacgaaaacttttttaaaaattgggtttgagcgaagatcccgataatcccgcgggatcccgaaaaaaatcttcgggattcgtcggggatgagggaattcggtcgggatcccgactcgggatccgtccgacgccagttgtccgcttaaagaacaaagaattgtcaaaaagttgttgctgcctcatctgctttttgcactctatgtacaagaatacttattaccttaaattaccttaataaaagaaattcatttattaatatttattcatttttaataataatgaaaaatagaacaattatttgattttgttctaatagcagaaaataatatatatgaatatataaaaattagaggaaatataaagcaaaagatatttattttaaagtcatgttgcttatactcatgcataaaatataaaagatgaatttgttcagttatgacggaaacaaaatgaatataaaataataaaatcaattacgatttattatataaattaaattatcttttctattgacgatccaataaaaatacttgaaataaatttattccttataaaaataacatttacaagctaatcaaggaaacaacttggaataaaaacaatatatggttttacaacttaaaaaatatatctaaatcttttttttgcggaaaacaacaattttaatacaaattatcaacaaaaaaaaaattctaaaagaatttaaagtctcagtcgttacaattttacattataaaaaacaaatcatcaatgaaagtttaaattaaatttctcaaatgatttatcctaaataaacttttttattaaaataattttatgtgattcttaacataatctcagaattaagttaatgtgaaaatatttataaaatattcaaatgtgtaataatttataccaaataaaatataatttatagtaaataaaataataagacataattgatacatagaattcgaagcattttaatttaaaaaacaataaatttataaacattgatataatagaaccaaatttatttaatgataataaaccgtaaatttgcaagctgatcattaattaaaaaatatcgaaataaaaatttatat

SEQ ID NO: 8092 - DNA, 3768 bp, Heterodera glycines
  unsure (1)..(3768): unsure at all n locations
agatatgaagaaaagacaaatatttatttggagcacaaatataataaataaatggtcaagcggagggaagtacaatgggaggaataaatgacagaatgaacgagggagggagggaaggcagcgcttatatgtgagggggaatgtgcctaagggaaaggagtgaacaaagttcactccacttattgattggtctctcaacttctgaccacttcaggccatttgcttttggcatccatgatgatcagccacattgatccccaaaatggtccgcagaaatcgatgtgtattcgttgccacggtctttccggtgattcccacggatgcaatggcactttccgctcatccggcgcctcttcttggcaaattttgcatctttttcggattatttcgatttctttgtcgattcctggccaccacatcttctgacgtgccagggccttcattcggaccatccccgggtgggtcgcgtgcaaaatttccaacatttttgtgcgaaattttgacggaataattgtccgatttccaaacatgatgcacccttccattaaggcgagctcatttcggatgacatgaaaactttttagtccttcgactttttgtggccatcctttttcgatgaattctttcacttttcgaagaatttcatcctttttgacttcttttgcgatggcactgactgtgaccggcaggcatgaaatattttcggcctgaacttgctgaacttccagtccaacacagtcgatggttgtctcttccggacacggcaatcgcgacagaccgtctgcattgccaaattcttttgtcgaacagtacaccacttcaaaatcgaagttcatcaatgtcagtgaccatcgatgaagtcgttttgccgccacaatcgggagctctccttttggcccaaaaatcttttttagtggctcgtggtcggtttgaagtacgaactttcgaccgtacaagtactgcttgaatttgtcgacaccgaaaatgatcgccctcgcttctttttcaatctgcgagtaattgcgctccgatgaatttagcgttcgggaggcatacgcaatcacaccaactcttcctttttcatctttatgaaaaatgaccgccccaactccatagtcggatgcgtccgcggccagaaaaagtggtttttgcgggtcataatggaccaaaacttcggttgatgtcaaaacctttttgatcacatcgaatgccttttgttggctctttgtccatgtccatttggcatcatttcgcctcaattcattgagcggttctgaaagcgttgccagggatggcacaaattttccatagtagttcaccattcccagaaatgactgcaattctttcagatttttcggctccggcattttcaaaattgcctcaattttgccaggtgacgcatgtaaaccttttttgtccacaatgtgtcccaaatattcgatttccggtttgaggaactcacatttttcacgctttactcgaaggccattctcagacaaccgtttaagaagctgatcgattcttttgatgtgatgctgatcagtggctgttgtgatcagaatatcatccagataaaccgccacgccatcaatgccctgcagaacttcttccattacttgctgaaaaattgcgggtgccgaagcaactccgaatggcaatcgagcgaagtggaaaagtcctttgtgcgtgcaaattgtgagacaacttttggccttttcgtcaagcaaaagttgtaaatatgcgtccttcaaatcgattttcgtgaatttttcgcctccattcaagatgctgaacagctcctcggggcgtggaagagggtattgatgtacatccaaccaaggatttaccgtgactttgtagtcaaagcacagccgcagcttgccatttgtctttggcacaatgactagcggagtggcccattcactggttgccactggctcgatgattttctccgcctgccattggtccaaaactttttcaacttcattgcgaagtgaaaatggcaccggtctcggcttgcatcgcttcggttggcatccctctttaaacttcagtgacgccatctttttgcatcgtccgacaccgtcctggaacacttccggatattgacccaaacatgcgtccaattcctgtttgatctccacggcacgaattgtcgaaattccgaaggctcggttcaaatcaattttcagtcccatgatcaaatcgcggccgcacaaatttttgtgcttaccacttatgacatgaatattggactcaattgttctgccttcgtgcgtcactttcacctttgcctttcccaaaatgccaccgatggattttccgccataggctaccaatccttgagatggttccaattttggcctgccgatgcgtttccaatcaatctcgtcaatcactgtgacgtccgcaccgctgtccagctcaaactccaaccttccattatgaatgttgagttgaatgaaaccaggatcggcagaaattcccttaatttcatgaatgacgctgacacttgaacattcaatgttcttgatttgtcgtccgttggtctttggcttttgaccaaattgttgaccaaagttggcattaccgtctctgtttttgcttttgcaaccaacggcccaatgcccaatttctccgcattttctgcatgtcgaattctgattcgggcacacatttgcaaaatgtcccggttttccacaccgaaagcaacttctagtgcttttcgtcggcgttcttggtcctctttgctgattgccaactttcgcgacctccggcattgcatttgagccaattgcttgggcatccaaattggactgctccaacaaaacggctgattcgactgcgtccttgaattttaggtccttgtcgccctttttgatcaattcaacccggattgcatcattagagatgccattgataaacaatgcgcaaagacacatgtcaatgctgtcgcggctccattctgcctttgctatcaaacttcgcaatcgcaccgaatagtcccttatcgattgccctgtctgctgcttggctgaaaacaattcatgcctgcacgcggcaatcgattttgcttcgccaaatcgttccaccatcagttgttcaatttcggcaaggtccatggttcggacatcctcaggctgtgccattcgccgaagctcttcgtacacctgacccatttctgtgaacaggagcagacgctttgttgcgacatcggtcacgcctttaagctggatgaaaaattcgaaacgttcccaccatgtcgcccagcacatctctggcaaaaacggtccggggccttttccagcctttattaccgctgccatagttggacttttcttaatttgtcccactcggatcaaattcaagatgatgctgatcaactgtaatccgacttggatttacagtgatgtcaattgttatccgtcccggactaacaatcaaaatcgataacggccaatgttatccaactcggattaacaatgccacacagctttcagccttgcttttcaaccaattttccacttgctctgttcggcctcgatcagtgatttcaaatgttatccttcccggattaacaattcaattcctccaaattcggcgattcgtcgctggctgttatccgtcccggattaacaccagtaattgagagtgccaccacctgggtgaacagctattccaactcggaattagcttactctccttcgacgatttttggaaaattgctattccgtcccggaattagcaatccanaatttggtgcttttt

SEQ ID NO: 8093 - DNA, 3329 bp, Heterodera glycines
aagtatttaaatgttcgactgcgcgggaatccgatgggacccgtcccacacaaaaaaatttgagtttcctttcacgcatgaaattcgcaaaacgaacttcaacaactcgcataggtaaggaaggtatgcaccaatttatgcactgccaaattaacacgaaaattccctatttaactcggcaaattgtacacttcgcctcattccttcgatcattcattcctttcgtttttctcttttcccttcaattcttaaatcgccttcctttgccatgcttttccaatttcattactgggtgaaaaaggttaaatagcttcttttttcacaaaaatgtaaaaaattccaaaattttcgaactttataagaatttctcaaaaatctggaaattaggctcgaactttcgctcccagtttgcgccagaaagcggctttttcattccaaaaaaagatgcatcggcgctgggacggctacataaacccggcgccaagaaactgctttttctttttttgttaggtcggcttaaattgtaaaaaaaccagcttttacatacatatttgcatattccaaatgttcttttttttccttcttattttagagccatgaaaatgctcatcagaggcggacttttcttcattatggtgcgcgtttcaactattttctcgcattaatttcaaacgaattagtgcacaaatgtttttttggtccatggctttccgaataccaattctattctttttttgaggcccaaactcgcgcaaataagagtcgatgatttttaaaattcaggcccaaaacggaaaagtaccaatattttctgttttgttatttcaaaaacaaaaaaatatccttttttgttttgtttacccttcccccccccccccccccacagattgctttcaccgtcgcttcgttgcttgtcattggctttttgttttccctgtggttgggcggcttcgccattcgtgtggttgccgttgtgatcgaagattctgaggaaggataccacggtgggtggactcaatgttttgcaattgtttaataatgttaaatgaaattggaccattcgtactgcggctatttgtacttgtccaggactaagtttatccacccgatgcttttgtgtattttaaatcaccccgaaaaaccaaagggaggaggacccttttgttttaaaaaaaccccaaaatatgtgctaaaaaccaaaaaaaaggcctaaatatgtgttaaaaattgaaaaaaccaagtgtatttacgcaaaaaaaatcatatttaatatcagcctttatcaattttcgcccgaccgccagtcaaaatgttggcgatatcaatcaatttgtaaagtcccggattaatttttccatcagttgaataagttccttccgggaactttgaaatccagtgacgatttaacacagcgtttgatttgcctgctttaggcatttaaatatataaagaaattttctaaatgcttaagaaacgtaaagtagtcaatttttagggtgcattttcagattttcttgtatttttcttacgatttttttcaaaaatgccaaaatatgtgctaaaaaatccaaaatagcccaaatatgtgctatatgtttttatgtgccaaaacgccaaaatatgtgttttttggctcaacactgttgttcttgcgctgatcattttctttgccattctttttgtcgttcaggtgccgtgcctttccttgcctaatcttcaaaatgccattctccccactttttaatttaatttccactttaattcttgctcattttcagttgtgtttgttcgcctgtttggccctttctcagccctcaaaatacacagattactgatgataaacatgattcaatctcttccccccgttgttcaacaccaaaaatttcggttgtttgttttagctagggttcgccccgctctgaactttttttccatggatgcgttttgtctagggtaaaagagcttctaaactggttttagcgtgtattttggaaaaaatttcaacttttcattcgaatccggggttcggaaatgggcaaacccgagttcagattcgtaatcagcaccctcgaaaacccgcgtgaactgtttttttgctcaacataaaaaaagttaaattagagagatcccccattctttaggattgcgcaagcgatcattttttggctgaatttaagcgttttgggaaaaaattgcatgttttaaacaacagtttttagcacatttgcttagagttaaggcccgaccctgagctccccatttcccgacctgaatttaaaaaatttgagctttttccaagaaactgcagtccggcgtgcgcccagcccaaaatttaggaccgggggtcccggaaaacgggctttttgtcctgttaagcccgttccggtccattttccaagtcactgcactgttcattttgaaaattccggctttaatttccgttttattaatattatgactattttccgcttcatgaggttaaaataattatgtatattctgaaaaaatgtattttatgaaataaaaaaaagttatatttaatttttattaaaggaatttaattagcattttttgtgcacgttgatatacaataatttgatggaaaagctttactaaagtacaacagagggattgaaatttaaaaaaagagattaaaaatgaacggaaaggattgaacattaatcccaacggcaacaacaaaaaagagttagaccaaaaaaatttggtgccgttgggtttaattaacattaattttattaataagagccaaattccattaaaatgggcagcggttttttttggaggtggtgcacaacaaaaataagatgcttttgtgttaagtgaagcatttgttgggttggagagcggtggtgcttttcgagactctcgagattttccgccgacatttcgagactggaaagttttcagtctcgaaaagcacgcggtaggtaaagccgggataaaaacagtcacaaaaatattcggcaaatgaatgaataaacgatgaatacatttgaacagtactttggctggctgtgaatttggagaaaatggaattttgcgcataaaattaaaatgaaaaaagggaaggagaggcggcgagggagtgaaataatgcaacgaattctttgaaagacgcaaaattgagggggagagtaggcttatcaattccaagaaagtatgggttccctgatatataatttcaagggccgactcagtccacaagtacagaaaaaagacatagggatttttggaaatattttcaaattctcacggacaaacccgtactggaatattccaaggaagtattgcagtccctgatatataat

SEQ ID NO: 8094 - DNA, 1080 bp, Heterodera glycines
cagtccacaaggatagaaaaagaaatagggattttggaaatatttttcaaattttcacggacaaaccgtactggaaattccaagaaagtatgggtttcctaatatatatttcaagggacgactcagtccacaaggatagaaaaaagaaatagggatttttggaaatattttcaaatttttcacggacaaacccgttatggaaaattccaaggaagtattgggttcactgctatataatttcaagggccgactcagtccacaaggatagaaaaaagaaatagggatttttggaaatatttttcaaattttcacggacaaacccgtactggaaaattccaaggaagtatttggttccctgatatataatttcaagggccgactcagtccacaaggatagaaaaaagaaaatgggatttttggaaatatttttcaaattttcacggacaaacccgtactggaaaattccaaggaagtattgggttcactgctatataatttcaagggccgactcagtccacaaggatagaaaaaagaaatagggatttttggaaatatttttcaaattttcacggacaaacccgtactggaaaattccaagaaagtgttgggttccctgatatataatttcaagggccgactcagtccacaaggatagaaaaaagaaaatgggatttttggaaatatttttcaaattttcacggacaaacccgtactggaaaattccaaggaagtattgggttcactgctatataatttcaagggccgactcagtccacaaggatagaaaaaagaaatagggatttttggaaatatttttcaaattttcacggacaaacccgtactggaaaattccaagaaagtgttgggttcccttatatataatttcaagggccgactcagtccacaaggatagaaaaaagaaatagggatttttggaaatatttttcaaattttcacggacaaaccgtactggaaaattccaagaaagtattgggttccctactatataatttcaagggccgactcagtccacaaggatagaaaaaagaaaaagggatttttggaaatatttttcaaatt

SEQ ID NO: 8095 - DNA, 2084 bp, Heterodera glycines
aaaaaccgcggtgggggtgggggcatctaagtgcactccacagctcaattcgcagtcaaaatcttcatctaaaaaacatcatcttctctcacgtaacactctccgaaggtatcttcgaaaaaaattattcgaaatatagctcgtttaactcgaatttacctccggttccgtgcgttgctttgttgctagcttcggccatcctcgtcgcgaccaattgacggatgattactcatttttttgaagaaaatgaaagcgtaaaataaaatggaatttcaattacgctgaaaattttggattttaagtagatttatttcatgaaaagaaaaaaaatcacgaacgaacaactcacatacaataggaaaattttgaataccttatttattgaattagaaccaccccctaaaataaagcaccttttcgaatgggtacataattttttgtcggttgcctttggcccaaatttttgtgtccaaggggcttttgccggccgaaaaaattttgaaaaaacaccaggcccttgctgcccggttaaattcgcgccaacgttttcgtacaggcgacaactcgtacaaattgaaatgtacacagacaaatcctacaaaaggtggaatattttagatggtaccccccccccctccccttttttttattggcagaaatttttttgttaaaaatgcagtgaaaacatgttgctaagggtttttggggtcgctgaacagagactaaccctaagctaaacctagactcaagcaagtctaagtttaggcctagcctaagctatgtacgagttctgtgtacgagatgcctttgtaagataacgacacaatcaatgtcacggtgattctgtgtgtgtttttgggagtcctgaaggaaaatcccaaacggtcaatgtgttataaaatccgagctcagcttcgtgatctgcttcttaatttttttttcataaaccacaaaaccgtaccattgccaccaaatatgttaatatgttcgtgcaaaatacctactcatgttttatgcccaagtcaaatttcattggcctataattgcatggcgaacaactgctagggcgtgccaccccacccttccttatttcctggacccaatagcctcaattttagggctgtctttctctctcaaaaattccatatggggtagacacttaacagaatatgcctaggtcgagtagccagtgggggagtgcctgccacaaagaatggcagacttctaccaaagggccaaaggggtatccgaagactcacacgtaaggttgtattgagattagggtaacacgggcccgggtatttgggcaaaaaccgggcccgggtattaccgggcattgaaaagccgggtaccgggtcgaataccagtttttaaaccgggcccgggtcgggtacccggtaaaaccgggtattaaaaaattttcaatttttattttttttcaaaataataaacaaaagaaaaatttccaaagtcaggggcggttcatgttttcttggagggggtaccaccgcccggtagactttttttgtttttcacatcacttttttcggcacgcttttccaaaaaacttggaaaagaagggggtccggcggtgctgatggcgccgccgggaaaaatattgtagtttttaatgcgatttattaacagatttgtctgctcttatacagtttgtccccataaaattttttttaatttctaagtaaaaaaaattttatggggacaaactgtataagagcagacaaatctgttaataaatcgcattaaaaactacaatatttttcccggcggcgccatcagcaccgccggacccccttcttttccaagttttttggaaaagcgtgccgaaaaaagtgatgtgaaaaacaaaaaaagtctaccgggcggtggtaccccctccaagaaaacatgaaccgcccctgactttggaaatttttcttttgtttattattttgaaaaaaaataaaaattgaaaattttttaatacccggttttaccgggtacccgacccgggcccgtgtaacccaagtttttactattgtggacatttcgtggagtggactggatgttttgtgggtcagcgaatt

SEQ ID NO: 8096 - DNA, 1715 bp, Heterodera glycines
  unsure (1)..(1715): unsure at all n locations
gtcgaaaaagtgaaattaatggatccgggccncggggttgaaatgggtgtcagaaatcacttgctccgnactgaaaaccccgtagaataattataattgaaaaaattttgaaaaaaaaatttttccgaaaaatcttggagtacccagtgaatttcttaataatattagatccatttagttcaaaaattgattacatattgtttgaaataattgaagaaaatttgatttgaaaattttcattaatttaattttgctttaacttttggatttcataaaataaaaagcaaaataaaaatttaattttgtattattttaaatattttttgaattttttaaatttcccggttggtcccggtccccgatcccggacaaaaaccgatgttccggtcccggttttgtcaatttcccggtcccgtacaaccctatttaaaattccttcgcattttctcttttttatgtctcttcaatcgtttcatttttattttgaaaatgaatttttggcaagtggaaaatgaataataatgatgatggcatgacgcgttgcattggcggcataccgcaaatttttggtattttccgttccgctctgacgcgttaggtctacttaattattgataactataataataacatcgaaaaaattccctggggagacaaacggtgggaggggagacaacggcactaaccatcaaagttttacatgacatattgaaattgaaatgccgtttctcaattttgtgcaaaacaaatggcgaaattggcgcaatataaacacaatttaaattatttccatttaagttttattaattatattgcatttttaaatgattgtttaggcgcagttaataaatttaaagttgtactgtaattagattaattaattatttaattgctttgtgttgtccgttccttcgatttcctcccctccttcaaaatgttttgccgttatcctttcgctgtgcttttgcttttcggctttggcattgtttgtgccaatgttcggtccgatttatctgaggaagacgaactgatgcttttggtccctttcaatgcgcggccgttggccaaacgttttattatcggtgaaattttatattttttgctttttttcattaaatttgcgccaagtttttcacagattttgaggtcgaaagtcgccctcagcagcagtttaacggacggactttgacgaagcgcggaatgccgcttctgttcccgattccattgcagcaaaagcagcaccattccatcgacacaaggcgtgcccccaggcgcaattggctgcattttggcagaaaataatttgtttttaattcgatcaatttaaatttacaattttggctttttttgctgtgccgtccgtcggtgataaattttgacagattttgactgattattaatttgaataaatatatttttttgttctaagagtgtaaatttattacacttgagcatattgtcttttattgcttttggcagcaaattcccaccgtttttttattattcaaaatgccattccgtcgctcattttacggcacaattttcatttttcgaatgttattgtcttggcaataacaattacaaacaaacacggacaaataattctactgttgtccatttcccattttatttattgggaaaagaaaaaaaaggttgaaaggttcggaatgtttttgactctttttcttatggctgttttgacgacactttcgtca

SEQ ID NO: 8097 - DNA, 1590 bp, Heterodera glycines
  unsure (1)..(1590): unsure at all n locations
tgtacagtccaaatctctgatgctacaataagcccacagacggagaaagaattgtgaatgggacaatattagaaaataaaaataaaaatttgtgatttaaatttattttagcattgtgttaagaattttatttatttatttttatttataatgcaagaaaaaaccnccatttggcaaattgactttagcaaattgtctcggcaatttccaactgcgttttatggggtgcatttgttatttatggaaaaggcattcatgaaaaatgtttcttttctcatcagtgcgattgcctttttaaaaataattattttttaatatttattattttattttttgaattattactcttactgtatgtaataccgtatcaaccgaccgaccgttcgacatggccaccctttcctcgtccaccgtaatgctcctctttttgctgctgtttgtcttggccctcatttacgtggcgtttttcttcacccggtggcaacttcgatgccaacatcatccttctgaatgaaattggaaaaatgagaataagtgggcaaaacttaaaaccaaaatttagtaaaaagtgcgatttattttactgctttactttaaaaatctgattttatttccatttttttttgcaattttgttaatttatccgctcgcttttccttttttcggcatttttgtcctcttttacattttctctgattgcatttcacattttgagatggcattgccatttgaccaccattcaaatccaattgtgccaaaaaaacccctagggacacacagcgctaaaaggggcgaaaatgtcaatgatttgccttttaaggaggcgagggcgggcaaatggccatggaacaaaaggaaaatgccgaaaatttaagggggagaaaagttccgttttttgttccatttgtcaatcaaaacatttttgggaagtaaaaaatttaacaaaatattacataaatcattgaaaattaattcaaatttaattaaagggtatccttttattattaatgatttttggcttaattttgtcgcattttttcgtccttttcaccgtaaaaatccttttaattagcaatgaacatcatttggcttgtgtaaacgggctcaacgagtttaatattggcatgttttttgtgttttattaattggataataaataaataaaataattttcataattattttgcttaggcattttgcacttgcgaggaacgcatcaatggcaaaatatgaggtgcagtaaaagccgaatgctaatacattcttgctgcattcaatcttaaaattaaactcccaaggcatgccattgaccaatggaatgggcggcactcgcccgtttttggcttttaccttagcctcattagcccaaccgatgcgtcggccaggtttttggttttaattttcgtattttataaccaataaaatatcaaaagtttaatattattgcttcttttatccaattagtgtcgacattcgctnttgcgacatcgcccaacgccatttggtcgccatttttttgtcttcggactccgtcgtcggcgccgaattgtccgactttcgtattgccttgagcatgtaccatttctatca

SEQ ID NO: 8098 - DNA, 1383 bp, Heterodera glycines
  unsure (1)..(1383): unsure at all n locations
ccggcacccgcgtctcttccgtgcccattcaaatgccttcgnccgtcgaacgctacggaccttttctgaagcacattcgagaacgccttagacacacaaatattgtgaaataataagccaaaataaattcaaaaattagcacaaattgtttagcttctgtacaccgatgaccttggcattgtccattctctgcttgtccacgcctccaaaatgaacatgtcgcaaacgcgatactcatatttggtgtccaatatggtgaattaataatcaaataaaatttctaattttgcaatttaaggatttgcatttgttggaggattttctcggccccgaattccattgcaatatcaccgggtttcagttggtccgtcaacagccgcaaataaaagtgaaaagtggactcatttaaaatgaatgtcatttctcccccgttaatttccctttagcgactaattcaattaaagtcactatttgaaaataatttattagaatttcctactttttcggagtgccattaatatttgttcaaatgtgaagtgacttggccggtcacggaatttctgttgcaattgcaaatttataaacaattccatttgtgttcatattttgattcttctaatttatccgaaatctttcgccctttggtcaatcggagacagaaaaaaaaagaattttagggagtttatctttcttaatcactcttttgttcagactgatttggccctggcaatggatgccacggcattggtcggtgccgctgtccacgcgttacgccagcgcaatttggagcccaaaccgcaccaattgttgtgcgatgcgggcgaccaatggacagacggaatgttaatgcaggagcaaattcggagagtaagccatggcatttattttgaattttaattaataaattgtttattatttatttcatgtaaaattccattttcatgtttaatttttcaggtcgatttgactgatgcggccaccggcggacattcggcgacgtcggcaattcgtttcaacgaaaccaccggcgaacgaatggacacttcccttttggcaatcacgcgaatgcccaacggcaccttcacagacgttagcttctgttgctaattaagtaattaggtacaacgtttaacagctcgggaaatgggaagaagtgacccgtcgatggacatttgacggaagacacgacgaacggaacaagtggcggttccgagttggacagaacggagcaccggaccttcggggggagagactgaaagtggtggtgtacctggtggggcttaatgcgtaatgcaattaagccaaaaaataaatatgatgtaaaataaaatttttgccattgttttaaggaagagccttttgtgatgcgcaaattggtccatc

SEQ ID NO: 8099 - DNA, 1449 bp, Heterodera glycines
aaatagggggacttaaaatttgccttttttatatttaccatatttcctataatatagctccccccctaaaataaagcccaccttttaggtggttgaaaagtaacctcccgtgactctattacaagaaataggtaaatttgctttaagcaacaacaatttgcttcctcttcctcaggagccgttgtccttttccgtttgggtcgctttggccgttgcttatgcgagtgtggccggcacaatgtggcttttggctaaatgttcgccctatgaatggtcaaccaattccacaaattaatcactttaattaattgttcgcaggtatgaggacgtgacgcgacgcgacacaattcgctgccgtcgcgacagaagtcgcggggacacacagccgcagaaggattggcggtgcacaatggccgaaaaggggcgggcaaaggcacgcgccgggccaatactccacaaaaaccaattcagcattgtaacgacaattaattgtgatgaaaattggcatttaaacaattaattaagttgaacagtctatggttcgccgttggctcacttatgcaacaaggaagtgacgtaataccaaggtgaaaaggcgaattagcaaagaaaaaggcatttatgactttttagagcggctgctacacgtaccgtagccgtcatatggtaacataccgtaaaaaacattaaaataaatcttcgtttttcaggtggttattcacgttaattctgatcagttcgtacaccgctcaattggccgcatttctcacagtcgaacggatgagcacagcggtggaaagcagcgccgatttggccgcgcaacaacgcataaaattcggtgatttccgttttcattaaaattttaaagcatattaaaaaggtgaagataaaagttggtggactaaataattgctaagaagtatcctcaaaaattctgtaattactttttttaatttttctctccacaggaactttgtccaatggcagcacaatggaatttttccgtgagtcgcgcattcccatttatgaaagaatgtggtcaattatgcagtccaccacgcccaccggtggttttttattttgaatttatttttattattttttaattttaattttcgtttactttttccattttcagtgtttgttaattcaagcagagaaggcattgcgcgagtgaaaggcggcaattatgcttatatgatggagagcacaatgttggaatattggtgagaaaaagggaaaaaacgaattgaaacaaaaattaattaattagttattcaccagtttaaaatcctattttttaaatttaggattggcgaagactgtcagctccaaaccattggcggactgctcgattcgaaggtgactacttactgtcttccacttacttactgtattcagttggactgtacattttcccaggttacggtatcgcattgcctaaggggt

SEQ ID NO: 8100 - DNA, 6817 bp, Heterodera glycines
  unsure (1)..(6817): unsure at all n locations
cctgcannggtctatttgaacacaaaaataaattttttatcatttttgaccccccctttgatttgtttactttatattaatcaaaatttttactttttgtcagttttttaaaaaatgtttttgaaaacttccctatttccccgttcctcgatggttttgtgcctccccggctgattttaatccatattgaattgattaaaaatatatttaaaaaatattatcattttgagggcgaacaatgccaaaatcaaacgatttatggagaaaaacaatttgcacaacataacggaattggaaaattattacatccaacggttgcaagtgattgtcaaggaactttttgaagaacgacaggaaatggcggaaggacagaaaaaagcgaaacaaaagaaaatgattttttggcaggaagtgttcgacaataacaaaccggtaaatgccgaagatcgacgggcggtccgtccatctgatgggaatgccccgcggagtttccgtccgtttcgtaaatttcgctatttaagcgccttttcgagaaatagtttttctcgaattttgctatataagtcaatggctcgatgttctatatattattcagaattaaaaaagagagaaatgaattttttgctttttttgttacagctttttgaaacctatcgaaattttttgaattttttgtttcgaccagcggcatttttataaagagaaaatgttaaatcttgagttaacagtggatttaaaaaagcagtgtcaaagaaaaataatctaattaaatatgattatcagttagccataatccctcttaaattaattatatatattattttattgaatttatatttttgttggcattcttaggacccttcaaacacagttgtgcacaattggtattcaagaacaacgcaggagagatttttggacacaaaacgtgcggttgagaagggtttccaagtgttggtctcctcgtgctggtcagtttttatttttccggagaaatgaattgtatatttgttatttaaataatttttatagtaaaataaataaatttaattggtaaaaaattatgctcctaaattaggtaccttaattacatcaattatggccccgattggcgtgatggcactggcacaacccgacaaatttactattgcgaccctcgcggtttcgagggcacttatgagcagaagcaattagtgattggcggcattgcaacgatgtggggcgaataccttgacgggaccaatttggagccaaatttatggtagataaatatttgtaatacttattttgaatgtccatactcatattgtaaattattttgattttttgattgtttttttgcctttcttttgtccgtgtgtccgttgtttttgttggctctttgtccgtgggccctttgtccgtgtgggtcctttgtcattgtacgcttattttgccgatggattggccggggctgattcggccaacccttccttggtcacaattaaattgtttaaatttaccaggccaagggcttctgcggtcgctgaacgcctttggagtccgcccgagttgacccgtttggccgacgcggcttggccacgtctgcaggaacaccggtgccgaatggtggccaggggctaccgcgcggagccggtcaatgggccggacttttgccagacggaattggacgagcaaatgcttaaataagcgaagaaaacggatgtaggaaggagaaggacgagtgcttatgtttgcaaataaaattgatcattttatttaatgcaaaagcttgtttaaattcattttattcggaaagatttcaaaaacgaatgaatatgaattgtggaagaaaccctgacataattgaaataaaacggaataaagcactacaattacagatgactaaaatctgaaaatttgtgggcatcctttgttcaaatttggaatacatcgcctaaaaaaggtaaggggaatcgcccacggcggtgccaacactgatgccgccttcgttgacctgcaaagaaaaacgcgaaaaccataaaaaatatttaaaattattttatatttttaaaaaagtggatttgtttacgcatttgtcgtttgcttacccctgccgactttgtacgcagcacatgcccacgctgcacattggacgacacgttacgggtgagcatgtctcccattagggtaccgtacacgcccaattcactgacaacgaggccaaactttggcgcatagaatggacgaagaaaatagttctaaattttaacaaaaaatatttaaaaaaataaccaatgtatctcaatgttgcgataccgtattacttttctaatgattcattctcttacagtatgcctccgtttggagtctcacctttgttgtcattgggtgtaacttttgcattaaaatgtgagcagaacgttcttctcgggtcatggtgagtagtttttcacgcaatttgttgtcgtaataattatttccgccacattcgccgtttggcttcagcacataatttgacggatgttcgatggcattctaaccaaataattcatcaattaatgttaattgccgttcatccctaccgcaatgagctgttcggtttgcttgtcatccttttcgaggccccataagccggtaaaagtttcacggattgccttcactttgtccgcttctgcggggtcagggaaaaatctctccaaaatgccaggcgaggcgagaagctgaacagttaataataattatgcaattaacaaagaatttcaattttattgctgccacctgttggattttcttcgagctgctaattccaattgccaatgatggcgccttctgcaaattaaacaatttttgtgttttaaaagaaaacgaatagccatggaagagatttgattatgtgctaaaaataggaaacgaaaaaggtcaaaaagaatattcaagccatttttgaaaagtgtttaaacataaagcttcaaaattattctgcttataaatccacaaagtaatgttttttaatatttattaaaaaaatttatgatatttttccgacaaaagaacaattttcgttaaaaattttgaatttttgtcaaaaaattatttaaattattattattttcatgctaattgcatttttatttaaatcatattacaaaaatctcattaatctctctcttgccgctttttaaataatttttttttttgactattttttgattgattaattttatatttttttattttacaattgctgtcgacagttccactattttccgcgtgtgcatttccttttcatttgcttgatagccaagtgcggaaagccctgaatacacaacgccaacgattttgccatttagcaaaagcgaattatcatcggccaatgaaaagctaaaaaaattattgttaaacaaaaaatttgtttataaaaaatcaatagcgctagaatttgtttttctctaatttagcatttaaattgaataaatatatttaattaatgttgatttttatattttttgcagattttaaaacctcaaaaatattcgtttattttttaaaatttattttacttctcatatccttccaacagcggaacatattcaacgcgcaatttcccaccagacaatcgctccaattcatcctcaatgttgcgcaattcgtatttgtatttgttccattttgccgacaaaattacgaacaaagcgtcggaattgccaaaggattcccttaaattctcaaaatgaaactgcgaaatttggaaatcacttaaaatattcaaagagcaataataatttttttagaaaaatgaaaataaactatcatttggctttggtttttcccaattattcaattaaaaaacccaaaaatgtgccctcaaaaatgatttttaaatcgtttttatccatcctttcttcatttttaccatgccatgaacagtgagttgatcagattcgtatcgccctcattttgtggtgcgtttgtcgggtccctgccaatgcgttttaaaagtcgctgatgcaattcggtggtccgtcgatcaattcgcaacccggtgatggcgccggtgttcgcttcgatctaaaaaatcatttgaaattttacttattcattattattttttacctgtttgatctcgtatcgatccattccatcctctttgctgctcttcaccgtgttcagcatataatcctaaaaacacacacataaatacaatgatcattaattcactaattagctaattcattaattagtttatttgcttgccgatctcattatcatcagtgtctttggctgttttatgccttgttttttcacttcccgcagaatgtccaccagctgtcttatgtgtttgtctgttttctctacgtctttgtaagcgtctaacaaaaagtctaaatcgcaagcgacacggaagtaaagcaattgcatggcctgccaaaataaatagcaaataataattaagaccttaattaattaaatggttttattataaaacgaatgttttgtctgtttatttttaacctcctgaacagcgatggctttctcaaatgcttctctcggaaatggggacggaagaagcgaaacgggtgagaattgggctatgaaattgctaaataaggcaaaaataaccatttaatttttataattatttatttattttactgtctgatgtcataacgaagaatcattccgttgttaaaagcccaatcaattgcataattggccaacttttgaacttcgtatctgctactaaatgcttcttccacataatttagtaccgcgttgcctaaatattattattttaatatttacaaattaaaatatgaaaaataaaataatttaataaaaataattgtgatcaataattatttatttaatttaaatgcatatttaatggattttacccactttttgcgaatgtaaaaataatagtaatgaatagaaaaaaattcattttttcaaacactaaaaattaaaaaaatatataaatcaaaatatttaatgaatttatttgagaaaatttgtcaaatttatatgcaaaattcatacagaaatttgtttaaattacatcagactaattcaacttccgttctttattataatatgaaaaacataaaaacaaaataaattcacgtgaatttttttatcaatttcatttcatttccgtaaggaaatgaatagaaaattgagtaagtttaaattcatgttggcatttttcagtcatattttgccattttctgtttttgccggaattaaccaaagtgttgtcctctgtgagctgagattatggttggaaaatgctggcagaaattgccagcgttgaattgccgggtcagttttttggtaccaaaatccgaatttcaggtgccaaaaatgccaaactcggttctggcttcaagaatttggccaaaactttttattttatggaatccataatttttgtgacttgtagaaaacaagtcttttatgtcaacggattaccccagacagttgttggatcagaaattttcattaaaaacccgaaaatgataacataaatttttcaaaatgtcctgtaaacataaaattataataagaattgccaactgttcgcgaaatacaaaagccaaaaggcaccgcaagctggaaatcggacgagcagaacacctccagtaaagcattaagtcgccaacggtatatcatcaagtaaaaaattggtgcgatctttgacgaggtcaaatttggatcggacgaaggattgacaaattctttgcagttgttcggacttgtgatacatacaaggctttgtaggggcttaatgatgttcgtggaaacgaagaaagtggcgaagaaactgaggccaatgaaaaatgattttaaacattttatgtcgagttggcggaatgtcatttggcaaaatgtccgatttatgggtagttggcgaaacgtccgaatttggcttagttggcgaaatgtccagttggcgaaatgtcatagtgccgatccttctgtacagatacgaacataaaaagtgaaattcaaaaatttggactttcggtttttgttcgaattcgattcaggggtagaaattgttcaagatgaacgtcagattagtgatcactgatcagtgacccacccaaaggtgtttatctgagctcccaaactcaaaaacacccaaaaccacttttataggttttcatatgcgctgaaaacgatagtaaggaattggtcgaaatggatgtcatatttgtaatcagcggcccgataacccccgaatggaacgaagaactgtaaaaaaacagcttattattctctttttttatgggaccagtaaaagtcagtattacccaaaaagagtcggttcttatatggttagtacgccacaaatttaaattttttttaatcatcttaggttaccaaagggtgccaggtggtttcgacagtaggtgatttagacagtgaactatttcgcctatcttttgcttgtgtgaattcgacagtaggtgattacgacagtagttgatttcgacagtacccactaatttttaaaaatagtgataagttgcaatgaaaaaccgtaattcgacagtagtgagttcgattatttaatatttttcaaattattactaattaaatattctaatttttccttccgcattgatacaaaaatgaattaaagggtaaaagggcctaattatattgaataacctttgtgaattatttgtttttaccccttgagaacgttttttgtttgtcttccttatcaatgaacgaatgcagcaaagatggcattctcggaggaaattcgccaaacccggtgtaccgacatttcgccaacttgacatctcgccaactgacatctcgccaa

SEQ ID NO: 8101 - DNA, 1393 bp, Heterodera glycines
tgtgttaattattattgttcatcatgcttacatattttaatcttttttattccattattaaatgatattttgatttttatttcctatatatacattttacttttttaaatcaattatacctttttattgttatctgtgaaattttataaaagttaagttcgctaaaaaaaatttccatttatgctttaaattattacattgccaacatgtttaatatataatttatgaaagtaatttagttttcttgtagaagtttgttttatgacagtctgtccatgcagtttatattagattaaattaacattgattaaattcagctttttaatatttaaaaattcttcaattttataaaaatgaaatgatttattttgagttttaattttgttttttactatattatcgtgtttactacatttccttgctgattacatttttcgtttcaatgcctttttgtttaataataaaaattcatttcgtttcataattttctaaataaattttcttaattctccaaaattattttgctctcattttagtatttttaaatttctaggacaaatatttaataataaaaaataacccaaatatttaaataatctctagttaatgttgcgaatatcaaatataaatcatgcccagagcaatgaagggatttagctctagttcgctaacattccacaagtattattaaaattaaataaccatcaatttttaaataaagtattcatacatttttacctaatgtaatcattgaaattaaaacaatttaattgttataaaaaatcaatattcaaatatacataaaattcattttaaaataatatacaaaaatgcaaaaatattgataatattttttgaagaattttagcttcattgtatgtctcggtttcttatataattcaatggtattaaactaatcgaggtcgagcccgaataaataaaaatatacaattttaaattaaatatcaaaatagtgatgttacacttgaaacattgaaaaaatataatatttttcaatatcaatattaaataattttaatctatcaattatggatgtcgaattttatttctttgttttggcattcagttatttactaacttattcagaaattataatgtttaataaataaattcaattttataaatttgtacctttaatttaattttaacaattaacaacatgaatttaaatatactagtttattaaatttaaatattatttctgatatgtttattttataatatttcaaaataattattattatattttattcaatttacctttttttacaaatagaatagaaaatcagctaaattcttgcagtttgcatccacattccttgaaatattttatcattgtctaaaattatttaataaattaaattgatttatt

SEQ ID NO: 8102 - DNA, 3605 bp, Heterodera glycines
  unsure (1)..(3605): unsure at all n locations
cgcacaatttggggcgtatgaaagagancggacctgggaaaatttaaagaatttgaattaaagatttgcgcggaaaaaaatttgttttttttgtaacggatctcgtgaaaatttgttagtttttgttgatttttggaaaaaattaacgatttttttctattcgggaattgggaaaaaaattattttctcatcttttcaaacccaaactcaataatgaaaattgccgaatttgccgtcagaaatttgttaagtgattttaaaaagcaatgatttttgcaatcgttgatttttcattgtttgtccatatttatttatttagtaaattgaaaatgatgtttaggttgctcaatatttatatctagggctataaattatatgcttttgcatattttctgcgcatatgctatgaagaaaggggcccaaaaatagcatttctgcgttaaattttttgatttggtcaaggtttttagtgcatataaatgcatattttgggggttttcgagaataaatgcatatttggccatttttgcattttagagcatatttcggtcatttttggcaaattttcataagaaaaatgcaataaaaagcgaaaacaaacccctaaggatcgacttttttggaaattaaaaaaatacacccttgaaaatcgaaaaattttaactttttataaaacattttcaaaaaaatttttgatgcaaaagatacaaaaaagtaatttaatttgagcataaaataaaattttaaaaaaaaaattcaaaattgcacatataaattttgaaattcaaaattttttgcacttgtctaaaaaagctccttagccattgttttggaacttttaaagtcaattctaaatgtttacacaatttttggcattttttttgagggctaaagccatttttggcagtttttaagacatgttttagtgcatgtttgggcatttttcgggtttttaaggcatatttaagggatttttagtgcatattttatgcgcatatttggcattttttagtgcatataatttatagccctatttataacacaaaaaaacgaacccggtgatgagcacagagtcgtcgaagacgaagaatttcatgtgctgtaaccccacaatttcgttggtcagttcgggcagcgcacttttgaggaggccgcgcaatttgggcgtatgaaagagacggacctgggaaattaaaaaattttaaagaatttgaactacctaatttaatggcgttattgaaatggaaaatttaagaaattgcgaaatttttcaactttttttggagcaatttcattgcccaaaaactcaacattacccatataaaatgcatttgaaatgtcagaaaaaatgttaaaaccggagggtaatatgtaataccagtgtcccgagctttgcgcctttgtccaaaatctggttcaaaactaaattttttcaatcaatgatcgcataaatagctttaaataagcgattaaaagtgattgtacccgatcatttgatcttcaaaaaaattttgaaaaaataataaaattttcaaacaaaaaattattgatcataatgaaccataaaaccgtgttttcttaattttaatgcttattaggctatcaggggttgaaaaaattcaactttgagtccgattttggacataggcgcaaatgtcggggccgcaaaagtcggaccgcaaatgtctgggccgcaaatgtcggggctccatgcgaattggctacacaaaattgttcttaaaaatacaaacaaaccaattgaaaataaaaatataattttgttgactaattaaattttctgcaattaggaaggaaaataaaataaaaatgataattcattgaattcaagtttaatgatgtaattgtccttttcattaaatattccttgcggaaaaatactgctaaaaaaacaaaatcggctcaaatgctttacaaattataacagattataaacattaaaattcgaaaaatatctgccaagttaacttttggttttgttcaaaaaaatatttcaaacaatgatcatatgacttcagctcctaagagtttatttgccgcttttcagtacaggaaaactcagttgtttttacttaacttttaaattttttatattaaggtttatttaattgtttaataaaaaaatcatatttttggtttttaattatttgtcacatgcttcagttattttgaaaatttcttgaaatttgaatttattatgttttttggctaataattatgtacaggtctcattaaatataaattctaaacatgaacagaatatatcaaaaaaaaaaatttttttttattattatcatctaattatattcaattatattgtaaatttaatgtattactttcctaaattttagattaagcattaatttgttttgtttaaataaaatagttgtttttcatagtggcttacttattctcttgctacattattgtaaataaaacttgacgttgtcatgagattaaaaaggttttttattttattttttaatagatttttttaaaaatatttttttacccttaattatttttttatttgtctctttttttatttgttttaaataattttttacttttctttttttatttttcaatttaattttttataatttattcttttgtaaaaaataaacatgtcaagcacgttgtattacgactttacaatcaattttttaaataaaaccgatttacttttagcatttctcagtattgaaaagccaaagtttatcatgctcactgattcatagttaaatactcaaaatctaacaattcaacaaaatgttatcagaaaattaacaaatttattccgctatattagaagaatttattcataagaaaataattaacttgttaattttacatctattattctgaagttatataataatttttatgacgttatttattcaaatattagatattacataaatttattaatctattgtacacataaacaaatgtaaacatttttttgaataataattttaatacacattaaaagactattcttgcgcaattattcgatgagcaattatcattattttatagattatgttgtttcatagtaatgtctattgtttactgccgattttttaagtctgttgttaatattgatgattattttaacaaacatatcaggacacaaaaattcattacataatttaaaaataatttttaaaatgaaaaagcttaaaattaaatattaaaaatgaataagaacgaaatgagtttgatttaatctccaacctaaagtggactatttaatttaacaattggtgaaattttattctttaaataaacacataataagtatatttttatttattgtaataaatgaataataataacctacagaaaaataatctattattgttttgtatttttgaatttaaatataaaaattaaaataggaaagttaaacaaaaataattaataaaggaaagtaaatattcaaaaaattttcaatttatatgcaccgataggttgcaatactaaattaataggtttcgcattgggaattatgagatggaaaaaataacggtaaaatatttaattagcgtttcaaataaattgtctttcaagtatgaatttga

SEQ ID NO: 8103 - DNA, 812 bp, Heterodera glycines
ttaaatacggtaatggttagagcccggacataaactgcattttctttcgtcctaaggttcttgtttttgcccgcgcttacatttatttcttagccattattttagaggaattcgttcgtttaattaaaattttaaacccctttgatgaaacttcgtccttttcattgtgtttgcttgatcaataaaatgaaatttgctatataaatgcacatttaatttgcttttatctcgcgtttatttttcgctcaattcctttattggatttgtatatttacgtctttcaaattcaatatttttaaggctaattggccatttgttgtattttggacagttttttgatttttacttcagaaaagtgctgaatcatatcacttgaagctcataccgaatttttgctcacaaatgcaggcgatcaaatgcgttgtcgttggcgatggcgcagtgggaaaaacttgtcttctcatcaggtaactaactaattgattatgtttcaaaagggaatgtcatgcaatttcttcctccagttacacaaccaatgcctttccgggtgaatacattccgacagtgttcgacaattattctgcaaatgtaagtgtcagtcaatatgcgtattttgtttacgattaagcgccttcaaattctgcgtctgttttttgtagtagattaaaggtaattctgtgttttattggtcccatattttgtgcaatacggagtagtacccgtgggttttcgggggcgctgatcacgaatattacatcaatttcgacctattccgaaccccggacccgaattcgaactaaagtcgaaattaa

SEQ ID NO: 8104 - DNA, 2772 bp, Heterodera glycines
cgattttattattgtttttaggttatggtcgatggcaggcccataaatcttgggttggttgtactcaatacgatgtgataaactggttttttgtttagactttgggacactgctggacaggaggactacgaccggcttaggccgctcagttacccccagacggactgtttccttctgtgcttcaggtcggtttctccgatgtccattccttgacatttgttgcccatttgataaaataattactaatgtaagtaatatttatcatttcagcatcgttaacccggcctcttttgaaaatatccgtgccaaatggtacccagaagttagccatcactgcccccagacgcccatcattctcgttggttcgtatcactgagtcactcatttttttttattagaattaagcatttctaaaacttttatcggtacaccccaaaacacagccgcagaaacacagccgggaataaattcttaaaaaatttgtaaacaaatttttcaagaaaaaaatatttaaaaaattttcttagaaaaattcgaaggagaaaaaaattatataaaaaattttccagcgatttttttgaattttttttgaaaaccagtaattcaccattaaattttgaaaaaaaaattttcttagaattttctaacaataagacttttttgaaaaatttctaagtttgaaaattttttaatttatttccggctgtgttttgtcctgttccggacttttatacccctaatattttgtcattgccaaggtacgaagctcgacttgcgggaagactcaaaaacgttggacaaattgagagagcgccgtttggcgcccatttctgtggcgcagggccatcaaatggcaagggaaatcaaagcgaccaaatatttggagtgttccgcactcacacagatcggccttaagcagggtaataggtttcatacttcgaaaacccttttgtctttctaattcccttccccccccccccttaagttttcgacgaagcaatccgtgccgttttgtgcccagtccaagtcaagccaaagaagtcttgcgccattctctgaacagttcgcgtccaacctaaagcgaggaacgagagtctccagtcaacaccaactaaacgacgtcatcaacgcatttaatctttaattattttctaattgcacccatcgcttaattaacacatccaatcccttaatgttgcccccttctgatcgttcactgttttggtgctttccatcgatcccttctgtggtttttgtcatcgattgattgttttttttgtgcttaattttcattttgccactaaatccgtctacttcatcctctcccatttccaaatttgcatttcctttttcgctcacttgctctttttgttttctttgcgttgtaacccaccagttatgttcttataaaattttcatctcaattaattaagcgtcctttcaaaaacacaaattgttttttattcgtctttttcgatcagagtctgaataatggtgcctttttggacatggactgtatatgaagagcatttagcctttggccagaatcagtaaataatgacttggctttcttcccattatttctccgatatggcaaattccccctcttcctttcccctctaataaattgagaaaatttaaagagtgaaaaggacggatgatggaatgggagggagggaggaacactgggccagactggcagaacagaatttggacaaaagaaagcatttggcacacaaaacaaactttcctattctcatttgcatatttcgaatgggtaagtgaatgatgaatattaaattgtgtgacgacttaaaaccaattccattgccccgggggccctcgaaaatgtttttttcttgcggccattcctttggttcgttcgttcaataatgtcattaagccccacattctgtgaacgttgtaatgttttgattcgaagatttttattggcacgcgatttttccggcaattaaagtgaaattcggcggagagtttgaaggattggcgaattgtcgattctgtgaaatttcgctcaatcaaaaacgcagttttgtttgtttgtgaattttcctctgctgtcatcgcaacactttgtccaatttttgtttgttgcttgaggcagaaatcaaatttgtttaaacccctggggcatcctccgccaacaaagggtgtcgcaaattgagtacgttcgttttgcatcgtcttaccggcaattggcactttgccatgcttttcctccgctgcctttgtcgtcgctccgttccatttctgtcctccgctttcggcacgtgctcattttggtcaaatgtttcaaagaatgccttcgcacttcccccccccccccataacaattgctgtggtcatttggtgtgataatgtgccgcgattgcttcacttaaagtgtcggatttccctcctccgcttaaagagttcttctcaccccccgcccggaaaagggggcaatcccagcggaaaagggaaaaagcgcgggaaggaggcgaaatttaagtgccaaaaagagcggcggcacccatcaaaataattatgcgacaataatcgccgaaagtgccaatgtcgtggttgtgttggtgtccaactgctcttatgttttccgtcattgaattcccattccttccccccccccccccccttcaatatttgctcattttcttagaccatcaaatttggttggtttgatgcctttcctcattttggcctcatttggtgaaacggccgaccaacggaagaaaaaattgttgtccccgaaag

SEQ ID NO: 8105 - DNA, 1760 bp, Heterodera glycines
gggcgagatcagcaaataaagcaatactatccaataagtgatggaaatcagctgacgcgcgaggagtcaacggcgtcaagtgattttgcggactctttaaatgactctcaagtttttttgcaagaggggaaaatttccagaaattattcaaccgtctatcgacagtttggtggactcattaaatgaaagggggaagaaattggtccagaatatgataactcgttttcgttctctgatggaaccgcgttttgcttataacgaatctacgttttcaaaaacaaattggaatcttctcgaagcagacttaatcgatatggcaaacgggaaaagtacaagacggattttttcaaaaatatataaacttacatattgcagttatcaaaggaatcaacgcgtacaataaatagcagtaattaggggcggggcaaagattaggcagggggggggggaatttgtggtcaaaacacggcgaatggacgtgtaaagcaatgctatgatgtcgttgtcttgtcaatggacgaaggatctgctgaaggatggcactttgctgctggacgatgagtgttccttccgacactcgtcctgcccaaacttctttaattactcatcggttcgtcaacggcggttggactgaaaaacctaaaatgaaattgcttttttttatgaaaagctaaattatttcctccaaataaagttgctcaattagtgaatgtgaacggaccatgggaagtttatttttggcgcaaaaaaatgtggcgccataaataaattaaaacgggcgtaattaaaaaggacgagagaatcaaaggaacgccgaaagaaatagaaaaatgttcgttgtaaaaccaaaaatgcaggtgaaatcgaatgaccaaaaaaattcgttggatgggcgaaaaagtccccaaatgggctaaccattttaactagaaattttcgaccaaaaaaggaaggaaaataagcaaaaaattgcccaaaaggatggacaagtgtgtccttcttcctcacttctgctgttggtggtggacaacacttccgttggttttggcactttcgtcgttaattgagcagttggccgtgccattcgcgtggacgacactttcagccgctgcctttccgcctttcgccttcgatttgtttgcgtagcgatttccccgtcgaaggtacgtttggtagaagaagttgcagaacagcaaaaagtacgacccgtagagaataaaagaagcgtacaaattggtccaagtgcactgacagctttccatgccgcccaatttgagactgaaaaggcaaaaggtgaaaagtaaaaaaaagacggaatgccaatcaaaacaaagcgaagaaaacgcactaaagggtgatgaaggcgagggagacgccgaccaccatttgggcaatttgcatgacggtgatcatcatagcgaaccatttgggcagtcgcaatttcatggcacgcaaagcgtagtaggaatacctgaacggatggtaatggtgaaatagccaaattcttttaggggataatcttatttatttatttattatgtgtcccttccattccatcttccccaactcacataaatgcgtgaacggtgtaattcatcgtaactaaaggacaaattgatgtcattaagtgcaaattatgttgccaatgactcactgaaccaacgtccgctcgccgtgtggtctttgtaaagcatccaagtgtaaatcagcacctaaagggggggggggggagggagttaaactgataacgaaacaacgac

SEQ ID NO: 8106 - DNA, 1184 bp, Heterodera glycines
  unsure (1)..(1184): unsure at all n locations
aaattgagtagatgaaagagttggagttgagtgacntaagagggggtcaaactgactcgtttgcccttcactttgttgatgtaaccaaccaaaacagttcgggaatcattcgaacagcgcccattatggaaaaggtggccaagcccaaattccaccagaacagcgcctggtcaagtgcaaaaggcttttgtgagctcatcaactgaaaaggggacatttaattagtcttttccattcgagaagtaatttcgaaaggcaaaaaataatatttaaattaaaatttggccgaccttttggccaccaaaaatagcgacgacataaagcgcggaaaaggcaaaagagctcagccaattctcctgcatccaaagagtcgaatcggtcagattgaacgcccgctcggcggggaggacgagcgtatgattctcgaagccgtaacggggccaatactcgaactttgccatttttagtgctccagggatgaattagtgggcaattaataaaattggggaataaatggaaggtgaaagttaacagaaatggaagtggggaggaataaataggcaatggacctcgctgaagaaggtcactcattacacaacaaatcgcatttgagaaatttttgttgtaagaatttgtcgaacgattgtctaattttggctttggaatgtaaaattcgttcgcgtcacagagcaaaggcaaaaatgctcaaaaaatgatgaacgatcattgtaaatcttaagaatggaaaaaatacaatgcgaaaggttgccgatggaaaggggcgaagggaaagggaagggaccggtcgaaggaggcgaacggcggcgcggtttatcacaaaacaaattatgcagcagagaaaacgaatgcgaacggcggatgaatgaatggcgtgagttttttgggcggcgatggccgactttttttggcgaaggaatccgccgaattcaaaatgtttcaaatgaaaacaaattaaaattaagagacaaacgaaatttgaaccaaaaaccaaaggaattgattaaataaagtgttatcaaaatgtttgtgttagaatgtgaacaatttcagagaacggacgaagggaatgtgaaacgaagcgaaacgatcacctgaaagggcggagggatgagagaacacaccagaaggcaatcccccccccacctttttcccttttatcttcg

SEQ ID NO: 8107 - DNA, 2159 bp, Heterodera glycines
tatggccacatcaattaaattgtacgagttgcctttgtacgagttgccatgacacccattgaggcgaccgaccttcttgaaattgttgacccattcttttgcttcattgacaggcacatgatgcaacttgcaacacaatcgcttcggttgcccatcttttctcggggtgtgcaaccatttggacaacgcttggccagcagttgcatttggcccatcatcagcgatcacatcggggaacagatcagcagagcacattgaattcaggttgatcagatcgaagagaattgtcggtgaaatgagacgacgcaaatgatccaaatgaccaccatccggaatgtccaaatggcgaatgtttgtcacaaaaataggcaaaatttctcgtgacataatgtcccacttccgttgcatgatttcaatttcggttgaaggccgccggggggattcgtaactcaaattcagaacaaattcagtaaaaaaagaaaaaattagaaaaatgatattttaaattaccatatttttttcattttccatattttggtgttgttaaaaaatttcaaaaaattattaattttcactttccaaattttttttttgaaaaatcctagcttgcgccagtaaaattttcagcttttttccttttaaaaagaaccggcaccgcggcaccgcccggaaaaaagtgctgagtgcgaatcttagctcggttttattatgattagggatgccaaaaatatgcacataaaatcgtaaaatatgcgctaaaatatgcaccaaaaatcgtgaaatatgcatataagtgaaaaatatgcacataaaattttccaattgagggtgtaatttctcaaaatttcttcaaatttgttaaacataaagtaaaatcttcaaaaatggctaaatgtggtattaaaaatcattttaggagaaaaaaacatgataaagcaaaaatttactcatcttttgcgaaaaatcaacctgaaaagcaaaattttgcttatttttgacctaaattaaccattttttgagaaaatttatttattcaatatttttcgtgaaaattttgctaaaaaattatttttttggaaaattttccggtttttgaggtcaaaaaggccaatttgtctgtcgggggccgatctattagaggttttttggaaaaacgccaaaatatgcacataaaatatgcacataaatcgcgaaatatgcacaaatatgcaaaatatgcacatggaaagtcatcctagaagcttcaaatcaagctaaaaacatgtttttcgtgcgtttcaggcatcccgcagtccaggaaaaaatatgcatgtgcatatttttggcatccctaattatgatgatgccatattatctccatgctttatcgagcagaggtcgtatggaacataaattttctaaaatacttacaccacaggtcaaaattaagcttttgggctaaaaataaggattttatgtacatattctatttaatttttctgagttaggcagcatcattatagaaaaaccaagctcggatttgtgcacgtagcactttttatctataaaaagctataattcgaaatctcctatttcttaggattgccctaaattgcaagaaactcgaacaaaaaaagtcttaaattaaaacatatacaaactcaaatgaaggcacatgcaaatagaatttggtgcctctgtcaaaaacatgcttattggaacggagaaatgcaatgacggagtagtcaatgtacctgaaaaagaatgcatttactttaagatcgaaggtaccaaatgattaggatttagccgtaattttgaggttatttatgagtggaaattaaattccattttttgctaatgaggcttaagggttttcgaaattttatttggcttttttgcagtaaaaaaaatttaactgaggcggagaaacaatggtcaaattactcaatcagaaggtggtcaaagcgggtttttctggggcagcggtcgctccggcataggaaagtcctcaaatttgctttgaaaagcagtcaaaacaaagcgttgctcggatttggatttgactccaaatttgtcattcgctttttccatcaaaatgtgcatccactaaaacatcaaaacgtggcgaaagcaatgccaatttgaggccgagttgaggacggtcaaaaaacgggaaa

SEQ ID NO: 8108 - DNA, 2253 bp, Heterodera glycines
attgatatattttttgttgcattttatgcgttttagggctttggacggttcagtcccacagccatttggccacttcagtcccgggcccataactcggcccaaagtggtatcattcgtcgaatttggtttggtacacatattcttcaatttttcctaatagaattgaatctttttttttaattcgaaaaatttttctcacattttcctcaaagttcgattcttcattttcttgaattagaatacttcgtcacttcgttaattacttactaattagtccatttaataaagaagcatgttttttcgaaaattaaaaaaattaatattaaactcgcttaaaattttttaatgaattacaggctaaaaatattataccagtcataaacgcagaaattaatgtccaatggaactaaaaaaatgaaattcttggcgaattccgattgaaaccccgacaaattcaaagaaagatcagaaaattcaggaacatgaaaatgaaaacaggaccagggatgccatggaatttggttgactttttgaattcactttttttaaattattttttggcgccgtgaaaacattttgccaagtttggtagtggagagagatttggatgaattctggcgatgaaaaaaaaattgaataaaaatgtatcgataattgaaaggctttcaaatggttggagagagaacccaatgagcaatcggttttagaacccctaaaacttgaaaaatttcgaaattgggccctcttaacctttttaaacatattttttacgtttttaattgatttaaaattaaaatggtgcaaaaaatggaaaaattgcatttgcccgacgtttgccctaatttattttgaatgtgcccctattccgggcactcgaaatcgcatctgtatcatgtccagtagagcattttttgtatcagtcacagattaaacataagccatgaaatcatcgaacacatgagaaagatcatttttaaattttcaatttggatcttctaacttttcacgtttaactaacataaagctcatgaaaccttctgtcagattaagaagttgatcagaagcgactaaattgctttttggatcgacttaatcttgaagaatgaagaaaattggacgctcctaatctttttgagtggtcaaacctagacaaattaaccataattcgaaagttcaagaagatttgggtcaaaaattgttggggaatccgaacggaatttgagtcttctgggacctcatactaattccaaccagcattttaatcagctattattatattagcagaactccagaacttttctcatttctccggcggccattgcttaattttttctgccacaattagtgaaaatggaacagaaatcgttgggtccaattgtgataccatttggagaacagcagaaggagaaaaatgaacaatcgaacattgaggaaaatgtgagccaaatttggcaattccatggcattaagcaatcgaatgtcttggttctacatttcagttggatttgtactgatgttttgatggacattttccctctttttgaccatgcccaactcggcctcaaattggcactgatttcgccccgtttcgaggttttatcgaaaatttgagtgaaaaggggggctcctgaccttttaaaacgccaaactcggacaaaatcgacacttcagtaccaaaaaatgacgtaagaaaaaaaattaaaagcaaaaaaaaacgcaaaaaagagatgcagagacgtaacaaataggcctaagcttaagcataagccgaagcctaagctgaagactaagccctgacctaagctgaagcctaagcctgggtgagcagcgaggcagctttttgtttgacttattaaattattcatcgaatattcaaattttaggccatttgtctccgcccacaggtcaaaacaacgaaaaagacatcaattcatgaacctatggccattgggaagtgcatttattatttaagaaatggctcgcgccaggatcagtcagctggggacaaatcagctgacagacaacttagctgatgggaccactcggctgaaggacaattcagattcccgaagtgtcatgagaactcatacaatgactagcctaggcctaagctttgggctaggcctaggcttgcttgggcctaggcttttattttgtaaaaattttttgtacggctgagttgtctattaaccaaaattgccccatcagctgagttgtcctcagctgactagcccagaagccaaatggccgact

SEQ ID NO: 8109 - DNA, 1105 bp, Heterodera glycines
  unsure (1)..(1105): unsure at all n locations
tttttttccaaatataatcattttaaaaattttatttacatattttggtttttgtacatattttgggattttttaaatatatttatgtaaatattttgactattttttgtacatatttttgacatccctattacaattttgcagattttcttatataaaattcccagccctaataattatttcttgaatacatttatttgggtatttaacaatggtgtttagcaaatgataatataatctccacaattacccttattaatattacatatggattaattattttttgcctatttatatgtaataaaattttgtttgattaccaattcaaaaaatattacgtacaatccgaaagaagcggagaaagaaatggaaaaagcaatgtaataatttcaaatttgaatttccatgctaattattttgcttttacgttttctaccccgaaaaatttgttttttttaaaagatatcaaaaaattttttttaaatattaaaatgtaattctaagcctatttaggtcattttatgccatttcgtgcctatttcaccctttaaagagaattgttttcaaaaaataaccattttaaaaattttatttattgtttatacatacctatttcgggattttatctacaaatcaataattatagtcgcaaaacaattggaaaatgcaaaccgtataccaagcataaaaaaagaaattagtaaaaagtgattgctcctccggcactgttcatttttacctaatttccattcgccatttcttttcgtctctttcttcgactttttctccctgacaataccttcaaaaatgattctgtacctgtgcgtttcaattttatccttatttttctcatttttagtctattcgattgatatcaaacgaagtcttaaagtctatagaattttttatagacctaaattcagggctaaaaacaacagacaaaggtaatagtgtacatagtactagagctgcacgggtccgggtacccgaccgggtcttttaagatttntgtgaanactgntagtttatcattacantaaggaatctcaaaaattttatataaaattactttgatctttaattataatttntaaaaaaagttaaa

SEQ ID NO: 8110 - DNA, 1919 bp, Heterodera glycines
aaaataatatggttaagtgatataaaattggttttgattatggccgattctgtgcggattgttggagaaaaaagcaaagtttggacgattattggtagcgatggagatgattacatcaacataacaatgtggaacaaaaacattgaaaggctgtcccgagaaatcgggaattcttttcaggcaatttttcttatataaccaaaaaataaattgtttttaggaaaaaacttacattctcaaaacttgggctgtttttaaagttgccgaaccatttaattatggtagcgttgagttggaattgcgtgcccaagaaggctcaactgtaacaattgttaccaaaactgattatgttataaacggcatcaccaaagaaatgtactttgattttttgggatcaaaactggcactcaacgaaacaaatttcatgccaacaaaaattgaaaatttacggaaaggggagaaattcatgtaaaataaacacaaaaaacacaataaaattaataaaattttagcgaagtcgaagcaaaacttatgagagttcagcctgttcgagaagtcatggttaaaggatcggaagcaaatgtgatcgatgtgtggattattgaaggaaagaataaagcacgtgtgtcggcttggaatattctggcattaaaattaattattaagctgttttaagggttgcttgatcaaattacaaaatgtcattttcaaagaggattcatacaaaggcgaatataatttcgtgtttaccaagtcgtcaaaaatttctattttggaaaaaacagaagaaaccgaaattgctaagactctaatgcacctttcaaaaaagcgtggtttagtttcatgtattttctgttataatatttaaaatattaaataaattaaaataaataatttaaataatataaattattaacttttatttttaaagtaatatattttaaaattcaattattaaaaaaggcgatgtccgagtgcaaattgcgagaaagcaaacggttctgaatcttgcaaatagacaagatgggacgttgtgtgtcgacaaagagcacaaggcgcaactgatttttccaaattcaattcagtttgatcaaaaggaagaaataacgctgcaaagcgtgaacattgattgtaacgacggtaacattaataaaaattttaattaatttattcttaaacaaaatattaagatattttaataatttcattaattttaagctggcgtgttgactctcactatctatgacaatggcgcatataaaacacatactgaaaaaccattcaaactcatttgaatgaagtggattatccaccaaccgaataattttttaagtatgataaacacaatgaatttttactatgttttaataaagatcaaagatcaaattgatcatttttgtttaataaacaagtttattaaaaatttagatatttgatttgtaaagaaattaataaaaaaaattaatacatttatataaaaaaaaattaaaatttaataaactaaagaatatcgcttttttatggtaaaacattcggaattgagaacttttcttgaaaatataaattgaaatattcaattataaaaaaaaatattgattttgatttttcgagactttaaaaacaaaaaattaattatttataaattgtgttaaaactataataagaatatgatgtaagaattttcaattcaaaatgaattaagaaattgttgcagtcttttatcattccatattgattgattggctttttggggtgtgttttttaacaaaaagcaaattattaactgtattattcagttattcctaaaatacgaaaaatttttataaatttttattaaaagaatttaggttatgttagccttttaataagcattagtttgtttgttagttggttggttacattataaaagaagagtgttt

SEQ ID NO: 8111 - DNA, 1939 bp, Heterodera glycines
  unsure (1)..(1939): unsure at all n locations
ttattaataaataatattattccaaaaattgttttaataaaataaattttcatatcaaattgtagaaaaaatgcaattttttaattttcaaaaatatgcaataccaaacaaaaaaccaaaatcaaacttttgatttttatacgattacagataaagtagacaatattaaagaattaatatcagacaatttaaataaagttattaaattaaaaaattaaatattataaattactttctttgtttagcaaagataggttcttaaagaatcaaaaaataatttaagttcaaaagataaaaagtaaaaatattaaatttaaatataacttaatacaaacaaaaattatttaagataacattatcaaaaaaagcataaaacacggtcacgtcaaaatcacttaccgatgccatacgactggtcattaaaaaaaaaattggcaaaatacagaatttaatattttgaaaaacagaataatctaatcgaaaaaagaataaaaaatagagaaaattgaactaaaattaacaaaatcatgaatttttgattaaaacacgaaaataaaaattgcaaaaattaaaatttattactgaaaaattctaaatttctgaatcagtaacaaaatttaatcactcaaaaaaattttcggaatcattttgtttgctatgccttcttatagaaaactaatgaaaaaagataaaataatttttagaatgctaataaattttcaatataaaacaatatagataaacaaaaatacttattggaaattttcaaacaaaaacatttcattatatttgaattaactcatcatcattattaatctcatcaccattattattattattattattattaattaaaaatctaaatatactatgtgactgcgtcattctttaaaaaagagattcaaattaacgcataaaaacattatgccaaagaatagtgagctgccttaattagagagtggccaatgttttcgtaacattttgttgttgtttattgattctctcttttgcatttttttgttgtttattgattctttcttttgaaacgtatgttcaaatatttatcactttgtatggccattgttttatttatttatttatctaaatagttcttttataattcgacggaattctttcatttctaaattgctaaaaaatttatattccagttttttactagattataaatttgtatgttgttttttaatttagtattcaaacctaaggtttttttaattcttactcttttttcattgttttaacatttcattttaaattttttgttgtaacataattagtttttttttgcgttcagataaaatggttcgacataaacagaatttttctgttggtaatgattttccaacttcttcaaaaaatgatcagcaaatgaatgaagggttcatagctcccgtaaaaaaagcggtcaattgaatgaaagggttgaaagctccctaaaaaagcagattgacaaaaatttcaatgattatgaaagtataaaaagacagaaaaaatcgcttaaacgaaagattgatgaaaatgatgagactatcgatttagacaaagttccaatgagtttttttgacgctggtggtaatgaaagcatccaacaaaacgaatatgtaatagaaactgagcaattttcgagccaattttcacacatgggaatgatatccaataaaaaagacactggaaaaaatagtcgaaatcaaatgacagaggaacaacgacaaattatcagggcaaaaaacgcaatcgccgcaaaaacgtatagaaaaaaagtaaaaaacgtagattttttgcttttgcaagcgtctgaacaaaacacttataatgttgaattgtatgaacttagtngatttaaagtaaagtgtaagcattgtccggttatacatttttcagaagaagaaagtaagacaagcggtgccatgaatttttt

SEQ ID NO: 8112 - DNA, 2102 bp, Heterodera glycines
  unsure (1)..(2102): unsure at all n locations
tttcatctaatttttaacaagtatttgtcaaattttcntgaaaatataatgatttaaatctttttgcgcctgcaataacaaatcatgctttgatctggttaaggaaactgatacattcttgtcgaatgaaaactttcgtaattctaaaaaaaaaaacaattttttgagaaataatttttaattttttcttaaggtgttaactgaataaaaaatgtttattaattttaaagtgtctataagtttttgctttcttaatataatttattcattttttagtacattaaattgtttttcaatttatattttaaattaaaatttggttagattttttgtaaactgcaattgagctttatttttattcgaatctttatcaataattaaaaagcttacattcatttaatttgttttgcaattttatttttgtaaaactggcgaaaagaatattaatcattttcctgaagatgacttctctcggtatgtttggggcggtcccttcccgctattggctgaaactatttacgccttacacttattttgtttttaaaaaaaataaacatttttaaagattatacttgcatcattgctccattagtgcgcgtgaacttggcgtggttcttgcatatactttcagttttatttatttttgaagtttttatcggattaagttatttatttattttttcttgtaagtcttaatatgtaaaaataaatgttcatattgagtgcgctaatatcagggctcggatcgaaaaattttcaaaatcagaacatcaagcccaaaaaatcagattctggggtcgaaaatcaggacattttgcaaaattgcttcaaatcagttatttttacaatttttcgatcaaaaatgtatcaaatattatatttttcgtctcccattatcgattttaacaattttgggtagaaaattagcaaatcatcaattttagcgcattcggaatcaaaaaaataaagatttttaactatttttttgcggcgcatttttccaaaaaacttttaggaaatgggcgagggggggagggtccggcgatgccgataggcgccgccggaaaattttttgtaatttcgttctgatttgttaacagattttcaccaaaaaatgccaattttgcaattaaattaaaagtcaagcgacgacttttttgctttaaaaacgctttttttgcgtcgcattttttcaaaaaattttggaggatggacagggggtccggcggtgccgataggcgccgccggaaaattttttgcgatttttaatcgatttgttaacagatttttattaaaaaaataaccaaattttgtcataaatcttatattttattgataaaatagtgacattatgccataaaatttcaaaattgtaagtttatttaagaaatcaggacaaagttgggtcactccctccaaatcaggacaaatctgacaaatcaggacattttaattttatcagatttggacccttcaaatcaggacaaatcagataaatcaggacagatacgcgccctgagttaataacttacccgggtaagtctacccgggtaacattacctcgttcattgccctgaccttcattatttttttctttggttcaattccccaacggaacatatactttttttctattttctttaaattattccaattgaaatttaattaataaaaaatatttctacttaaaagttattattttttcttttttaaacggactaaaaccacaaattacccggtctcggcttttctcgcggtcccggacggaaattgaggtcccgagctcgactttctgggcacgaaatcgcccaaaccaggctatcgctttttatgacgattttctatctcgcaaccgcgatgctaatccgatcctgagagcctcttcaaaattttttccattaccgtaagatgtgcggaaattgtgaattaattctcagaaaaatggatatctcttgttaagagaattttctatcgcctaaccccgatgctaatccgatccggagagagctcttctaaattttttccattaccctaagaaatgcgcaaattgtgaattaattctcataacaatggctatctctttttaggacaattttctatct

SEQ ID NO: 8113 - DNA, 1851 bp, Heterodera glycines
tctagagtccaacagtacgaggcatatttagggcgctatgtatttctttatttttaatggaaatgtgaaaagattgacaattctctcactaggaaagaatgtgaaacatttcaaagctatttggaggttttgtatgaatgcctgttcattaaacaccttgaaggtaaataattaattcattttctttaaaaaatttgaaatcttttctcagctaataaaccgtcgctggcacaacagtttgcagttattgaacggccaaaatttcagattggaaccaaaaagaatgccacaataattgacgtgttggacattctttgctcaatttgggcattcttttttgattatgattacggcaaaaaacatggaaaaagtttggaagctttatttaagctttcaatgaagccaatatttatagacaaccaacctattgggaaaaaaattgtgaatttctttcaaaaaattaaaaaatacaacatgccgtccgacgattcagcaatggcggaatcgtcaagcaacgaagcgattgggcatgaagaactacttaatgaaactttaattgaaaaaggtaaaaaacgcgaagaaaacacagccaaaattgaattgacccgaaaagcatttgacaatttgctggaatcgatgacggaaacggcaaaaaacatgcaatcggatgaaggatttggcaaaaacagacaagttttgcgttggctattccagtgaaaattcaatgattttctggcgttcgaaccggaattcaacttgatgaaatccaacaaataaattcagtctaacaaaaaatttattttctgaatttattttccttccccttaattgaaaaccttgcttttggccatgaacatgaaaatttaggttgggcccgggtcagcaattcacataaaaatacataaccatatattctatatttttgcttttattggtcatcctttggttttccttgttgttcatgtttttttctctttttgggtacatataaacttttaattgtaaaattttttaacaatttggctaaaatcggtggaggtcggtaattgaagatctgccagatttttgaattcaaaattgttgggttcgctggacacttatgagtagggctaagatttttaggtgctaaaaactgcaaaaataggtagtaggtgctaaaaatgggaaaataggtgccaaaaagttccgaattttggtggttaaaatgacaaaatgtattcaaaaaagtaattgtactttttccttgtgacttaagccagggacgcaattcaaccaaacacagagtagatcaaattcaaacactttaagcgaaaaaaacatgattccaaatttaattaacacgaatgagtcattataattaaattctacaacatccctgaacaatgagaaaaggcgaccctgcctttagaagtcagaaaccgaaaggcagggtccaacaggtgttttcagcagcgattagaacggaattcccgacggcgttcgttaccctgtccatggcgattagtctcataaggacggtaacggatgggcaatcgatcagcagaactattaggaacaattctacgagaatcggcttgatctctcgaagaatgccctaattccagcagttccaatcggtgatcggcctgatctcccgatggaatgatgaccgccgaatgcatcgtgcgaatatgcatttcgttatcgcctgggaatggggtctgagtcattatccaagccttaagtgctcgacatccagcatttttcaattttctgtcttcttccaccatatgcgtattaaaatgttccccaaatcgaaaaatttccaatgcagagcggccattcggtgtcgtgcagatcggccgaatctga

SEQ ID NO: 8114 - DNA, 3959 bp, Heterodera glycines
accagttttgcgttggctattcagtgaaaattgagctttctctggcgtttgaagcagaattcaccattgacgaaatccagaaaataattagtataatataaaactttttttcttaatttatttttcccttttccttggtgtaagcccgggtcccggccatgggtctgaaaatcaggtcgggcccgggtcagcaattaaaatataaaactatacctgtatcttctctgttttgcttttcattggatatccttttgtttttgttgctgtagttcatcctttctttctcttttttggtataaatttttaattataaatttacaaaaagttcgctgaaatttagtgatattaataagtaatagattagcgataatattttatttacgtatttttttatctttgctcccactttttctcctcaattttgcttcttccatctgttgtctaccggatatgatcactaaaatatgaacactaatcagaaggtcttcttctcccatcgccgtttccaagcatctcgatttttggttttggacatacacaaaacgggagattggagattgaaaaaatcagttgccctatttatttcatcctctctctttctctttctacgctctcgcaccagggctggccgtgattgaatttccaatcacggaaatccgtgagccgtgatcacggggcttccaaaaaaatccgtgacccgtgaaccgtgatcacggcaccccaaaacccccgtggtttccgtgacccgtaattgtaaacaatttttctgaatgaattttttatttaaatttattaacaaaaaacggaatttaatcgctggaaaaatatccaaaagattttttaaagaaacaaaaccatataggtaaacgctttttttttgcggcgtgctttttccaaaaaacttttcgagcacaggggcagaacaggtggtgccaataggcgctgccgggaaaaaatttgtatttttaatgcgatttgttagcagatttttcccaaaaaatgaccaaatttacgtttttgagccaatatttttgaggaaaataaagggctatttttgtcgttttggggtcagagtttcaaaaaaaaggtaaaatgagggtccggcggtgccggtcagggctgggcgaaacttcgagcttcgaaaacttcgcggtttttgggcttcgaacttcgagcttcggataatttacccgaagtttcgggaaaaatacacccctaacaatcgagttttcaaagtgaaaaatacacccctaatgattggcttatagtaaatttatgaaacataaaaatttaattgctgtttatttattagaggtgcttttgaattgactaattggacattggactggaagaattatcaaaagtcccaagaaatttgaaaaaaaaattaattcctaaaattaaaaaaaacattcataatgtccgatgtccgattgtccatatcagtccaaatgacttcattgtccaaatgtctgctgctggaacatccattgtccaaatgtccggattggttcctcccccccccccctcacgatcctccttttccattttcaatacttcccgacccgaccggcttgagatgattcagtgcaaaaattaaatttttaattatatttaaaatgtttttataaaatattttccaattcagattttctttctcaatttggatgttgccgttttgcgcggttttttcaaggctcaccttgatcagttggcatctgtcttctgattcaatatcaataaattgttctgcgagttctgcattcgacttgctgggtgaaatggcttttgaaaaaaggaaaacaaacatttaaaattcttatgaattttacttcaatattatttttattcgatgaattacggtgaataaattattcttaaaaaattaattttgaaaatgtaactaatataatgctcgaatatcgcttgatagaaatccaaatttttcggtttatgattttgcaaaagcctcattttgcaatgataagctataatattcggacacaattttgcaaaaatacttgaatcgatcagacagtgaaggatcgtaaccaaaaaatcgaataagaaaattagggaatccggagacctttttttactcagctgtcctcaaaatttattcccttagaaattttcagaattgtgggcaaaaatcccccccccccctcctctctattcatttctgtatgctcaatcacgaagtataaaggatttatgcgcgtttattgacgtccgaatgcggaacttatgtttttaggcccatccaaatttttcatgggttagaatttttcggactgaaatcgatgtctttcattaatttttaattgtttaattcaaaaataaaattaattaaaaaattaaataattaattttttcacataatatgtattagacaagatctaatggttaataaaagaaatgaaaaatgcaattgacatttgaataataattgtatttttgttcaaattaatttgtgtgagttcttcttcagcggttgccccacaagaataaaaatgaataaattctaattcaaataataaataggtcagaaaaaataattttgtattttattattattattttaaaaaattatatttcaattattttcaattctattcaattttaatggaataaatcagtaaatggttgtgagaagtagaggccggcgtgataatgcttgaagacttttggaattgggtctaactaaattctggatgaataaaatttgagtaccatttggttaaagttttgtaaaaaatgacctattttgtgatttagagccaattttttaaagaaaaattaaaggttttgtcagctctgacggggaaaattgtaattttgaaacagattttttgagaaaacaatccaagttttcaaaaaattttcatttaaatttgaatattcaaaaaagacaatcgcttcaaaaaatttctttataaattttgcctaaaaatccgcggcgcgccgcgcaaaaaaaattccgcggtcgcagatcgcgcatttggaaaaacagtgtccgtaaaataacaaaataacaatgtttgggacattgatattcatttcaatacggtatgaaatttattggaaaattgttataatcattcatacaataaataaaaaatttcatgtatcagttaaagataaaatgggtttaatttccctaaaagtcagcgttatccaaagcttttggtgttggcagaaaaattattaatttgataaatcataccgttgggataaatttgcttttcataattgttttgagagagaggagaacaactttttaattatatgaagtggcatttattatttatctatttttgccagaaacggtaaagttatcaaatcggaaataaaattcgatggcccatcggtgagcagcacataatggaaataaggaaaaacttaaaaaataaaaggaataaaaaaattgcataaaattacatttagaatttattgaataaaaaaggggatttgtagatgagttttttcagatccaattgtagaattaccaattccatatgcatccgcagcaggggtgagacgggtgtggttcgtgatcggaatcgggcagtttttctgccgaatttaggagcccaatccaatctagtctttttcccagagaaattttaaaaattccacaaatcttctcctattaaaaatatttttctaaagttataaaaaaaggaatttgatttggtctatgaacctaactaaattgaacacatccactagaagtgctgccaattaaatgatcagaaaattagatccggcaatccctgtagagcagcaactgctgatccctgtccatcaaaaattctttattttttaatgcgttcattcctatggccaatcgttgcccccttaatatccccatcacgcaacagttaattttcttctcagctcactgctgtgaaaacgaacaaggattgtcaccaccgttttgtgatcccatccttcgc

SEQ ID NO: 8115 - DNA, 7021 bp, Heterodera glycines
  unsure (1)..(7021): unsure at all n locations
cagtttatctcaccggatgacatcgcatttaacggctcttctagagtngnntgnctaccgaggnnncgcgcgggggnactccttgaacagcatcnctactcgagacaccgtgtcaagctacaattccctcaactcccatgtataactatgtaccagaataacggtcatagatgctattttccccttgaacttttggattttttataaaatattacggctaacaggagtgggccttcacgttagaccgttccacccccgctagtcctaatatcactttaatttttattcaactttatttaacaaaaaaaaacaacaataaaatacaaaattaacaaaatccaaatggcatcacattaagctcctcatcgatgatccccttctggcagaccggcttgtaaattttgtgcttctccctcgtcaccactttcgaatccctcgtcggcctaaatattgatttattaatgaagcaaataatgtttaaaaaactcatccaaaatcattcttatagacgaagaatgccgggtccacctcgccttttccataattcagtaccatctgcctgaatgtgtcgtaatgtaatgttttcctattgtccacgtcgaatgtaatcccccttatcttcataacgtattcagtctcccccgtctgcttatttttcatcttcaatgcgtagtgcttcgctcctccgcaacaatattcctcaatctcatagccgccatattcctcggtcatctctccaagatatttacccgtcgtgatcggctccacgtccctatagtgcaaaacaaaaatactatccgtgtctgtgtacaaaatttctcctccgtttccctccgcttctctcatgaattccaataattttaacctcgccatactcgtcgtcctaaaattggtttatatacaaatttataagttttaactcaccataaactgatgattatgttacttgacttgtgttccatcacaaactcatccttgtccctgtagatcactctaatcgcttcctccgaatattcaacaatatcacacatctcaattttatgatcacacgccattttataatactccgacgccctatctattaccgcattcttgttcaaacaatttctcatcgaaaacttaccctaaaagttaaaattaatgaccatatatttattttttaattttcttacccataaactattaagcatcaatttgctgatgtaccgcaatcctggattcttcttcactttagtcaactcaatttcgattccatatttttccttatattcttctctccaaatattcttctgctcatccgtctcaactcccttcggaaaaccgctcgcctcctccttcagtttcaaaaataatctcacatatcccttgaataaatcgtccacctcctcttcgtaatgccacgctctataaaatctgtccacagtataaccgcattccaacgcctttgcctgaaaaatgtcaaaattttctttaaaattttttcttggaaattcttaccaattcgacgctggtgtatgttgccacgtatcgccgctgtgccgcatcatgtgggcacttgtagttacatctcgtagtctccttcttaaattttgacgcacatctccaacatagcggaaacaataatctctcatcgcacttcaactgaagaaccggaatccgcaaccccttcggcgggttgaccctcactttatacaatcccttatacttcaaatcctccggtctcatccaattaacattaatttcatcagtcttcggtataataatctcaggcaaaccaatcgggtaagctgtaccgtaattcactgacgggtacagactcacaatatcataaacactaatctttttcttctcatccgatttcgcaaacaatttcatcggtccggtcctccctcccgcatatgccatcctcggatcaatcggccccttctcatttcctctgtcgtcgaagaagcccctcatttcctcatcctttttcaattccttctcaatttgacacccctaaaaagtagaatttataaattcaaatgtcaaataaacatacccaaacttcttcgacatccaaagtcttccgtagctccactaatctctcctgagtctcatcgttcaattcctgggccgtccttcctccaatcagttccgccgccgggtcataacaattcaaacatccatgtatgtaacatcccataacctcgatgcatttgtccctagctccgttattcgcaataaatccatccaatttatattttccaactttgacctctcgtccgttccccgcgtgccgtatctcaattccatcccgctggctccgccactccaaatactttattgccatcacactggcgcgatcacaccgctcatttcccttctccggcacaatcgataactgctccgtcaacaaaaacattcccttaaaaatattcatcgcaacccccgcattcgtacaactcctcggtagtgggtcaaatcccttagtaatgtcgttaatcaatatccttcgaaactcaataattgacagcaataaaatctccgtgtcgtttcggcaataatttttcaattcatcatccaaataaaaaggtgtctccttgttttcgttgtacctgaaaaattatttattgttaattttgtccttcttttcttaccatttttcgaattttataaatttatccttgttcatagatcccggcgaatagtcctccatcggtggcagatgttccaatcgtattccataattttctttcttgttgtaataataggggaaaaagggcttgtcctcagagtccaaattaaatgtcgctttcagcgactcaagcttcaccggcatcaataaacatgagtctctccaaatcagctttgaatgtttcttcgagttttgcactttaaattcataaattttcaatccattgatgagcggtagcgggttcttcccggtacggcagaggtaattaaaaacaaaatgacctaaaaatttaggatttaaaaattaaattttgaaattaccgtcaaaacgtccggcgttatgtgcaaatatgtacatatcataattcgtaaaagcagttaaaatccactccacaaaatccttggtcggctcatgtccctccgcctcgctccaatccttgatcctctcctccccacaaattttgcaattcgtcctgtttttgtcatcacagcattccgtacacgtaactctcaccgaaatataattaataacatgctccttctggtcccccttgtaaatagaatcctgcgaagtctccgaatcctggagttaaagacttatttttgttgattttatttgtagaacttacccaaactacaattctgtagacatctttttcctccttctcctcgatcggcataatataacacccccgcttggggtcatggctcacactacaaagctggcaataagtctcaccacattcatgttccttcttcgggttaaataaatatgtcttgtcacagatcacgcaacgcctccataatttgcaagtctgatgtccctgatgataattataacactcccaattgtaaaagtaacggtgacactttgggcattcaatcttcactccactctccttttcacatggcattccccccactctattgcaataataacaccttgcccggcactcgaaagtatgtttgacatccttgtcaaaaaagcactcacaatcaatacaaaattttctcccacgattaaaaaaacagacgtaattcttcagaccatcccagtgaccattctccaaaaatatcggtacgaccttctctcgtcccataggggccttccacaaaacacagatcgatttccgcggatctgcagacttctcaaacgcaacaacccggtactttccggggtaaatctcatcctgaaaaatttattaattttgcattttttcatttaacccacccaatatttctgaacattcggcaattgctccacaccataactaatttcgtttccatcaattccacaattccgtaaaagttcaacagccgcttccttttgtcttgctaagttcttcataaaacgaataaacgaatatttatccataattaaataattcatcgacgacgccagtgcgtaaaaaaggcaaaatttatcagtattcacaatcctaaaatttacttttttttttttttttttttgcctaattaaattatttaaaataaatattttaagtttttttttttttttgtttcattaaaattttttaaaataattattttaaatttattttttactttctttatttttaattttattctgtttttttttgtttcattaaattattattttttcattttttttttctttaaaaaaaattttttttttttgcttcattaaattttttagaaataattattttaaatttatttattgatttttttctattttaattttattttattaaaacacttaccctatccgctggtgttccttgaatccaaagtcaaatttgtggacattcctcggcccctctccactgggcattgtaacgcatgtaattttcatagtaatcggttcagataataaaagcattttcttattttcatccccgtccccgctctgctccagcttattaatctcctccatgataacatccgcattattctgggggtacgcccgatacggcacccacaccgggaaagcaagcccggcacccgtaattgcaactccaaacatccgcacttttcgcttcattttttcttccgtagtctttaaagccacctttatcatgttgtcgatcgcatccttcatcgcttcatcggggcgctccacatccgggttgacacgaaattccgtaatatttttcgtaaatccaaatttttcgcaagttgtcgattggtaatccatcaatttataattttccatttcttcagcaaaattatttctgaacaaaaaaaaaatttttttttttgaaataattcttaaggggtattatcttataattgtatttataattgtttaagaaattatttttttatttaatttattaaaaatcacttacccgattgatcggaaatcccattttttggccattggcacggcgggttggaaggagttcacgcgtttaaaagacattttaaaacaagaaattgaaacagaagaattaaagagagcagagatttgaaaagaaaaagacgggaatttaatagaagatttaattaatgcaaataaaaatagagcggagagaaataaaattagagcgtgaagagagtttaatgaaatccaactatttagttgaatgatttgcgatttgggccgggtgtacggattgggcgagaggggaggggtctagtcacgtgactgtctgggtttgccttaatttagggggtcatcaatcatttcggtagacagctgtctcattttattcaaaaaccgtgcaaaaatcgtttggatattccttatttcgaaagtcatcaatcattttttttttttgacaggtttgcaaaattacgggccatattgcgaaatagttggacccaaaaataatggagacatttaaataagaaaccaatcaatcacattttattgacagctgacctaatttaggggagatattgcgaaataatttgaacaaaaagtcacgtgcagattgagaaataagggaagaaaaataaaaaacccatcaatcaatttttagttgacaggtgacctacttttgaaaaagttttttaatttatttattcattctttgattttacttttaaattggatttaaatagtaattttattgtccaattcataatcaaaattatttgctgccaatatcaattaatttgcacttcttccaaattccgttatcgatttttttttttgcgcgactcggcatcgcggcgcatcggcagggagtgagtggaaatgaaaaaacctcacgattttggctaattttcaaaaagaatttttaatttcaggatcaaaaaatcatcataaaaaaatttcaggattgagaaaataaaacgctaaaaggtttgaaacaaaagattaaaatttgcaaaagttaaattgaatttcctccacctgtcactttggtgacaggtggatgattgatgaccttcccgcggcgctgcgcggcgcgggaaaaaaacacccgcaacaatttgggaaatcggatttggtcaggcggcaacttcaaagtggtccaataggttttggttttgaaacaccccccatcgtggattttttgatggggcggcaacttcaaagggctgcacccctcccataggcacgggctcgtgcgggaaacacccgcaaccaacccgcaaccttttgacgctatatactacttcccccgtccattagtatctgtgactagcgcttcttttaccatttccttttcgcattggcttttttggtggctttgtaatttgtaactgtggatatttgccatcggagagtaacaacaaatattgcttaaccgatttcaattcgattaatgcactttctttcatttgacactcattagtggtctcgagaacaaatgcccaaccgatcacctaaacaatttcgattggtttttacagtaattttacttattttttgcaaataaatagtcgttaccaacctcaaaacaattcactttgttctcaaagcgcatttgtggcaattgctttttgatgttacaatattcgatgcattttataataatttttttggttttgccaccgaaaattattttatgtgccgtcacaatttgtcgcatcgcttccacaattgttaactctttaccacttttttcatcgataaattttggtttgagcgaaattttccccaacaaacgctcatctaaaaataaatttaaaaaacatcgataaaaaattaattattaagtcaccgtctttttttcagaaaatccctaccgatatttctatgctttccattctctaatgcgatacaaaaaatgaaaagccgttcaatagacaagtattgaaattgccattccgctaaggagtccaataaattctttggcactttttccgtaaaagtgccaagttttcgcccatgcttctctgttacgat

SEQ ID NO: 8116 - DNA, 1051 bp, Heterodera glycines
ttcaaaaactaggaacaaaggggtccatctatgccgataggcgccgtctgaaatttttgaaaattttatcaattaattaactgattttgaccaaaaaatgaccaaatgtcacaccttttgacttaattctacaggattaatgtcgatccaatggtgtcgataggcgccgccgggaaatttttttgcaaattctaggtgaaatttgagctgaaaattgaatttattttgattgattttattataaatttattcaaaaattttggcattccgtcttataaaattttcaaagaatgtatgcggatcctgccggatcccgcacaaaaatcaaatttgcggatcctgttgcaggattggaattcaaaattttttgccggaccggatccggccggatctatcctgcaaatcctgcaatcctgcaaatcctgcattttccaaaaaatgcaggattgcggactgggatcctgcaaaatcctgcgcaggatccggtcctgctccgggctctattgtcaactgagcgactaccgccttttttggcattttcaaaaccgggatttttcgttattggttatatcgaattttattcatatttgacatgctatgaaaataatatggaaatttgagatgagaaatttttcaagtttttcattgcgaatttttgatcttgagcgcaaatcccgaatcagtaccgaattccagttcaggcttgaattatgtaatagttaaaaaatcgagctacacaccgctgatgggcaataaaatgtttttaaaacctaattcatttcaataatgagaaaaaaatatcattaaataaaaaaaattaagtctatattttttattatgttttcaatttaagacaaaaattgtttgaaattttttaccttttatgaatattttttatttttaattaatttgttcaccaaaattgcttgattttttatagtgagacgaacgactttcattttttctaagatattttaaattaatattaggttatggccatcctcggggacccacggaatttcacgaaccctgaccttaactacttggatca

SEQ ID NO: 8117 - DNA, 6691 bp, Heterodera glycines
tgatttaatgagcgaaaaaatttttaattgtcaaaattagttttttaacaaatttagcttaaaaaattccggcccgagcatcgaattttatgccggttggcaacttatacaaacaggaacacattggagtaccggtggaggccacaagaagagcgcatcaacgtctatcaagtaattgactaattataatttgattataattaaccaatgaattaattagctcttttagtctattaaaacagaaattctccaaatttaatacaaaaaaaaaaattaattaattggctcttggttaatctattaaaaaggaaactccccacatttaaaataaaaaaaaaaattaattcaataattagtcaattattaattggctctttgttaatttctcaaaataattaattaattagctctttataaatctattaaaacggaaattccaaatttaattaaaaattattaattagtcaattaactaattggctctttgttaatctataaaaataggatttcgctaataattataaaattattaattaattctccctttattaatttattaaaacggaatttttgcaaatttattaaaaaattatttgcatcataggttgagcaatggtatataaatgattgggagcgcatgaacgaattgtacacattccgttttggctacctaaagctggccccaatacgaccaaatgaattgacaactccacaattactgtctgggtaaaaaattaaaaatctaatcagacctaactgttccagagtcaaatttgttcaagattggacaaccagatttagctcaagattaaaggcccaaaattttttcccatatattgagactcattcagagtcaatagaaaggccgagaaatgttatctgagacgaaattttatggaattaatcatttgcttgaactttacttaatttttatttcccaaaattttgaaattaaaatcgggaaatggtttagctttcttaaaaatttcgtgtttaaaaacatattttaaattcttattttagaatggaaatgcatcttttttacaatgtttcgtgtttaagtatttaaaaaggttttttgaatttgaaaatataaataatttaaaatgcactacgatgatcaaaatatttttagtttggtctctgcacccatctcagtgtactgatatgaaaaattgggaaatttgaattttgaattttgtgataatttttgtttaaaaattgtgaaacaataagtagaaaattgtttaattttcgtataagttttcgtgcttagtaattaaaaatatatttgaaattttaaaattttaatagaggaaatgcttgttttattaaaagttttcttgctttatgaataaaaaacttttctggaaatttaatcaaaaatttgtagctttttttaatttcacgatgatgatgaaaatatttttagtttggtcactgcacccatctcattgcattggctgtggacagtaagccaaattaaaaaattttaaacaaatttacatttccagttggacagcccccttttccaaacaacatcattcagtgctcaagaaacgaatactcgtgctgcatttgtggcccaaaaagccaaggaaatgtgccatgattggtaaatattggcactatttcagtttacgcgtctaatatcaatatgactatcctcagtttcttagggcataacttttttcgaacttagtcaaagcatacattcttgtgtattaatcgactgcttaaagtatcgggaatttaaaaatataaaaaaagatttttaatattactacaaagtacactgagaaaaaacaagaaattcaagttttaaaaacagttgcaatgttttttgaggagccatagcacatcaatcccgactctatatctcgttaggaaatgtttgcccgccaaatttttcagattctttctttgaagaccgagagaagcacgattgataaaataatttattcagatttagtctgggtatttaataatcatattttcacaaagattaatttttgtcatttaattttagactaaaatttaataatacaaagaatttgaggctttcgtttgataccatgaatgtaggcattgaccaagtaaaaagaagaaactaagtatggtttttgattggtcacgtaaattgtgaaaaagccaaaatacttttgcgttttcaacaaaaaataaatcatataaaattcccgccaatttttgaaggtatgatgaagatggtgctcaatggaattttattcgtgatgtggaaacaaatgcttcatgtccatgcacagaaaaacagataattatttaatcacgcataattaaatttgtcgataatatatttaaattaaaaagataacccatcaagttttaggctaaacttgacttgggccgttttatgcctcatccccgctgctcccaagaatttcggtaaatttttcccgctttcaaattcttgactttaatttggtctatcgtatttgtccggattaataattaattttattaaagggatattacatgctccgagatgatcggtgccaaaaattgttacatgagcgcccaaaatgtgtacggctcttacacgggcaaagccgattggcaatggcaggtccataatttttaaattttgcgaaaataaaatgtattaatgttaaaaattgattttccccagactttcggggatagaagatgtggaatcggggataaaaattaccgaataatttttttttgggatggcttaaaaattttgaaaaaaaactcacttagaaaatttcatttcttttatactaaatacaaccagacaatctaataaatcccaagcatttaatattattgatattaattctcctaaatttatttgataaaaaaaatcaaaaagtttgtcaaactgatcaaattcaccagcaaaaaactgatcaagacggaataataagggcaaatttatggctaaataaaatgagaaaaataatctctaaaattgacattaatattatttttatttttttatttaatattattcaaaaatgcaattaaacaaattgaggcaagcaaaacaaagcaagaaaaaagttttaatgaaatatttggccaaagatgaaacgatggaaaagaagaaaatctttgccaaattggtcaaataattcatggagaaacagttgatcagaataacgtattaggtcaaaatgaccaacaatttgatcaaattttggatgaaaatttggaagtgaaagaagaggaggaaagtgaagaaatgtcacaaattgtgaagaatcggaacaatttgcagaaaatagtggacaaatttgtgaaactttagatgataagaagaaaagagaaattattaaaaattgcataaaattaaagaaaaaattaagcaaatgggaaagaaacattcagaaaaagaacggaagaaaattgaaagaaaaatagtcaaaaaaattgggtgtcagttacgccaaaatttacaaatggaaaagagaatttggactgatcagaaatttgaattcggatcaggaaaaagataaaatattaaaacagtttgatcaaatctatggcaaaagtaaaaataaattaaaagaaaaattggaaggaaaaagcacaaaatataaaaaaataaaattattttaaagcaaaaaatgaatttataggaaatggaaaacactcagcgaaggaatggaaagaatttcaatcaaaaattatacaaaaattttgcgtgagttttttgacgattgaaagatgggccaagaaattaaaaatcaaaaaaatgtatcaaaaggtttgattcattaaaaattatctttacagagggaaaagtgttaacaaaatttgaagtgttatctgaaaaatgttatttttttcatggtactatgaccataattttgttcctgctttgttgattttttgtgttaaatatttgaatttatggcgaaatgccgaaagattaaaatacgaaaatttttttgtattgactcttaattgtgaaaataagacattttgggaaaacctaaagttcttcctcgatgctcgaggagtgaaggtcgaagatgaggaagaaatttccagtcaaatttgtccggaattctgggaaattgaaaatgttatggagtaacatacctttttaggggagaaaatttcataaaagtcttaaaaaataaaaaataaaattctgaagcaaaaaatccatagaaacgtgaatattctcagagtgcaaatgacgatttcgcaatttgccggatgtggaggaaccccctaataaaacctattaacaaatcacatgcttatctgaaccgcccgccagacccttacttttcataaaatttaaaaaagtaataaaaaaattaatcgtcaaaattttcctttcttaattttttagggcttatatctctaatatggatgacagttaaattcttaatctaaccaggatagttattatttcaaaacctaataataagtcaagttttaacattcgataatttttttgtatatttaacgattaaattttagatttttttctttaaaaacctgatcctggccagaatctatgtcaatattttgggaccttgattcaggatctcgaaaaaaaagtttaatcctgaaaccatgtcccaagcgaccggaatttctcaaaattctgggcccctattaacattttatttactgatagatgtcatcaaaataattaattacagttagctgaccttgttttcgttagaattttttttgatttgctggaaaaatttgttcaaaattttaaaattttgactctttccccatgtcgtcggcgatctccctccaccccttcaccaacctctttttacacctgtcccctaacccaatgggaatggggctccatttgggcctcttttcgggcccaaaccacataaaataaacaattcaatttaagatttaaatcaaagcttgaagattttttcagaatagaacttagaaatttcttttttgtctcataaatttcctgaatttttttacagtacaaccaaggctggggtggtgctgcatatacaactggtgctggtggtacgctgaatcgagaagggctcagagcaggggaggaaggcggacaaaagtgagaaaaatgttaaaaaacaataattttattgcaaaaaatttttaaaataaatttttataataaattaataattttatattaagaatttagtttaaaatttagtatattattatatttgtttaaataattgcagggagcttttaaaacaaatttccaatttaaaataatttgacagtttacagttaataaatatttattattttttcatttttttttactacaataaataatttcagataaaattttataaattaccaattattaaaaaaaattaattaacagccgatttgccacccattatggccaagtgtgctgctatgaccaggagggctatttgcaacagaccacctaccagccgaccctgaaagtgatcgaccaaatgttctacaatccgggatttccgctacgggcctatgagttcggctcctacccatatttgggccaattcgaagtgccgggtacacaaaaattttttactgcacttcgcactaataacctgagcactctaaaatattatcctggaaatccagtctttcgtgccttacctggacctggagtttttcatgtttgaccaggacctggatttcctgaagaaaaatcccggaaaatccaggcccatgaaaataccaggttgccgaaaaatggcctggacgaactctaataatattagttgtttttgttttaattaaaatgaatttaatttgcttcattaatttaaccaaaaatttcgaaacacaaattaaaataattcttttttttaattgtattcttaaaattaggcttgtcctcattccaccatgactatatgccttaccatttgtgttgcaaattttctaaattccgttgccaactgttttattggcgaaggccaagcagcggctgtcagcaatatcagccgccggctgtcggtaaaaataaatttataaatttgcaaacaaaaatattaattttattcattttaaatactaaaataattatataaatatttaaaattgctgattaaaatatattaaattataaaattaaattaaattttaaaattactaatttaaataaggctttgcactcggcgccggcacatttcacaccattgacaatcaaaaattcattttctcggagcccggcgtgtacacattgctgtacatcccgaaaaccatccataaccctgaggtgcgcatccaagtgcgtcttgaacggtacccaaatcgacgcatcgatttcagtgagaccatttgatgaaaattaaattaaaaaacgattaatatgcatgatattaaatattgaaaatagttaaagcatttagatttaaatattattttcttaaatcattaaaattttataattttgttaggtttatgaaaatcgaaaaatattttaaattataattttttagatgaaaaaaacacggaaattattattttattattattattataaaagacgaatgcttaaaaaatttgtataaatttggttgtaaattcgctattttgtcaaaaatgctaaaaaaaaaatggccggccatttttcggcatttcattctttgtacgggtgacttttattcaacccattttaacatgcatagagtaaatttttttttgtgactctaga

SEQ ID NO: 8118 - DNA, 3503 bp, Heterodera glycines
tgccttttgcccgcccccttcgaaaattgtctatttaagcgttcccggccaaggggtcgtgctcttcctccttttcttccgcttcattcattgccaagggatctgtcccttcgcttcattttcggtctgcctgtgaccaattcctccaacttggaggactcggaaaggagggaaaagcaccctccacactccatcacattcggcaaattctcgtgcggggccaaacggaggcgcccattcccgtcttgacccctccctttcccgacagcgccctcgtcgttctcccccaatcctcccgatcccaattcatttccttttggcattggagaatccgggaattggcccggagcatcagcgaatttcaagcagttcagactcccgcagcggagtctcgcggatcggtataagtctcccgccagccggagcaaccgttgggacggggcgaattcccgtcgtcgacgaatccaagcagggtagtgaaggaaggaagagccgagcggtgccaaatcgtccgacgaaaggacaggccgttcgtcagcgcaacccccaccagccggggaagcgcgcatcgatcaaaacggactcccaccagtcggagtgtccgccgcagtaaacgggagtcgaaacccgtgttcggcaagtcaaaggggtccgacaagcccttctcccaaaccttgtcggtggtgccgttaagcaagcagcaaatcgctgcacaattccctcaagcaccagtccaactttgtcacccctccccctcccattctcgtccccctttggcgctgatcggatcggtcagcagcatcagacccatcagagcgaacggcaaaaggggcgcaattccctttgcggcacagcgagcggagtgagcagagataaaagggacgagagcggtgaagaggagcgggaaccaatcccgcctcagctgggccaagccgcatttggccaaaccccgcccgagtaaagattggcgacaacaagtgtgtaaagaaatcgccgaaattttgaaggtttttctggaaatcttttggaaattttgacagctaaatcaaaaataaataaataataaggggaaaagcggggaatttttgtaataaaaaaataaataaatgtgaaatattcgcattttgctttgccttttattccgattttttattaacattttctaaaaattgattttgtaacaaaaaagggaaggtccccgggtgtccgtgggatttccgaatgaaatttggtgggtggatagagcacccatgggttcttaagaaaagtgtttttattttctgcgaaatgagtctgagtaccgagatatgacgtgccaaactttttttatcgcaataaattaaataaatatttgcatttttttgtgctgcttggtggtgcggaggttgtgctccggccttacctttttgccctcgcaggttcgattccctcttatgaatatttattttccccttttaatccttgcattttatgcaaattaacggccatttaaatcaattccattcggccaaaaatttttattccttctttttcattcaattttattcattttcacacaaatggtaatcattaaaaaaatggttaaagcataaatataattcacaataagcacaccgtaataaaataaaacattcacaaaatttcatttggaaatcccacggacacctggggaccttcctttgtgaggccactgaccgaccagccgctgaaattgaatgatttcgtgtgattatcgaattacacaaattccaaatttgaacagtccccaaaaggaccagtaagtggtttgacttttgtctaattatagattattggatcagtcgggatgataggtcatgcaaattttgtcggacagccaaaatttataataaaaaaaaaatttcgccgaaattggcatttgccccaaatgccaatttcgcctctgtctgccaattttcggctggtggtcagtcggcaattaaatattcgacgagtgactgcgcagaattgggaatggaatggacggtcattttcggtagcgcgccgcggggcgggtggagaaaacgcgtaaataaataaaagaaaataaaattgatgactttcgccgggggggggggggaatgggataaattgataaattgcgaattgacacgaaaaacggagaatttgtaaggcaatttatattttgaaaaataggaaaatgataaaacaattttaaaaatgtgattttagggcgataaaagtgccagaaattgttcagtaacttcattttttcctcaaagatctcaggaaaaatagggaaaaccgaaattgcagcctaactataaaaaatgaaactcaaaattttatgagacttaaagaaaatggcattgttggcagatttattttagtgaatacggtcgtttgtactgtacatcaattaccagcagacggtacggtatctgttgctggttttaacagaaagagaatgagtcagtcagacagtgctcaacaatttaaaaagcgattagaattttttttaagtgtcaaaaaatgggaatccgataaataatgaaatgacgcattgattgattgattggattggttgatgatcgatcacttcccctccgggggcatccgtcattgcttctgcgtgctgatgtacagcacgttgttgccccggatgaacgcgtccccgtacttggccttcagctgtccgccatggtactcctccgtctgttccagcgcaatgttcatgaagccgtccaggcaggagagaatgcctgcaaagttgtacattgagtgaaaaatcagctaggtaaagaagtgcctaattgatcaaaaggcatattttattggcccgaggcaaaatgaggcactctcagttttttttttcttcagtcgaataccattccaagtgttcgaattgggacaaaggcgtgaaaaagcaaagttgcgggattaaaattaaatttttggattccatttttttggattagggactcggaattaattggcaacttatcaatttttacgggtgaaatttttttttgccgtaccaaatattgaatcatgaaagcaacaagaccgaatattgacgactcgtcccgagacccaaaaacactgactattccaaactcaaaactctttcgacaatctctgatgaatagtcccctccaaatgcccacgaaatccaaaacggaccccgataatcggcacccgaattgagcttcaccaccaccggtttgccgacaattttcttcaaaaattcgctgggcgtttgtcgtctgctgttggtcgccaatgtcgttggtgcactcattttataacgcgcgcaaaaaacgctatttttttaaattttacataaattttgacagatataatatcatgacacatcatccatcagagcattttttgtgttaaaattggcacataaaatttcttcacaaatgttttatcctcaaaaaaaaacatggagaacacttttgcatgttgaattaattgtttatgtcaaacagcagagcaaatcgttggttgattgtcct

SEQ ID NO: 8119 - DNA, 2802 bp, Heterodera glycines
ggtaatcattttacaaaaggttaaagcatatatataattctcaataagcactccgtaataaaataaaattttcacaatttaatttttgacatatgtcatttttcggcacttcaaagcaaaatttaacaggatgacaaaaatttggcaaaggctcgtccccgtaatacccgacttttctccaggcaaaattaatccatccattaaaacgttcggcttgaaactggttatggattaacgattgtaatttaataatgttatccctgacgtgcaaatttattttcacatcataaatcattacaaattccgttatttttctggtaaattgcttaaattctaaaactattttttttatttttggcaacaaaactaccggaaaatgtaaacatccaatggttggcatattccagggattaaaaggggaaaataaattttcataagagggaatcgaacctgcgagggcaaaaaggtaaggccggagcacaacctccgcaccaccaagcagcacaaaaaaatgcaaatatttatttaatttattgcgataaaaaaagtttggcacgtcatatctcggcactcagactcatttcgcagaaaataaaaacacttttcttaagaacccatgggtgctctatccacccaccaaatttcattcggaaatcccacggacacccggggaccttcctttgtaagcataatgctgatttaatgctatttaattgctttttaaccacataaatgccaatttaatgcttaaccttttttaaaattgattttgaccagggttttttttaaaagttcttatttaaaaaaaaattctttatagtgccgaatttactcaatgtccaaatcagggctgggcgaagctcggtttggcactcgaagccgaagttcgaaacgaagcccaaaaattttccggggatcacaaaacagaaaagaaccttccttattcactacggcagatcaatcaatcacatgccaattgacaccaatttatgttgctgggaatattcataaatataaaattctagaaaaatgcatattaacaatgttgtatcgttatataatgcatgtgtctattggagattgattacaaattttatttcttaaaaatgtcggaatatggaaatatattcgaaattatttttgcgaaaatacaaaaaattgtcaatttttggcacttaattcatccgcctctgagcacttaggctgtcaaaaatatgttcaaaaattgatcaaaattttgagatgtaatttggtttgcagttgtgaagctcgaatttgatataatttggaattttaaaattttaaatccatttttagcagttttagtgtcttttttaagtctgtttaagcaaatattgaatattaacacactttttaaccaatttactaaaaaataaaaaaatttgcaaacaaaactttttaattatgagccgacaattaaaagcatttctcttcggatttggaatattttagctgttgtggtgattaaaatattataagtggtctttgttcggcatttgctctttggatgccataaaatttaactgatgagtttttggaataaccctaaaaatcaaaagatgaatgaatgtgcgattagtagggatgggaattttatgtaagaaaaatcgcgaaatatgtaaataaaatatgcataaaaaatgttaaaatatgtatggaatatgtataaaaaaccccaaatatgtactaaaatatgtaaattaaatttttaaatgttattttttggaaaaaattcctcgtaaaggctgaaataggcacaaaatgccataaaaatgacttaaataggcttagaatcaccttttaaaaattactttttggtatatttcaggggtacatttcaaaattattttttcactataattttcaaacattttctaaatatgtaaaaataaaaattttgccgaaattttggatttatttttgaggaatttccaagaattttcgtaaaaaatcctcaaaatatgaaaaaataaaaatatataagaaaaaaaatagtaccaaatatgtaataaaatcccgaaatatgtataaaaactccgaaatacgtaaaaatatgtaaataaaagtcccaatttttgttacaagcacaaaaaagaaagtggttttcctcctatttagagccaaggagaaatcaggaaaaaaatatttatttacataaaattgacaatcctattgatcagtagggataccttttttgcacaaaaatcagggaataggcacctaaaaaacgcagaaaaaaaaaaccgaaaaatatttttttcgaaaatcctaaaaagtattaagagcgctgaaattttaggcatctgtctacaaaaggaatccctaatgatcaggatgaggaaaaaataaattaagaatgccattgaaacgcaagttttgatacatatgatcatccattctttaagcttcattcataagcaaaaacagggtttacattactgttttcatcattacggatcaaaaaaaaattatggtagcattcatgttaaatttcaaatttatctgaaaattgttttcgaatttttaatcaaacaattttgagaaagatgaaagtacagaaaagaggaacgaaagaaagcgaaacagagaaagagagagaaagaaaaagaaagcggaaaaacattttaaaaagtaccgacaaagggaaacaaagcaaaaagaaatagtgattaataaacaaatctctgatcagaggaagggaaaaataaattaagcgtgcaaattgaaacgataaatcacataaatgaaaacaattgcaatggcaaccataataaaaacaca

SEQ ID NO: 8120 - DNA, 4269 bp, Heterodera glycines
cccccaataaattccaacaaaatttttcggcacaaatgaagcgcgttaaattggctttttgagaatttggaggagaaattggttgtgttcgttggtccgtttgatgccccgcctccgccaaattctcaccccgaatttcactttttacccctttccaatatgattggtggcggtgacggcgcgatgattaccccctccccgccccgggccgccgcccccttccgccgctgactgatcagttagctgttggtccgcctccgcaccgccgattggtgaccaaacacaaattccaaatgagacacagccaccaccgcattccgccaattcattcatcccaatccgccaaccgtttcggccagcggcgatgacagtttttttttgttttgtttctgtccggctttttcttcgcacttgttccgttccaatgtttgaaatttttcccccaaaaatgcgtcgaaacgaaatatcttatgccctcctgtttctcgctgttctcgcggtttttcgagtctcggcctctgtttgagtttcccataatctccaattcgtggttcattcacagttgttaaacaaccaatttcttccaactttccaaatcagcgggactcaattggcctgtgcccaattgtaccaccaccatttgcaatctgttcatttgtcaactgtttccgcttttactgagagcgccataaactcgcgcggtgatttatgttcaacctctcatctctctctctctctctctctctccgatcactttgtgtgattttcattttccgatcacttcccttcgtttatctctctgatcactttgtgtgattttcgttttccgaccatttcacttatttttatcgcttttaaatggtggaatctggggcatcatccttccgccaaatcgcgcagcagcagttggaagaaaacaatggaaattttctgcgctcattttgctgcgcgaaattttagttcaaattatcggcataccccaaattaatttgatttcattttcttttatcagtaaaaatttttctgtcatttattttttcagtttttcttactgtatgtttttttttgtagcgcaagtaccgtaaccaaacaaaaaagcgtaccatcaattgactggttgtttctaatatcaaatgatccgaggtataataatagtaaagccctattagcaaaagtatctgatcaatttcaaataaccaaaacatgcccaagcaaaatcccttaattatgggtaattaacaaatattcgatcaaaatctagcaaatctatcaacagatcagagatatacaagagtaaagttaattttaatcgcctgtttaaatagattttcataatttttaaagattttccgttttttaattgagagttttcgaaattttaatcctttgaattgtccaagccttgaccccattaataaaacatgcccgagctaaatcccttaattatgggtaattaacaaagaaattttcgatcaaaatgttgcaaatcccttaattagtgtaaaagcgcctcaaattaactgctgctctccgcaaaaagcggtcactagcatcacagtgcaattagtagaagaatgtcagtgcaaaaagcagcacatttcaatttctgtatcaaattattcacactttagcaccgtaaagcactagcaaattactccatcactccaccattttcattttttttgggggggttgggattgatcacaaaataaatccagaaatttgcgaaatcccaaaaatgtcatcagagtcatggcatccccttgggggtgggcactgctggccgggacaaacaggatggaaagtggtggaaaagcatgctttttaaaagtggtcgccgggattgggatttgggtgggaacgggtgagtcccactttaagaaatgctttaacgcgcacccatttgggacatcccaaaaatgtcatcagagttatggcatcccctcgggggtgaagcatgcttttaaaaatggtcgccgggatttggggggggggacgggtgagtcccgctttaacgaatgcttcaacgcgcacccaataatagcaacaccctgatcatgagcatcttcatcacatcaccatcatccgtcataaccccatcatcgtcatcaatgtgtaaaatgggagagacgaatccaaatttgtcctttgccctgcccccctccggcgcacattaattaatgcatttcattaaatttcatttttttttgtgacagcagcaagcacagctggtagtaggaagacaaatgaattgatgcgcaaaacatgctcaaaactgacgctccccccacccccaagttttaagcataattcacattttgatcatgctaatgcatgcgctcgcccatctccgtgttgttgaccatcagacaggacagggcaggaactgattaatgaattacatatatcattttttagggtttgacattacgcacagtcataattttatcaaatatttcatcaaaataatttaacccccccccccctatttttttttgtttaaattagagtaatgaagcttttttttaaataaaaatcggaaccgaaaaaaaacactaagaattcggggtcaacccaagtcttatcctattcttgtttaattatttaaattccccctattttttaaaattagggtagtgaggcttttaaaaaaaataaaaattgggaccgttaaaaaactaagaattcgggaccagcccccctgtcgaaatcccctgtccaatcctattcttgtttaattttagtttaattaaggtagtgaggccttttaaaaaaaaaccggaacaaaaaaaactaagaattcggggtcatccatcccctgtgggatccatcctatcctagtttaaattatttaaataaatttttgcacacaaaaaacggctgtagaaatttttcggacaaacatattggataagagcagaataaatatattgttaatttcttgtccacattaacattattgcttacaaattagcttgcacaaactcccgccacctcaggggccgatcaaaaaggattgctgactcatcagcatcactttgtttcgtcattagtccccacaagtcttgggtgggatgatcgagaaaatggggatgtgattagcataatgctataattatcgaatcgcgcaaatcctctccattcccgcccgctttctccccacttttatataatcatctcaatttcccattttttttatccctctgctgatggtaaaagtaataaaagcttaccttatttatttcttgatgagtttcctgaaaataatcaaatttctaatcagaaactgtcactggtaaaattctgattacattcccaaaaaatgatcaaaatgtttgccgtatttattgtttcttgatcagttttcctgaaagtgatcaaatttctaatcagaaactgtcactggtaaaattctgattacatcccatagaaaaaagtgatcaaaatgctgatcagggcactaaaaattttgtttctgatcattcttccatctctctcctttgattacattccaataaaaagtggtcaaaatgctgatcagggcaaaataaccatttgtttctaatcattctccctcatctttctccaaaatcactctaacagcatatactgaaactgtttaaagccgaaatatggctaaactagcagcacaccactcttttcctgtcttgtccatcaattcatgcttttcctgttccgatcgccattaatttggcggtttattttggatggaccaaatccaataattacgccacagtttggagccgccatattcaaacagtgttggaatggtggaacatcaggtttcatcacccaaccgaatcagcaacaaaatggggatgattaatgatgataatgactgactgattatcgtccaaatttgttatccaaaaaaaagtggcgcaaaatggggacagcccaatccccggttttgatcagcagagcagagcgatcgcctttaaaaggcactgaccgattggttggttagttgattggaaagccttcaaaaatggcgttatatacagtaaaaaaccatcaaatcaatctaattattaaacatatatggtagtgaaatataaaaaaatccaccaaggcatactgtattattggcaacaaatactgtacaaaataataatggtaaacagtttttgttttaaaacaatctatttatacaatattaacaataccataaaaaaagttttattgaaataaacaaaaaatttaatttaactaattaaaattttttatttaaatagaatataaaatatt

SEQ ID NO: 8121 - DNA, 5218 bp, Heterodera glycines
  unsure (1)..(5218): unsure at all n locations
tttttatactttcagacaaaatgacgtgcacgacttggacagccgcaccaatacgttgccgtcgtcctgcaaaaattccgaccgtgagcacattctgctccagcttttgctaaagctcgttgttggtcagcgaccggaaatacaaaaggtgtggcattttttcaaattaatgactccatttccacggcattacttcttttggtgtagcaaattcccctcccaacatttcagggcaacctatttctccgtcataaacaagtgcgtttcgtccgtggcttttggcgacactgcgcttgaccaggacaccgaaaagcaaaacgttttcaccggcggcgatttgggtgtgtttttatgaattcgtaatcgaagagtttatcgtaaaaatacatccattttagatgacgagtttgacaagatggagcgggacgacggcatcaaacggctgaacaaacgtctcgattccgcggtggaggagaagcaggaagcggtgtcactgcaaatcaaatattacgagaagctcaaggagttgcaacacgagtgttcggaattgcgaaaagttgtgcgttttaattccatcgaaagagagtaattttatagggcaaacattttcatggcttttgtgccatgagatttaagtcaatgtgcccaaaatgtttaaaattttccaatttttattaaacaaaattgcaggcgccctccggacgcgcattgcccccggccaccgttttggacttgcccctgccgaaagaattgggcaaaattgtcaacgggacacaaaagcatggaatagcagcaggcgcagcatttcccacggggccaggctgtcctcctccgccgcctccaccaccgccacctccggcactgcttatgccggaccataaacggaacaaattggtaacggcggctggtggttctgtcccaccgcctcctccgccgccgcctccaccgtcggcgctgaggccgggcgggggcggccctccgatgccaccgccgcctccgcctgggtttggtacgcctccaaccgcatttctgcatgccgcctcgccggagctgcccgactacttgaagaagaagtccggcaaccagccggaggtgccaatgaagaagcttccgtggaatgcggcaattgttgggccaaaatttataaattcatttcgtatttttcgcaaacaaattaattactctttcactgccaacagattcgaccaaacgcgctgaacaagaactcgctgtgggcacagattgacgagaaggaagtggcatcggaggatgtgttcgactttttgaaggccaaattctcagccaccgggtcggttgaatggaagtggatggcattttataattctttttgcagacgaatgaattgccttccaatgaatttggccaaaagaccgccgtcgaaggcaaaaactccgttggtcattcaggacgcgaaaatgttgcaagctttgggttcgttcgttcatatcgcaaaatacaataatttttggaataaaacccgcaatttttggtatattttataaatttctttgacttcccaaaaaacttgtttcagcaattctgcaaggctcttgcaaactgagtttcaaacggtggcgaaatgcaattttggaggtggacgagaaagcgctcaatgccgaacttgtggacaaattgaagagcgcactgcccccgttggaaatgatcaatcggctgaaaaagtgcacggatgacgaaatgcagaggatgccagaaggggaacaggtgaacaaattggacactaaaacagcgatttttttgaaaaaactgtaattcgccaaaaatttcattctaaattttctttcctcgtcgtcagtttgtcgccaccctttcgtccatcagtggtttgccgctgcgtctggaggccatccatctcaaattgtgttggtccgaagcctttggagaacttaaatcgggcataacgacggtgaccgaggcgtgcgaagtcggcacaaatttcatttttatttatccaaaaaattttttaaggaattgctcaaatcccaagggctcaaacacttcatcaacttggtccttttggttggaaatttcatgggacgcacaaaaaactcaaaggacgccttcgcatttgaactaagcgtactcaacaaagtgcggttgttatatgtgtggcactttctcttatttttggatagtttctgttccaatttgagtttttgcttcatatttatccccattttgggtttattttctttcggttttttctaaattttaattccattctttagctggtcgacacgcgtgactgtgacaattccgaaacccttctccacggactcatccgtcttctgcaccggaaattcagcggaaaattcaccacttttgcactggacgactttcaccacgtttccaaggcgtgccgagtggacgtgtccgagttgagcaaaaacaaaattgaccaagtcaggaattccattgagaaggcatgtttttggattttatttattttttctttattttatttcattttctacttttaggtggccacgtatttaagcggctacaaaatgcaggcggaaaacgaccgatttaatgagagaatcggtgcatttgtcaaacaagcgaaggaagatttggtcactgttgacagtctatgggaaaatatgcagcgaaaatggagcgccgtccaagcgtatttgtgctttgacccgaaaaagtacgccatggaccgactgtttgcggacgtacacacattcaaggggcattaccaggtgatttgatgggattgttatgcatttttacattgccgggatccatgcctaatgaatttataaagttttactggaattactaaattagacaaagtttaaaaaattatttttttcgttataacattttgaatttttttattgttattctttatttttgaagttttttaaaataaaatttgatttaaaaaatagaaaagaaattagtttcaaaattttaatatatttattttttgaaaactcagcgacaaattaaaaaaaaattttaaaataaacgagagaaaagacggcttttctgggacatcttagtgcacacgacaaagtcattgaccgtttccacccttttcagaatgccagggcagaagtgttgaaggatcagctgaaaggggcggtcgacggaagagagggggcgaaagcgtcgtcgaggaaaccgttcaaaccgatccaaccgatcgcaagcgaagcggcgaagagagcgcaacagcggaacagcaccagcagccgcagggagttgctgttgtcgaacgaaggcggcggcggtggttcaacagcgacaacgcccgcccgaccacaggcaaccaaaattggtacaacgccaaacacggtgccatttggcgcgaaggatgctgccggcggcggcgacggaggcgtcattgacaaaattgagcagatgttggaggagggcatgtaccgaatcgagtgccaaaagaggcctttccgtgttcggcgaaggtgtggcgcgagtggttggcatacattaaaaaagggcgggagggtcgacagaaatttttgcaaaagctgngttgnggtgagatggctggccacctttttcgatttttcacctcaatttttaatgagaatttgtcagttttgggggccggagtgccgataggcgccgaaaattctgtaattttttanactgtttggtctttccagggacagccgactgtgtatgtgagcgttgctgacggcggtaataacgcgactccaacaacaacagcggcgggtgataatttaccattagctagcttgattcttttttatccaccactctanaccagatagtgtgaagaagccagtggtgaatgttgtcgttgctgaccaagaagagcgggatgatgatgccatgccaaaggtggggttatcaggcaaaattaaaggctgtagttgcactgggactttcggaaaataagaagaccaacgctgtacctctagaccaattttattgtttgaaatttttcaaaaatagccctagaaattttttaaagaaatttcaagaaaaaaaattttcaaaaatttttgtgctatttattgggaaattaaaaatagtatttatcaaaaacttttgaaaaaatcgttaaaattttttcaaatttttaagttggattttttattttctggggatggggcgggggggggaagttttaaggggaaccgcccattttggcgcaggtattttggtgcaacccaatttataacgtgcgcaaaaatggccgcgccaaaatacctgcgtcaaagtgaccccgacccgttttaagtgtacccgtccatgagccctcccgcttgtgctcatctattaaaaatcattccccattatttgtgccccagaaagctgtcgtgaacgagtacctgaatgtgcccagcagtgtggatttgttgctgcgtttgcggggattggacggcgattgatgaggcgcgcgcccctccccccaccggcggcctttctctttttgacttttgtgcctcccttttgcccgtgttctaatgtatttcttcctgctggctttctctcctcctctctttcacttttttgttttgttttgtgtgtgtcttacaatattttcctcattttctctgcccttccgtgggcttctcattttggcatatatttcccctggtttgatcttttttgtccttttcgccgatcggcagctttttcttccaaaataagcagaaatttgcttaggtttcattcattattaataattacggcgatcaatcatcattgtatttcccttccacgtcaatcatttcacttattacacatttcgactgtttgcctttctctcattccgtcaaatttcactctcttttttcgatatttaaagattacaatatttcattccgtcgttgccaccaaattttcccagaatttgtgatgattgtgattgatccatccaaagcaatgcttcgcttcaacaaatgtttgtttttgccaaacattttttctctccttttgattgtgtattgatgtgtcaccatttttatgtgccgccgacaaaattgccggacatttttactattttggtgtcgttttacgagtaatataaaacaatatggagcgaaaattcgtatggaaaaagaaacttgagttgcttttgtcacaatttcatctcttatcaaattttttgaacatgtatggacataccatatacaacagcagcaacaacaacaataggccaacatgaact

SEQ ID NO: 8122 - DNA, 1229 bp, Heterodera glycines
  unsure (1)..(1229): unsure at all n locations
gaaaaataatcattacgnttccaaaagataaggatatacaaaactcgtgaaatagaccttgaaaagggatataaattttccaaattaggcgataaatttatttcttcaattttgcgaaacgacntaaaatgcgacaaatttttgtttatttttcatacaattaacaaaaaaattatggtgtttttttcttgagaatttttcggtctttggggaatcataaaataattcagctggtgtaggccgttataatagacgtttttttgaaaaaataccaaaaaagtatatagaactccatcctaaaccctacgcttttcaggcctcacagttttcccctttaggcaaaaaaagtttttttttgacagctatttcgagagagattcggatgaggaggaagaggcgaggaaagtggaaaaaggggaagagagcggccgaagacacgcgaaaagcagcgacagaaacggcggcagacaaagacaggacggcaaaaagatcagaagggaggaagaaaaacaaacggcggaggaggaggaggaagaagaagaggacccgttggacgcgttcatgaacgaaatcaacgaagtggcggaccaggcgaaggaggagagtctgcgcaaagagagccacgcgctgaacacgggcgaatacgcgggcggacagatgggaagggacgacatcgaacaggaggacatgcacggtcagctgactgactgatcgaacagaacaccctcccgagaaaccgggaatgaaaaaacctttttgagggaaatttagaaaaattcgaagtatagctcctagtaggggcaggacataacgtcgccgccgaaacgtcgccgcaaattttttttataaaaaatgaaaaatttttagttgcctaacctaattcgaaaaaaaaattagtttaagaaacaaaaaaatcaagtttgttttctgggaattcagcaaaatattgttttcagtaaaacctaggtttccaaaaaagctttaaaaaattttaaacgaattttacggctggcgacgtttcggggtgtacctctcctagtcagcaccgaaaccccaatttcttttggattttcaagtttaatcccataacaaaaaactatctactattgaaaatgattattttaatttaaattaacaaaataacccccatgcgcatccgtttatttttgactgatttctaaatttttcagagtcaatgatgaggttggtcatatcattttcgcaacctt

SEQ ID NO: 8123 - DNA, 2518 bp, Heterodera glycines
taaaagtaaataacggaaattcgctaatgtttccttgtgaatttctttatcagtttaattgtagttttttgaaaagagatggctgtttaaataaatgttcaaaaaacaataaatattcatgtacggagccattcgtacaactcatttgtaataattaattaattaattattcgggactttatttatttcataagaataaaaattgtttgttgttcaaataattttccttttttcttacattttgcaatttctttgataatgaaaacaaatccaaattaaataaaattaattgttactacagaatatgttatacataattttaatttatgaaataaaaaaatatgaaattcaatattgatatttcaaattttaatttttgaaaataaaacttagcgaattttttgaatttttgcaggtagaaaacacttagtgctatttaatgatattaagaatacttaattttgttgattttatgaaaatcttcatcagaattttagtgatcaaaattatttgatttctaattaaaaaattttaaatataaattgtttaaaaaataaaaaataaattattttaattgtgttttcctaatcgtttttatagtctagtgttgtgctcactttgatagaaatttataggttgaaatttttaaattaaatcagtctataagtttagaaatggcaccaattggcgatcggcgccaaaactcggtaataaatagaatataaacataagcactgggactcgaacccatgacacacatagcagaaaaggctgacacactaaccaattgaccaccgggtcgcttgtctccatcccatttatggtaattcccttttccctttctttattttttggaaaaaatcccgaccaaaagtgcttgaaatccctttttagagctcttcccggacccggaccaaaacaaccctggtatcattcgaaagccaagagtttgtagatgtgcataaacatatttgttttttgaattgacccgttttaagacatgcaaaaagcgttcaaaaattggtcatcaaaaaaagtgcaatttttgcctcgtttttcgaacgcagttcgaacaattcttaaccaataggaatgtgcttattttccctaatagcccttgaaaaactgcgtcgatagacaccactcgcgccccgcaaactcgctagaaagtgttaaattagtttttaaatgagttagaggggtagattcttcttatatagtgaaaaatattagacaattttttgcacaaattgttttgcagaatgaatcattttttgaagttaaacggatgaattaatggcatttattaaaacaaaattaaacaaaactttacacaatattatgcacaaattgacaattgttttgttggtctttctgagtgccaaatcacttccgtccccacaaattgtcgaaaagagtgccgcgattgttggccatcgaaattgggtcggcgtaataccattggggacgagcattggccggtgaagaaaggtgcagcaaagtgagcagaagcagcagcaaaacgatgggggaaaattggacggaaatcattttgtagaaaataaaataattaattaattaattatttgtgggaatttaaatgaatttgttgctgtttttgttgctgatgatgatttgaatttgagtttgaatttgtcactttgacctgcccttttatagggtgcgcaattggaaaggcacaaaacacagaagagacacaaaaataaaggcggggaggaagaaaagattaaattaaattttatattttgtgcttttcgctgcatttccaaattcgttttggtgcctttggttataattggaacacaaattctgtctaattcatttttgtgttctaacaaaccaaattaagtaaattgagctaattagatgaaaaatgagacaattaaaacgaataaaatcttcatcaaatccgactattgaaaattattcagaagtacagtgttgtacgggaccgggacctggtactgaaaaacacgggtaataaatccgttccctggttctaacaaatcacataattttcttcttaatttcttttgtactttagagcaagaaaatttataagcaaatgaagtaaatagagctaattgagctgaaaaaatgaggtaaaacgaataaaaatggtataaaacccaaagtgaaccgagcgattgttttcactaatgtcagaagaaatgattagggaaacggatttcatacagaaaaaccgacaaaaaaacacctaaaaaaggtacaaaaaatcacaaaataaaaacgcaaaaaaatggacaaattgaaaagaggaggtcaaaatttcacgagcttagaattctattcaaaaaatcttgggctgtgtgtgcattgtggtcccgaatcacttttttttttttaaaaattatttgagctcagaatcagtgtgatgatttacaggtttaaaaagtctgcgtaaaagtccacaaaatccaaatgattacctaaatatgtatttaaatgaaagaaggcaacaaataaatgcgaaaag

SEQ ID NO: 8124 - DNA, 4109 bp, Heterodera glycines
tcacttccgtccccacaaattgtcgaaaagagtgccacgattgttggccatcgaaattgggtcggcgtaataccattggggacgagcattggccggtgaagaaaggtgcagcaaagtgagcagaagcagcagcaaaacgatgggggaaaattggacggaaatcattttgtagaaaataaaataattaattaattaattatttgtgggaatttaaatgaatttgttgctgtttttgttgctgatgatgatttgaatttgagtttgaatttgtcactttgacctgtccttttatagggtgcgcaattggaaaagcacaaaacacagaagagacacaaaaataaaggcggggaggaagaaaaaattaaattaaattttatattttgtgcctttcgctgtatttccaaattcgtttttgtgcctttggttataattggaacacaaattctgtctaattcatttttgtgttctaacaaaccaaattaagtaaattgagctaattagatgaaaaatgagacaattaaaacgaataaaatcttcatcaaatccgactattgaaaattattcagaagtacagtgttgtacgggaccgggacctggtactgaaaaacacggacaactgattacctaagtcccggttttgaccagtttagaacgggaccgggaaaatttccggttttcccagccaaaaagtcccggtttttcaacccaaaaagtcccgttcctgtacaactctattcaaaattgaaccgagcgattgctgttgttttcactaattgagatgaaaaaatgaggtaattaaaacgaataaaaatggtataaaacccaaccgcgaattatttctataactttaggtcttctgaaaatttcagtttttaccttcaagttggaaaagtgatagaatagaagggtcagcgaggagggtgtgaccatgggacaaagtaaaaaactactaattacatgaaaattgttttttgaatttccaattttagattaaatttaaaagaatagagactgggggattatgatagagggattatttttcaaaacacctcgtagactgggggataattggagactgcgggataatagagactggtctataattagagcatatacggtagataaattcggcattttttacttcagataatttgcaaattcatttgttctttttgacaactaaggattagaaaatttatttgtgctcagcaacttcgattttcagtgttccgcgatgaatttaattgaatttttaataagtttatttcattttcaacatgagaagtttagtgcgtgaccggaaaatgcgtcagtgacacaaatattctaaattaaagttctgtagcattaagtattgtagtataaaagtaaaattctataagaagatcgttctgaattccaaaccctggacccgaattcgaacaaaaatcgataagtcaaaattttcgaaattcgtttttcattttaaaaatcggtttaaatacacggaaacaaactaaagccatcaatccttcaataagagatcatttatgccgtttttgaatcaaaaataataaattcgaaaaatttgggctttcgactttttgttcttgttcgggtccggggttcgaaattagcagaaatgaataccggactcgtgatcagggacatcgaaaatacaacgaacatgtttttatgaaattaaaatttttactgaagcattttctactgatacattttctactgacgtattttccactgatgcattttctgggcaccgtttagtgtgtgtctaaagatagaattcggatcacttaggaaccctaaaactcattcgaattttggtgattatcctatgtagaagcatttaaactcattttgctattttatgttaatatttgggaaaccctaaattagacccattttccgggtttttatgagtttttttgagtttttgacatttcgtgattttttactcttttgaacattccgtggcttggagacactttttgggggcgccagttcaaaagttatagacagtaaagacaccgttttatatttgaatgcactgcattttgttttttgcgctaacaatttattggcgcttttttttcgttttttacaatccgtgcgcctgcggtttacctcagttcggctctcacggtttggccccagcatgtttttacttattttttctgcggttttaactcgacgagaaatgcacgaaaaacaattttttttgttcgaaaaactttttaacgcccctattcgaccctaggaatccctattttgagtgtttgcccctaaaataattttttttatccctattttggcgtttcgctcctatttagcgattttaaaaattttcatataaaattcacaaattctttaacaaaaatgcaatggaaaaaaaaaattgttttgacgcgatcactttttttgtcaaaaattttcaaaaaattttccactaattttttttgaccaaaatttctgtaatttattttctttcttgtcaaaattttgaagttttatttattttagaaaaatgtattcaaaaatttcgcataaaaataattatttgtaactgtaatcaaatgaataaaatcttagtatttacatagaaaatgaggatgaaaaacaaccccccgcttagtttttgtgccaattttttcaaaaaattgtccttatttaaggctaaattgtatttttaaatggcaccgcctgccgaaaaaaagaaaaagcattcctccgccgaccaccgcctcattatttctgcatcaattggtggaaagaagcaacagcaaacgttgggctcagttattacatcatttggaaaacgacgaagtctccgcgtggccatgaaagagaattgccgaattttgaggaaaatgtgagcgccgtttcattttcaacttctattggcaaatgaaaagctttctttttgcatttcagttgggtgtgcaacgacatttggatggacattttccctcattttgatcgtcctcaactcggcctcaaaatggctctgctttcgccacgtttcaatgcgttggtggacaaacatttcgatggcataagccaattgacaatttggaacgcaataacaattcacaggatcggaacaaaagcgaaattggttgtagaggagaacaatgccaaatttccactgcccgaccatccgctgcgcaacaaaattcgctttaattaccttcgaatcgagtaaatcaaacaaaattcaaaaaagaattattaattgataaaagcatttgctgctttcaggtacattgactattccgtcatcacatttcttcgtgccaatcagcaaatttttgacaaaggcaccgatttgaatttgtttatgccgtactacgaccatgatgacaagaatgtccagccaatttgggatgattttgcccgtgcaatttggcccatttttgcaccaaacattcgccatttgtccttttccgatgcccatgcttttggcaatttgcgtcgccacatttcgccaacaattctcactgatctcaatcagttgaattcaatcgattccgattatttgttgcccgatgtgattggtgatgatgggccaaatgcaactgctggtcaagcgctgtccaaatggttgcaaattctgggaaaagatggaaagccaaagcaattgagttgtagcaattattatcatgcagctatgcctactatcaatgaatggatcgtcaatttcaaagaggtcaaaaagggactaatcacttttaattggcctttgttttttggtttccaattaaaatatttgcattaattgccatttgatttcggtttcgaaatgtttaggcatttcttcgtgccaccacatcatcggccagctacataattcgacttgatgcttttggaaaaatgcaaattgggccatttgaattgatgaacgaacggaccaacgaagtgctaacattggagaaagaagaaaacgatgatgaaaatatagaggaatatgacgaagatgatgaatgggacgagcgatgggtaattaagcgatgccaaattgggcaagcggcgacgattcaatggaaggaaaaaaagatgaacaatttgaacagtgtcaactttcgtctttgtaaatttgggtgagtggcaac

SEQ ID NO: 8125 - DNA, 4787 bp, Heterodera glycines
  unsure (1)..(4787): unsure at all n locations
ctgcgcaaagatcgtctgacactgaacagtcatagcactgacgcgaagtntcagctggggaaggcattcgcgaatgtgatgctaaagggaagaagaacaaagcaatgacagccttttcaatttgaaaaacacaccattaacagtctgttcagtgtctttgccaaataatggatgccgttgattgaggccagcgttgggtattttttgtgcaagaatttcacctcatctctcagacattcttcgattgattttttcgctattatgtcagcctgggatctattgacactaaaacaaagcttatttaaaaattgaaaaatagctttttacattccgattattccaagtctgacaggcaccaatttgccagtgagtacttccatcgcgtcggttccgtggtccattaagtccaatttcgtaagcaccacaagagtacgatttccttaaattaacttacttctaataaataaagatgggtttgctcaccttccctgtccacttccctggccaacttgagtggttcagatgtcgcgaaatcctggttagctggagtcaccgcaagaataagcgaatttggattgcgtatgtaattgaggatcatttcacgaatcaaggtctaaaaattagattaaatcgtagagcgagttcaaaacttcaatgtctggtggttggtctccaacgggcacttttgtgatgcccggcaaatcgatcagcgacaaattcaccgcccgagaagaataaattgtcaatgtgatgggtgccggagaaatgcccttgttggacccggtcacacgctccgtctccttctcaatctcctcacgaacttgctgaaattcgaataatttgttacaaaatctgttgctattgtgagtgcctggaagtcagcataaacttcgtttggctgatgtccaaacaaagcccagtcttcgtgggtaggcgcttaattttgtatagaataagccacgaaaaccttaaatatgtttatgaaacctcctttttgcacacgtaaaggatcggcgacaggacaaaagtgaagatgaagcacaagcggacgacgagtcacaatgccaattccgcgaggcaagaaatccctgccgacaattccttcgagaaccgaacttttgccggcactctgtcaaacgtatcaatttagacgcattcattatttgagtaattctcaatgaaattaatcaaaaatctatcaataaacctgtgaaccgacgacgactatctgtggcaattggacttccgattctttgtatccagttgtagcaaaaacatctaaaattttgagttatttaataatgtatcatttgggacaccttgaagtttattaatgatcggtattagagattccatacgtaatggcacgtgaagtcaaaagatcaaaaatatatgtttacaatgcaatgccttaacctgtcaataaaaataggtacttcaaataaaaatttacaaaatgaaacaagaaagcaacgtagacaaaaaaaagcatcgtctttttttagcttggctgttttttaactttggcgattgcgttggcatttgccaaatcattttttggcataaaatttataaaaataaaactaggtaattaatttttttcctaaaaataaggaaaaggaataggtacctagttaggtaagtgattttttttttttttgtatattcttgcttgttttttttttgccctttcaattcccgaccgagttgtggtctttctgtccgttagccgtcgccttcgctcgcattccttgactttcttctgctcttttcctaatttttatgtcgctttctctgatgcccaaaaagtcaaaagtgaatctttcgttcttttgttaagcattgcattgccaagtgccgctgtctcattcatttgactttaattcgattctcttttgctttggaattcgctgaattttgctgtgtattcatttttatgtgcgctttctgcgtcagttttatttttggctttactcttcgttttatcttttaactgcacttttgcctttatttaactcaagattatgttgtttctttcttttccatattccctaaatattcccttttccaatttcttcgtttaggattattatttgggaaacttcaaatggatactaaaggtttttctacgagtgcttcttcttcgatgtgcacaaatgatgacgacatcactgacagtgaccagcaaatgcattcggtgcataatccggcggaatttttgaaaatgaaaccgaaaaagtcaatcctaaaagccaaacaaacttcgattgacgatttgcacagagcggtagaagaaatgcgcgaataccgtggccaaagcgaagaggtccaaaaggcgcattttgacgaggtcattttggcaaggctcaaaaaggaataatttcctccccatcattttataattacttaatttttttttattttagatgaatattcttgcgacgcatcatccgcccgataaggactacggacacatgaaggtgaaatgaagtttaactattttatcgaactttgtcttaaatttaagatcgatgagccaaagactcctttcaacaattacagcgacagtgagggcgaagaactcacttccggtggtggaacttctcgaccgcgaagggtgtcgctggttggtgcggtggatgcggacgaattgcgtaaaactatttcggggggcacgcggagccaaatgaaagtgttggacccgccgggttcgggcgaagacgacgaggacagcgaaagtgggatgaccgaagagcaaatcggtgagtgtaatttgagcactggacgagaaaaataaaagcagaattcagtagctatgagttaattactaaatgaattccagtaaaaaagcgtgaattcgaaaagaagcgcaagacgcactacaacgaaggcgcctttctaaagaaaatgcgggagagagcagcgaaggaagaggaggaggaagacgaacagtgatggagaggaaaggacggaagatggagaagacggattgatatacttattggagtagcccagaagagaggggacttaactcaaaccattgaagcaaataaacaataatgtttggattggacggtaaaaatgcatccgattaactaaaattatttcagattacttaaaattagagaccggttctgccgttttttaccgttccatatatgtgacatattttttcaaataatccgttaaaagaatgctattttttccttgtgaatttatttaccaatgcttacaattagttacgccccaattagatttaaaggccccttggttacaaaacaattaattaccgttaccttttttattaatgcaattgcgtaataagcaaccataaagaaatatgtgcaattttttattatcttttaaaattcacatacaataagtgggatttgttttatcccttcaaatgttatgtcggatttcacaaaaacggtacaattgttttctgtaatgttccatccgctcaccctccaccaattgtgcagaaactgacgaagctttaggaatcgaacctaaaaacatggcgatgtttttcgcaatttctgggccttcgaactccaaagtgatcatttttccttaatttacaatttcatttcccttgttattcctgggtagcaggtcgttttcccacactgaatttttaatattaagttttcttcaaaacaaaaaaattttccttgagaaaataaaaaaaaactacaaaagttaatttaaactccatcaaaaattttaaaataattttattatttacgaaaattgggagaagaaattgtactcccctccacttaaggcatttttttgccatataaattccttttgaaaacctactatttgtcatgtgctttttcttttgctgcttgttttggcacaacaacacttcccactctcccgccctcaggtcgatgtcctgcatcgccacgagtcttcccaggccacgcaaatcaatggccatttgtacggattcggcataaaaacggaggccggggttgaagccgtccacgggttgtaacagaaccaagacattgttgtcctaaaaagacaaattcctttttttcattgagtgtttctgtttcaccattaccttctcattgtcagttgtttgacagttttcgtctttttcctccacaaaaagtggcgaattatttgcatttccaatgcacaatttccaccggtcgaccaacggcgaatgggcgacaaaatcgttgaggcgttcggccaatgggaaattgtgaatggcggcggattggaaaacgacgccgtggggggacaaatggcatttgccagtctcaggggtgaaattgtgcacctaaaacaattataattttataaaaatgattgctttcgcttggatttggtcactttgctccaatggttcacaaatggactgagtccggccgaatgcatttgggcttaaaaatgcgggcgaacaatggccaaatgccaacaaatttgacatacgcaacagctccgaatagttcaacaacagtggacaaatggtcacgtccgtttcttcaatggttggcgacgtggcgcagaacaaatgggcaacgagttggcgacagtcgcgggtccgaaactgttggcaaacagccaaaatgagaatgctggaacagtcgcgcaagaaaatgctataaaatccatttagggctccttttttcggcattcgatggatacctcccctggcaagggcccgccaaaatcacacagtcccgcgagtcgtccacccgtcagagaggcggtccgatccatcagcaaaatcagcgagtcccttggcattataaaggcgg

SEQ ID NO: 8126 - DNA, 871 bp, Heterodera glycines
ccgcatttgttaccctagaaaaagtttaaaggaaatttttatctcttttttccgtcgggacaccaattccgaaggattaccctaaatctggccttacttttgctcagttttgaacaccgaacccgtattcgaacttttttcggaattaaaattctttttttttggtaaataattgcttattgtgaggcattgattgatttgtagcaacaattgagtaaacagtaaggattcagatgtgaatttatttacatataagttctcttattgttagattcttccaaaagcacattgtttgttgactctgcgtcatctgttttcaacgacattattgcaaccggtacttttctgttttgtgaccccccctgaaattttcaaataaaaagtcatttctagggtaatttggggcgctgatcacgaatatggcatttatttttcaaaattccgaatcccgaattcgaacataaatttgaaattcataaattacaaggaaaacatatttttatgggttttcgaggtcgctgaatacgtactgggcctatgcctaagcctaagctgaagcctaagcctaggcctaagcaagctgaagcctaagctgaagcctaagcctaagctgaagcctaagcctaggcctaggcaagctgaagcctaagcctaagctgaagcctaagcctaagctgaagcctaagcctaggcctaggcaagctgaagcctaagctgaaccctaagcctaagctgaagcctaagcctaagctgaagcctaagcctaggcctaggcaagctgaagcctaagctgaagcctaagcctatatacatgccaccaaattatctgcaaattttattacgcatttctcggcagtttggccaatatttt

SEQ ID NO: 8127 - DNA, 3740 bp, Heterodera glycines
  unsure (1)..(3740): unsure at all n locations
ttttcgagcgaaggaaccgcgggcgttggccccgggaaaataaactgcgattcgacgaacactgtttgttttgtaatacgttatgaatattattttttgggcgactaaaagaaagtattttttcaatttgtttattttatttttcaagattccgagacgacgtggtgggacttatgatcgaatacgcgcacagcttgccgaacaggcgtacaaacaccagatgcaggacaaagtatggtcaattagtagaatcgccttaaacaagatgtcaaaagatattcctaaataaaattctttttattttaagcgttttcaatctttttggcgtagtgcgacatttgcggaccgacatttgcggaccactatttctgggttgaactgtcaaaaaaaaaaaaaaataataattttttcaaaaattgagtgactaagtagttttatttgtgatttttaccaagttgaacatcgcccttcaagagtaattgatcaactttctgcaatcaatatcgaaagaacccattttttaaagaagtttagtttccatagataaatatagtatgtagttgctcatttttaattttggacccatagttttaataacagcaaattacggacaattttgagaaaaagataaactattttagtttttgtttgttaatttaattggtttgacatgccggaaaaaattaagctctcggttaactaaagcgtggaagtgaaacaagataaaaaattttcttggtataaaattcttgaactgacttttatatttaatttagctaattttttcgccaatttcacagtttaattataagttagaaattctataaaaaagaaagaaaaaagttatgtcaaataagacttctctccaattgagacagatcgctttgcatcagcttaccttcactaatttcaatttgggaatattgaatttattaaaatttcttattatttttttctttatttagacagttctatcgagaaatagtggtccgcaaatgtcggtccgcaaatgtcggtccgcaaatgtcggtccgcaaatgtcggctaaccaataaaataggtgaatgaaaatattttcatatcctctttataccacggcagagtctcatcagttcacaacctcacaaaagccagcagcagttggctattggtcaataaaaaataggggtttttgaaaaaaatattttttttttcaatattttgaagttttgtcaataaatattataaatattttgtaaatattaccaatcttttataaatattttttttcattagggctggaaatattaattatatatgtatgaaaaaaaagcaaaaaaaaaaaaaaattacgaaatatgtaaaaatatctacaaaaactgttgtacaaaaatagttaaataaaaaatcgtttatgttttttgacaaaaaattcttcaaaagcctaaataaataggagaaaagaacacaaattatatattaaaataaatttcggtttattggcatttaagaaaattccttanaaatattanattgcgatttttcaaggaaaaatgggcaaattttcttatcatattccattaaacctaccaaaaataggaaattttatgaatataattatggtgccgggtcgttactcaaaaactatcaaacttattgacattttttatttcataggggtatattttctgaaaattgttgggatcgattcttaggcgtgtatttagtttgcgttcttaggctgttccaatattgcttcataaaatgcatctgtctgctgtacttcaacgcaaaaggcggtcccgtgtcaagttccaatgattcttttggcctatgttacctttttttaatcttaattatcttaagaaaaatcaaaaatatgtaaggctatacaatatagggattaaaaaacaaatatgaagacaaggccttggattaggagcgaagcaaaaagttgagtgaatgcaaatcatgacaagatcatgttctatccgggctctaatagaaatctattttttaaaataatttttaagataaataaaaattataaaaattcgcgaaataaatttttttcctaaaaatgtaaaaagaaaataaatgttatttatcgtgaaaaaaagaataaatgaaaagatattttatctcctcaatgttttttaatcctcatttaattcttcttcaaattgtttcttccaattgaaaatggtccattgactaattttcaatatttttgaaatttttgagtcactcatttttggattttctcctttcatttgccaatacattttcattttctccattttttctttctcatttattctttcacccattccaaattgtttcttccatctcttaattaaatcatggccaactccaattttcttacaaatttctgcataatttttgtcccattcttttgtcgaatattttcttccattttgtttatactcatttttcattgcattaaatttttgcacaatttcaattttttgtacatccgtttttgatttgttgtggcctttgtatattcctaattctttgatccatttgtaaattttgtttcgatttgtgcccaatttttttccgattttcaattcaattttatgccattcttttgttgaatattttctctctttttgcttaattttctctttaattttgttgaatttttgaacaatttctctctttttctgttcattttctttttcttcccatttttctccaaatatttcttcaaatgttttttgttccaattttttcttttccgctccaatttcaatttgagcaattaaaaatacaattgaaaagaataataaacagagtttcattgctgacaattttttaataaaaattataatttaatttaatttaacataaatgtataaataataatttaatattttttacaaatgattttatcgcttataaattctccattttagcaaattttttacatgtttattatattcatcaaatcataaatattggataatttctctttaataatattaaaataataataataaatgcaaataatacagatatgatgaaataaaattctaattctatttttcgcaaaattcaactattttaagtgtttttacattttttatcttttgaacaggcgtaagcaaaattcaaataatgttttttttttcattttaaggaaggaattatggaaaatgaaatcgaatttgaaactttgagctcattagaagataaatgtgattggaagggaaaacttaagttgccaccaccgtggatcgataggccgggtgtacggccttaactagggttgcaaccccgacgtcggggttggaaaattcggggttcggggttgtcggggttggaagtgtcggggttcggggtcggggttgccaaatcgttcggggtcggggtcgggggtttttcaatttttgccttatgccaaatagtcaaaaattttttaatattttttcggaaataatatttattaatttccataatatatttggtattgtttttatatttttttatttcttttttatcagaaattttgtatagaaanttttttttttcttgaaattttaaaattttttatttacctttttgttttccaaaacatcttttttcacgtcgctcttttctaaagacttaaggagaaagggaacaggggtctccggcggtgccgataggcgccgccgggaaaattttgaaaatttggttagatctgttaacagattttgtccaaaatatgctaaatttttgcgattttgagccaa

SEQ ID NO: 8128 - DNA, 3153 bp, Heterodera glycines
attttctttttcttcccatttttccccaaatatttcttcaaatgttttttgttccaattttttcttttccgctacaatttcaattgagcaattaaaaaggcaattgcaaagattaatgggaataatttcattgttgacaatttttctttttcttaaaaattaaaaattaaaatttataatttattcgatatgaaattaaaataaaaaataataaaattcctcaataaattactaaattcgaataactgatttttgcgcaaaattttccttattcatctatttttctttctttttttctgcaaaattataaaaaagttctggaaaaaaatgagagtcagaatttatttttgggacaactgtcagtataagcctttgtacagattcaacattcacttcaatagggaactattggggaaattgcattcatatcaaggctgcacgcaattacggattacggattgcggattgcggattacggaaattacggggttttgggagttacggactacggattacgggttacggatttttgggatttttccgtaattttgatccgtaatttgacttttggattattttttcgagacgatttcttgtaagattatttttataaaaaacaaatttttctattttttatttaaagaaaatatgttcatttctttaaattcttatttctttagcaatttaaaaatgtcaaacttaaatcctggtaattggtggtattattttgagcgtcaaggcaaatcaactgctaaatgtaaagccgatggatgttcctactcaaagacattaaatgcttctctcagtacaacagtgcttgcttctcatctcaaaaatcaccacccacaactttacaaacagcgtgaagattgttcaagcagagaagcaaaaaacagaaaagaagggacaaagtggaataaacccattaaaaagggcttttgcaaatgcattttatggttcaagtcaacaaattactgatgacgaagaaaaggaagcgccgatttcatcaaaatcacctattttaattgggctaaatgcaaaaagtatgatctgattttttttctatgcgttattacattttgattaaggccagtggagcacggacggagacgcaacaattggcgcaaatcgggcactaatggaaatgctggttactcaattactgccatttaatctcgttgacggtgttggatttcgacaattcgttggaaaattacagccaaaatacaaaattcctcggcgcaatcatttcgctcaatatgaattgccaaattgttttgaagcgatgaaagtaataatcaaatttgcgctttcataattctaaaatttagaaaatagtcactgatgaatttctgtcagttaacaaaatcgctttgactgctgatgggtggacttcaaaggataatcgccattctttgatttcagttactgggcattttttggaccaaaaattcaagccaaaattttttgttttgagcaccaaaccaataaaaagtttttaatatagtcagagtttgaacattttatttttcagggcgacacacagctgaatcaattgtgtcatttattagagaagcattaaatgattttcaaattcaagagcagaaaatttcggctttgacgcgcgatacagaaaatacgatgaaaaaggttggaaaggacttgggttttgtgtcagtggattgcgcagcgcatgttttgcaattggtgataaaataatttaattaaatattaaaaacaagaattttagtgcattaaagagggactgaggtcaattgaagaggaagaacgtttaaaaaatctttttgaaaatgtcaaaagatttgtaagaaaggtgcgaaaatcaagagtgttgacggaacaactcgctgaactccaacaaaaggaggaaattgaggaagtaccaccaacagttttgattaaaaatgtcgaggtgcttttcttctatatttaactattcttataaaggaaattaatttcaggtgcgctggaatagttcatacaaaatgattgaacgttttatcaatttgctgtcaattgaacattaccagcttccaaaatttaacgctgatgattggttgcttttgtcatctattaaaagcatactttcaccaatttacgaggccactgttcttttacaaaatagaaattcctcttgttcaattataattccgctttttaaagtcagtattaattttctccccaatttattttaaaattcaggcaatttcattcggtttacgtgagaacaaggacaatcgttattcaaatataaagaaaacaattgcgaatgccatcgaattgcggcttaaacaagccgaagaacaaaaaaacctagttcttgcaactattttggacccacgttttaagaccatttaccttgacagcagtcggctgaatcagtacaaagactggttgataagtgaagttgagagttaccatgcaaagactgatgtgattttattttttctatttttgtaacttaatttttttaggaaattgatttacaaattgacgtaagagactgcagtggttcaagttcggctggggatattttttctcgttttgaaaaggacgcagaatttgagcaaaaatgaatactgtaaataaactttatatacccctcataataattaatttaaggcaacatcccccagtccatctgccttggagacaagacaaaaagccgaagttgaagtaaatgaatatttgcgggatccaaaaatcaaatccagggccgatccatcattatactgggaagtcaattcacaaaaatggccaatgattggtgacgttgtacggaaatttctttctccacctgcaacaagttcagaaattgagaggcttttctcaacggccggtctaatttcagatgacttgcgaaagagtttattaccagaaaatattgcaaaacttttgtttcttcatcacaatttgcttgtaaccggtttctcaattgaatgatatttgaatgatttttgttttaatgcgactaaaaatttttttaaattacggattgcggattacgggaaattacggggtttttggacccccgtaattacggattacggatttccgtaactgagaaattcgccgcaattacggattacggatttccgtaattgcaaacccagttgcgtgcagccctgattc

SEQ ID NO: 8129 - DNA, 2891 bp, Heterodera glycines
  unsure (1)..(2891): unsure at all n locations
tttaaatagtaaaaaataataattaaaaaaanaattttttctaatgcaaaatttattntaacattgcatttttcgctgattaatctctcccacaaaatcagtgtgcgtcgccacattgaatcaatcaatgattagaacgagcatttctgtgaagcttacctttccaataagccctttaattctacaaaatatattcatttttaaaaattaaatttttatatttatgctaatttttaatttaatgccaaattttgaattaaatttttatattttatactaatacagtaaacttccaatcgtttctacaacaaattgcccaaatgggcatttcccagttgctccttcaattgcgacaacgttgtctgccctattattcatactctaaaagtgatcaaaagaatcatcatcatcattttgcactcggtggtggcttgttgctgcttttactgcttgccatcggcacttttgaaagcccagtgccattggtggcggtgccatcggcaacgaccctaatcattggcacaatggtcaccttgtttttggcttcccaagccgatttcatctaccggtcatggctgaccttggaacgggatttgacgtatggaaaaagcatttgggctttatttaaaattcgcaaaactcatttttcgaaaatcggtaaacactgatttgaatggttgtgaccggaaatgatcagtgcaaaatgcgttagtgaatcataatttcttgaaaatgagatactgagtagtatgatgatttaaaatttaagcgtaaatcatctgggaaaaagcttaaacaataatccaactacagtatattcagtttttccggatttggctttttcaaaattttattaaaatttttggacatttgaaaaaattaaacgaagaaattcagaacaagctttttatataattttaaccttttttttactacaatagctaatgctacagaactcactgaagcattttccgggagcccaaattgaccttaaacgaaccacagaatgtgatacatgatccgatcttaattttctgaaaataataaatttaaaaaatgtttaaattattcagcggcctttttcttctgatcaaaattcgacttgacatgaggcgacggatgcgagagaacaaaggcatacaacagatctttgttgatgtggtaaatgccgttttcaactggcacattatgttttctaacaaaaaactagctatgggaatttgaaaagatattcttggcattgttgaatattttcaagggcacatccgttaatggatttttactttataataattgggactgtaaattatatattaaaaaaaaatcgcaaaaatagcatataaaaattatataacttaaaataattttttagctatttaaaattgatataccattatcaaaaaatcaatttttgggggtacatttttcaaaaaaaaaaaaattctttagaatttttaattttcagccctaataataaatcatgaattccctttaggtcaatgcaaacccgaatggaatatgtgccatcgatatggtctgagacacattaactaaattgtttatcccaaatttttaatcttcttttttaaattaagacatccaataaacagtacacattccgcgaatttaatgcacttgccaatcgttttgccaacacttttttacaaaatggttaccgcagtggcgatgttgtggcacttttcatggaaaatagtgccgaatttgtagctggtcagtctattattattgtagaattcaattaattgttggaatataattaatttagcatggattgggttggccaaaattggtgtcgtaacggcatggatcaactccaacttgcgcatggactcattagtgcagttaattattttttgcaaacaattaaataattttatttattttttaaatttatttatttctaaacgtaaaattgtttaatttttcagctgtcttcgcgtttctgaatgtaaagcagttttatgttctgacatacttaagccaagtaatcgtttataaaatagttgacataattcaaatttaaaaattaaatttcaaaaatagcattggaagctgctgccaaacaaaatgatgccacatttatggacgcattgtgcgtctacggtttaagcgacgcactgaacgccacacaaagtgacgtcaccgaaatggaaaaggagcccaaagtgcaacatgaagcggtgcccgactttcgttcaattctatgcttcatcttcacaagtggcaccacggggatgccaaagccggctcgcatcaaacaccttcggtgagattctccgctaatttggcactttgaccgagactcaaaatcttagacatgggcccaaacccaaaaagccttcgctttttttgtctgtaaataatcacatcaattaagctattattcgatggcaattggcattgcccaatcatttgacatccgtgccgatgaccgcctgtacatcacaatgccgttgtatcacactgctgccggcatcattggcgttggacaaatgttgttgcgcgggtgcagctgtgtgatccggtcacgcttctcggcaagcaatttttggcgcgattgtatacagtatgagtgtacggtaagtggtggctcattgattaatacgatatttaacaatttttctaacataataatgtggtgccaggtgccaactactgtaatacaatgtataattgcatacagacaagccagtacattggcgaaatttgccgctatctgttggcacagccggcacgcgaagcggaacagcgacaccgcgtgcgtctgatgttcggcaatggatacgcgctgaaatttggcgtgaatttgtggaccgtttcaaagtgcgcgttggcgaagtgtacggctccactgaagggacctcaaattt

SEQ ID NO: 8130 - DNA, 1434 bp, Heterodera glycines
cccccccccccccccgaaatcagaattttttgaaaaaaaatttattttttttttaaatattatattaatttttttgtaaaaataacaaacgagtttatgaaatgaaaaaaaacagatcatttacaattgaacgcgtctaatgcaatcaattcaatttttaaaaaaacacgaaaatacacccctaaatattgaggtttacaaaaacgaaaaaatacacccctaagaaccgactttttgagttgccccccccccccgaaacgaaggtcctggctacgcccttgcaacctggttccattaaaaaggtaaaactaaaacaccaatcattgataattgaattttttctgtagaggagtaagagtgattttttaattgaattatttttttattaaaaaaacaatatttcctagtgaattcaatttgtcgaattcaggtcaaacgggggcgatgctttccacaattcggccaaacaatccattgttggtgtttgacggttatttgaaccaagaggagacaagtgcgtttttgattctaatctatgtaaaggatttttattattgtaaccatttttaaatctgatcagagattctgatcagattaattcgattaattctttggtacaataattaatctataatttttttaaaaatttgttgaaaaaaatatttgttttccagaaaaaaaagttgttcaaaatgtgttccgccatggggacagtgcctttttaactggtacaaaaaataaataattatttaaaaataaatatttttttaatttgaggtgacattcttcactgggaccgtcttggttatttgtattttcgaattcgaactggtgacacgttccgattcaagggtgaaaatgttagcactgctgaggcatgttttcaaatttatttatattttaattaaataaatttatttaattacctaattggataaattcaaattttatttttaaattacactcttaaggttgaagctgtccttctcccgttgaaatgtatcatcgacgcggttgtatacggtgtacgtgtacttgagcttgatggaagcgtcggcatggcagcattggtcaaaaacgacgaggcaggaacggacgatgtaagactgagcagacctgggacattaaaaaatttttttttggaatttagggattaaatggtttagcaaaaaaaaaataatggatttagctcaattaaaaaataagtgcccaacaaattttatttttaaagaaatttcttcgagagttgagtgcccgtcttcatgccaaccttcccgcatatgccattccacgattcattcgtatttgcaatgctgttgatagaactggtcattgttttcaaatttaaaattatggaaatcgcaactagcataaattaattaatttgaaaatcttaattaaaccaaatccaagaagttttagcaacattcaaat

SEQ ID NO: 8131 - DNA, 843 bp, Heterodera glycines
  unsure (1)..(843): unsure at all n locations
ctgaaaatttctttttactcactgtgtgtaaaatttttattttcgcttatggtgtcacaattttgtccaccttttttttgcgcacataaataatattaaatatgacttttttgtgttcatccctatttaaattcccgctcaattttgctcccccattatttgcttgccgcacatttgtcccctccctgacaagcttagagcagaaatcacccgctagcccacccttagttctgtaaggcaggcgacggggggggggagggattaacgcggatttttggagattaaccgcgccggaaggtccgtcgtccatccctcgccccagcagcagcatcggggcaatgcaaaaagccccacacattgccgcggccccgccggtggttcaccgaagatggatgatcgtcgttcgtcaccgtcaaagcggggggggggggggaaaggtcaccaaagcatttccgttgctgtgccgccgcttttgtgcgcttgctgctgtcccatcttatcgtctcgtccgtcctccattccggtcatttttgtaccaacccccggggggggggcggagggaatcactcgctcttgaaaccgtacatattttctttctactgaatggacgttttattcgttagggatgttccgggtcaagaattgaagaacgggttttgggtttctgatcggtcggtcgaaaatagcttgtccaatgttctgaatatcgaataaaaaatgtttcgtattagttcaaatttgggttcgagattaaacaccgtaatttttgaataaattataaatttttaacatttaaatttaaaattaaggcgcagctgaaataaacatttccanaaaatttat

SEQ ID NO: 8132 - DNA, 4576 bp, Heterodera glycines
  unsure (1)..(4576): unsure at all n locations
tttntggaaaaggaaattcnttacgccaaaaaaattatatgcgcacaaattcaaaatgatcagtaatttcctttttgtttttgtttatntgttcgcctaaaagttacacnatttatgaattcattctgaaagatttaaacagggaaaatttcctatacaattgttaagaaattaattcaaaattttatttcggatttttaaataaatattcgtgcggatttaaataatattntaataaaataaaactttactcttttaaaattgtgttattatttttcctacggggagtggaggagtaaaaattcaacaaattcacattgacaatcagcagcagttgttgaatcataagcgaaattcaattaatcgaatttgaagtgaacaaataatatgtaatatttaatggggaggggcgaatgagtcatcatctcatttgtcagtgaaaaaaaaatcacgggattcatcttttggggctgagaagaattacccactcactcactgttcattcattcatcaattgaaacaaaaaagtcaacagaaaaagttctgctttaaaaaaaataatagaacaaaagacgttttggcccttcggggcataaaaaataatgtttttttgaaaaatttaaatataaagaatttaattgtttcgaaaaattaaatttggtataaattttttgaaaggaatataaagttatttatttgaaattttctatatttttcactatttttgataaaattttcatagattatttaaattttaaatttaaaaataatacaaagaattcccaaaatgtctttttattacaatttatgtgtacactctaacacaatgccaaaaaaaatatcaaaataaatatcctaaattcatcaagtgaaacaaaaaagtcgaacagataaaaccctgcttttaaaaaagatataacaaaaaaacccatcttgacctcctttggggcttcaagctaaaaaggacattttttgacagtccaaaataggaaaaataattgtctcataaaattaattcggatgaattttttttaagtaagaaaaaaatattttcactatttttattanatttttaattaaaaaacaatttttcaaaaaaaattcgtaaaatgaaaaactttttcggtttttattattacaattatgtgcatattaaaataaatactccaaaatgttcacaattaaataaaatcataaaaatataaaaaaaacaaaataatttttcttcatgccttctttcatttccattctttcgaattcctctccttcactgatggctacctttatgcgccgtgaactgtgccgaagtgcttggcccttcccccacgtcctcctcatttacttccaacacccgcttcctctcatttccacacatgcttaagtgcatttgctttatgattattagggctgggatttttatgttttaacatattttttttgcggcttagttatggcgagagaagccctaaaatagcattttctccgaacaatttttgttttagagcgacttataaaaacataaaaacacatattttggcgttttggcacataaaaacatatagcacatatttgggctattttggattttttagcacatattttggcatttttgaaaaaaatcgtaagaatacaagaaaatctgaaaatgcaccctaaaaattgactactttacgtttcttaagcatttagaaaatttctttatatatttaaatgcctaaagcaggcaaatcaaacgctgtgttaaatcgtcactggatttcaaagttcccggaaggaacttattcaactgatggaaaaattaatccgggactttacaaattgattgatatcgccaaaattttgactggcggtcgggcgaaaattgataaagactgatattaaatatgatttttttgcgtaaatacacttggttttttcaatttttagcacaaatttttgcattttttaacacatatttaggcctttttttttggtttttagcacataaatcccagccctaatgattataggttctattgtacccgttctgaccttctgcggtggccatgaagcgctcagtagtgctgctccctcggacacgacatcttcataatgtatcgccagttgccggtagtccacttcattgaaggaattgaaccgctggcagagtgtgaccaactatttggtgaggcacatgttttaatttttacatttttgcttaaaacaaaaacttgatggaaagcgatgtttcatccattttagctctatttgagttttccttgctttttattaaatgcaaatgtttaacgcaatatcgattgctcaccgcagagtcaaaccgatgcttcgccattttgctgcgcagggatccatctccttgattgttttgctgtccggcagcatagacgaagatgaatgtgttgttcgtgtcgttatcgaagtagtcgcgccagactggcactttgtccaatacagcttcctgctgctcccacgccctgttttcggttgcccatccaccctactcctcttcctgcgttgccctccatcttcctccttttcctcgcggggtgtgaagctggtggggtaccgtatcggccagggtcgacagtgcctcaccggtggatcattccaaacccggtgttattgtttgtttggggcggggtgtgaagctggtggggtaccgtatcggccagggtcgacagtgcctcaccggtggacatcccaaacccgttcacttatgttcgggagtgctggattgcggcaagctgacccttcggcactctgacctttacctgataacaagcaaagaattggaagtgtgtttaaaggtcatttgctgtatagaccttccagcgtgattcttgaaagtaaccgagcccgggctttcgctcacggctggtctccagccaatagttcggtcgcaaggccaccggctcaggattgccctggccatatttgcctaaggcgatggtggtcaccgtctttcccccgggttggagaaaggtcggagtggtgccgatgtcagcctcaaaattccgtttgctcttgggcgtcaaaatatgccagtattcgccgctggtgcccttcatgctctaaaaacgcaatttttctggcacacagacattttcctagcaattatacctcgacaaaagcaaaaatgctcatccttacatccaaaacatcagaatgtctcggatggttgcagagcaggccgcaaaagcctggactatacacacgtttcatatctgccgacagattgcaaaaatagaattggtcttctacttttcgtttttgcgtgcgctcgtcacggagtagttgctgctcctgaatgccgttttgtcccatttttttatgtgctcttttctgtccttaataggtgcttaaggcgcttttctaagctaatttaaacttttctaaaaatcacacttctctaagtatacgcgtccccaagcttttgatcagactcactaagacttagtccaaggaaaattttctaacagaataatttttctgtgctcttttctgtctttaataggtgcttaaggcgcttttctaagataatattttaaatctttcggggggcggtacagtttcgggggggggggggggggtggtacagaaaacctaagccaaacctaagcctttttgtttgacttctttacattccaaaaacacgttaataggtaaaattttggggcgctgagtacgaattcggcactcttttggccaattcacaatcacgaacccgaattaaggcttttttcgcaaagtttctttgttttcaaaattaataattttttcttagaaaactttatgaaaaacaaattttaaaaaactttccagcaatttttttcaaaatttaacgatgaattactgcttgaaaaatcgctggaaattttttaaaattttactgaattaaatttgctagggatgaacccaactcatccatgcacaactcatccatgaccgcataatgaaaaaaatgccacgactaagactacaccacacaatcaaaaaatgccacgaccgagaccacataatgaaaaatgccacgactaagactatatagccaaaaaatgccaaggctacgactcgcatcgtgctatggatgagttgggtatgtatgatttggatatggatgagttgggtatggatgagttgggtttggatgagttggacgaaagacaaaaaaattccctgaattttttttgaaagattgtgtttgcccattagacaatattcctggcctttttaattgtcgctgatcacgaatatggcatctgttttttgttcaattcctattcataacccgaaatcgaacaaagttttttcggaattcggctgtttgctcaaaaagaagttaggggctcggaatttgttgaaaagtggcagattcgtgatcatcgatatctgtacagatatgaacataaaaaataattttgaattttcgactttttgttcaattcttattcataacccgaaatagtctaaatgagtgtcatattcgtcatcagcgacactgaaaactcacgtaagcatgttttcacgactttttagaacaaaaaattttttccgaaaaaggggggcgtcggcagta

SEQ ID NO: 8133 - DNA, 2012 bp, Heterodera glycines
  unsure (1)..(2012): unsure at all n locations
ctgttggggcgacccataattcaaatattgttgtcattgggttcgttctttgaacgaaccaaatattgatttgtccccctttcccattaattccttccactcatttccccaatttcttcaataaaaatattttattgtgttgtccaccggcacaacaaaaacaccgactgatggatggacgctgcccgatctgagctgctcgccatttcattcgcatgtgacaaaagcgatacaccatacaggacgccgtcattatgcgaattttgccggacgagtaatgcaacaacaatggtgaaatccatggccaggtgacggcgatcggtcttcaaattgaaggacattcaggaaaattgaaggatttcgagaattttgaggattcgattgtccatgttccgttataaattttattgtatttttaataaatttattcattttaacttgtgaagtttgtctagggatagaattcggatcacttgcgaactcaaaaacttgttcgagttttggtcgccatcgtgtatagaattcttagtttattttggtattttatatttatatttgggtccagggttaggcaaggggcgatatgaaggtcgtattcgtattcagcgaccccgaaaaccctaaattagactccttttccgggtttttatgagctttttcgaattttggacatttcgtgttttttacccttatggacatttcgaggcctggacatttcgttggtcagcggtcaagagctttcgaatgataccaaatttgtcctaatttgaccttttgaaaaggttgtaaatgccctcattttgtcgggcccaaattcgaaccccgaacccggattcaaaaaactcgaaaattcatttttcaccaaaattcacgtttattgcacaaaattgatttttaggggttttcagggttgggaaaaccgattctgacacccatttcaaccaattcgaaccccgaaccaagactcgaacaaattcgaaaaaaacccaaaattcatttttcgacaattttgccgtattcatgtggagaaggatgataagaattgatgcgagcctgggcgaagttttggcctccagagattatttaatgtgttctaatgaataatttattctattcctgccatagtcattgtttaaaaatttgaattttgtgaatgtgaatttttttgaaaaatgggttttgacttttttgttcgaatccgggttcggggttcgaattgggcaaaaataggtgccagaatcagttttctcggccctaaagcaagtatattctaaaattttttttcaaaatctgggtacagataaccgtaaagtacccaattttctttctcatttattacaactgaacgaattaatgaacaacgaatctgtacatacatatataatagcacacatttacatatatttgggactactccacgccaagcggacttgtccggcatgtgatggggattgtggtaggaagcagaaagagggacaacgctatgcttcttggagatgcaaaaatggaaactgtcggcgccccgaagtttcgtttcttgtgggaactttttttgccggttggtctgctattaagttggggaaagaagcagacaaatttaagggtcacatttaacaaccaagcaaatcttttctatgagctattattgggcacaagaaatgggtactcaagaccagtggcagcgcgaatttgaaattggttcaccaaattgcgtggttgattggcgaaattttatgcgtgatgtttgtacagaatggtttatccgcaaccccattcgcattggcggccagggttaggacctcccccatgggaccttcttgcatttacactaattagtaattgtgtgtgaaattgacgaaaccatggcggtgcgccgtaagtacgaaaggngcagattggttgtgaacatttggctattcggaggcactgaacgaggacatccggaacgatgtttcatggttccggtgcagcgcagaaacgcagcaacgttgctcccgctcatcgagcagtac

SEQ ID NO: 8134 - DNA, 1202 bp, Heterodera glycines
tttctgtggcgaaagcactttggggattataatgatgtattttttaacttttggtctcaagtaagtgttatgtacccctgtgaacgaaatccataaatctattgtttttaatctcattcattacaaacttcgtgcatttaaattgatttgggcaataaatgtgaattttgtcgaaaattggatttttgagtttttgttcgatttcgggttcgggattcgaaatgggtcgaaatggatgccggattcgtgatcagcgaccccgaaaaactataaatcggtatttttttattcgaaaaaggaaaaaaaaaatttatggggcgtaaaccatataagagccgactccgtcaaatagctcagcatttctgtcgtcgtcgtaagcctgtaaaaaattgggagatgaaaaattggtagttaaaagttttgttcggctccgtccacgaccttttgagccaatttgcgaccctcttccggcattttcatgaatccgtgcagaaaaagggagaaattgagcgccactcccactccagggcgaatcggatgcaatggccgcattttctgctgggcaatgtcctacgcatcttcgttcgtcttcattgccttctggggatctgaaaatggggatgacttttcacaaaccgaaaatttgtttgattgttttttaccgtcaatgtttaagctgaacgaacaaatgcttggaaaatggcaccgaccaacgcctctcggcccttctcttccaactcgttctcgacgttcttcttcacctccttggcagtttgttcatttgtcgtttttcgtcttcttctctgttgcggagatggcacgccatgacgtttggagcatatcgaccgcctttctgtatgcaatatcatagttagtcgaatttgcagcaatgattggtcgatcagctcactgttggtcaaatggcgtttaaatttgaaaaaaagcatagacaaaaatgatggcattggacaaaggcgaacaaacccgaaccattcgacataaaaatttgaccatatcccaccggttaaaaaaactgagcttggttaggctttttgtgttaaataaataatatacatatctctgtggccccaattttcaacccacacgaaagggtggctctataaattaggcaccacaattctgcaccattgctagcaattgtataacatggtactttgaaagtggcttataattatgcagaa

SEQ ID NO: 8135 - DNA, 3785 bp, Heterodera glycines
agaaacagacagaaaagaaacagaaaaaagcatagtgaaagagagaaggagcagtggaaaagataaagggcacaatgtcgggaagagacgcagagacagagagaacagcagtgaaagaggagggcggaagaggcaaaaaggacagttcatggttggatgagagtgagtccagagaaagagtggaatggaaaagaaaggtgtcgagggggaaaaagcgaaccaaaatatcgccacaaaagcgacagatgagaaagaaagtagaggaacagagaaatgcagcattaagtgatcaggaggagagccgagagagtgaccaaaacagagaaacaaagaaaaaatgggtaaaaacaagcgcaggaaaagtgccaaaagggcaaccacagtacagtacccacgctgagaaagaggcgcaccagcgagacggtacccaggcagacacaggagaacggaatttgtcattgcaacaacaggcgaatgatgctttaagtcagcagcagctgacagaaacagaaaccgaccgtcctatagacggacaacagtacggtagatttgctgtccgtactgtaaaagggcttccgaaatggcgacgggacggtattctgacagaggcgagcaaaagcacagaatcggaattcgaaacggcaccatcaaaaagcgaccgccaccattacgatacggatggaacacaacaacttcggcaagaacaatcttttctgagtggtgccagcacagaattgtccgaatttttggtcgaaagagttcgaccaaaaaatgagtaccgccgttacggtaacagtaaggaaagcagtgcagaagccatggaaaagagcccccgacacggaattggcatgacaaatcacttaaatctatcatcggacgaaatcgaaacggaccaatctttggagagccatcgctttcatagcaccgaaacggcaagccattttttgagccgatcggaacaaaaagaaacggatgataaaaacagcgccgggtggagaatcaggacggtgaaaaaggggggagaagtggtgccaacggaagaagatgagcagaaacaggcacaatttctgatgagaaaaactgaaagtgggacggaaggaaatttcggaataatggccaaaagtgatggccaaaaatggggggacagccaaaatgccaacgatggagcagacaatgagcgcagaaaagagcagcaggaggtaaaacaattcaagaaataatccaaattttacctaggtacaaaatgtgtacatgacaattaagtcaagggataatctgcaatggtttaatgaaagcgaagcagattgccggaggaggggtaatcactggcccgcttctgcccctcctttatgggcactcgccgcctctgcccctccttatgccaaatttgccctgctaatgagtccatcccgttaatggaatattcgttccataatcagttgttgttcagctgttccacttggccaatgctcaaccggcactttggttaaatgagtttggcgaggtgtcgcacagcaccgaccaaaggggtggccaaatgggactgccacactctgacgggtcgcgagcaatggccgaatgtcgcggttgggaagatgttcatcgagccataaaacggttcgtcaaatttcaactggcaaaggaagcgaaagtcgaacaaaaggatgattcatttttggccaaagttgcaattcggccacggattttcacccaaaagaggcaatggacggtcaaaatgccgaagttccactggtttcactgatggaacatgcccaagtggtgcattccggacaaatggagttggacaaagcgccaacaatttggaacaaagttttggtcgaaagggtggaagaatgggcggaatttctgaaggaaaacattgctaatgacgacgaatggtcaattgaacagacggatcgccaagaagttttaagggcgcgagaagtcttgcaaatggtaaacggcagcgaagaattgctggagggaatggccgacgaaaaaactgtgccaccaatgccatttaaacccaccccggggcaaaaaggtggcattttaatgaaattctaaatattattttaattataaaaaaatattagcaatttggcaacgaagtgaatcagtgcggtcgttatcaatgggaagacgagaaacaattggaacaaatgatttaatggtaattaatggcaaacattcggatgaaaaaattggacagaaaagtgaaaatgggagagaaaaagaagaagcaacggacagtgaaaaatatgtaattttatttgaatttattaaaaaggcaatgccaatttcagaagggtcaaattggcattctcaattttgcccgaagtcaaaactccgacttttggctgggaacggcgaactcagtgaattggaattgccctgggatgggggacaacagcgatcggtgcgaggaatgggcaccgatccatcgggcaattcgtcgctatttgacatttctggacacaatcgagggaaaggcaatggccgagcttcgcgagtcggatctcggccaagtggcggtgttcccgagactgaggcccgaggcggacagcaaagggctgaccataaacaataaggtgccaaagggggaggcaaactcggcattttacttttacaaaaaacaattaggggcataaattgataacagaaatgatggcgagaattgtcaaatttaggcttggattgctcggctcgtggggaaagtttatgaccaaagacaacgcaagtggaaaatgaaaaacaaataaataaataaaaatgaaaattgaatagaattaaacaattagacgctaataataaaaataaattaaattaaattgtttggttttagggacaaaatatggacttaaaagaagcaatggagaaaagtggaggaagcgcacaaatggccaaaattgggccagctgaaagaaccgatggaattgatgaacaaagtgttggtggaaagggtgggagggatgggccgaattttacgcagagaatgcccaacaatcgctgagcctatcgatcgaagagtaaaataatttaaaatttaattgtcgaaaataaattcattattacttatatttagaaataaaaatgcacaatgaaataatttcgacttttcagggctcgaacaattctcactcacgtgttggttcaaacatttgacgagcggaacagaattatgccgaaaatagacatgaaaattgtgaaaacgccgccggcacaaaaagaaatttcaccggaaagaatttacgagcaaaaaaaggcgatagaatttattgaaaaatcagaaaaattaccaaatgaaacgaaaaacaatgcaccaaaaattgacgaaattaaaaaaacgccaaccaaaaccgaagaaatgaaaaaaacacccgtaaaaattgtcggatttgaaaaaacgccgacaaaaatcgttcgaaatcgggtgaaatcaaggaattatcgaagaaggaagtcaagctcaaagtcgagagaaacaatttgggagaggaggagggcattaaacgcacaaatacggcaaaaagtgccaaaaaaggacgaggaacaatcgcaaaataagagaccaaaaataaatgagagaaacagagaaattgaaaacagtgaagagaaaaggggggaaaaggcggacgacaaaatgccaaaggaaggcgacgaaacgccaacgcaaatttgggaacagaaaagggaattcaatgaaaaaatgaggaaaacaataaacgaaatattcggaagaaagacaatttatttggcaaagggcaaaaagccattaaaatcag

SEQ ID NO: 8136 - DNA, 6175 bp, Heterodera glycines
gggggggggggaaagggtgggccccaataaatcaaaaaatgcacaaattcacaccccccgaggagtgggcatacccgcctcaattgtccaacgtcggtcaaactttttgtcgcaccttgtccgagaccggcaacagaatgcgaaatttggtgcggagcttaacaaagaatccaacccagggaatttgaaaatcataaatttaaaggacagcaaaaattattgggattcaaaattggaaacacaatttgcaaaaataatgactaaaaaatgttaaattttgacggtttttaaagggaaaaaaactaaaatccggaaatttttcaagattattccctgatgagaaattccatgggatgtgtcaagttcaaattcagagcaagtggcgaatttggggcggagtttttaagatttttggactttctttccattttccattatatgtttttcagttccgtacgaatacacgcagctattcctttaagaagtgatggaattccattttattttgtcatggttgttgcgagttcttcactattttttctcaggaatttaattttaatttttacataatttttttttggcttaatttctcttaatttttgttttctttttttgttgctttatcacttttttcgatcttttggtttttacaggtctgtttcacttctgaataaacgtgtacttttttacttttggtccaccacttttaagttttgaacgcgatttcaacaaaattttaaaatgataaactgataatccaaataactgtcctcatctgactgtaggattttggaaaacgaagaaagcccaattaaatttcaaaaataattaagcgtagaaagagattgtatccgatcatctgatttcggctatcagggcttgaaggaattaactttgaatagaattttgggcaaatgtcggtgctccggtgtattatattactcaaacccatcaaaatgggcgttactcaataaaccataatgaaattcttcttgaatagatttaagcatcctattagcccgatagccctacgaattcctttatcaatcaaaggttaggtgccaaaagaaaatacggtccatgtgatttataagccgcggtgtgatcaattggatcatttgtgaagaaagcgcggattaattactcaaatcaaatgatgtaataatagaaagcttcattttgtgtatgcacataaatatatgagaagcatcatcatttttcattatcagcaataagcaaaagcagaaaggcgacaaaagtgaaaatcgaccgcattatcagttattatcagcaaatggtgctcccatatcacctcagcctcgtctcacctcatctgctgtacacacacaaatatttattcgtaaattcgttggacgcggacggacggatgcgtttatattgtgataattagcgatgattatttttggagagaaataatgcttttggtcgcgtcgccatttttgacaaatcgctctcgcaccgtcgattagtcccgacggtacgcactaatcaatagtgatcggagcggacaacagattgaattgtaccagtgcctgtgcttgatcaaatgccacgtttttggttaatcccagtgactgatctaacttcatttagaacttgttaggtgtaagccgattttgattgactctgaaagtaattgatcagcagtgatcggacagtatataaaatgtatccgtgcctgaatatgtggggcatgtcaaaatctcaatcaaataacaaaggtagtggcatttttaaatttaatttcgaaaattgagtaaaattcaaatcacaaaatgtttttgtcccattttattatggtaatcctcccagtgtggttgactctcgtgtcacccacttgctactcgcgatcaccatcacccatttccatgcctttcccctcgctctcgacacaaatcccgagacccattttattatccatgcgttaaccatcatcatcatcctctcaattattcctaattacccctcttccgaaaacgacctcttccgccccatcaatccccaaatccgtgcctcctcctcctcttcctgtgcattttatcccaacattcccatcacctatcgatcctttccaattctcgtcagccattcagtctcgccccactgcacacaccggcgagagtttcgccattttccgcttccaatttttattgcaaattttttatttttaatttttacaaaatgaaaagcgatttccgcattaaaacaatacagaatttattgcaacatatttttctgggatttcgcctcccccgccactcccacttaaggtccaacaagtgaactgtttgttatttgatattcttgtggccaattatttaatgtttatttaacgacaaaaatttattaaacgaattttttcattgaatttatgcaatttaaatgagaattaaagaatcaacaaaatcatataaacctttatctggatgaaataatatagaaatttctttaataagatcttgtatctgttttattttagatatttcaataattaaatatcaaaaatatcatcatttaaattcttctttatctatttgcgacttcaaaaagatgtagatgttttaacataaccttcgtatgctttattttccatcatcacttttttttctttttaaaattaatatatcctcaaaaattttttttgcttttatataaataaatcgatattcaaatttttgagatcagagccatgctgaagtcgacttgattaaaaaattcaataaaccgcaaaattttctgcgtattttttttttgtacgcttcccatttgattggtgcttattttaaacgttgagtttgattaaatgcttttggctgatcattctcagtttaaaaggaaatccaatcaattcttgcgagcagcaggtgatcaaatcaccccattgcttgccgttggctggtcacggtgatcaatcgatcactcaatggacagagacaattagtgtttaattgaccaattttgtgtcccttattggttttatcgtttatcatcattttgttaattttccttatcatttgtaccattttgcatatgcggtttaaaaagcaaaattttctcaaaatttggtgcttgaattgattgaaaattttaaatctaattttgaaatcaagttctgctggcgaccttttaaaatttccgggtatcacgagctttaaaaattcccagaaattttgagttatggcgtagaaatctggcaattatcaatcactcactttagcaatgatttccatctccccctggcaattcaccaagttaaatattatctctcccacaccctcatttatctctgagaagataaattcactagtctatttgatcacgattttagcatggaattcagtagtggctatttaagatttattttgacatatttattcattcgcctcttaaactgatcagagtgtcctccagtgacagcaaaatgtgttaatggatcctgcattgatcaagtacaaacaacaatacataggatggagaatttagtccaatcatccggttattatatgtaaatctgatcgatcataatctatctcgatctaacagtctgatcatttgtcacatttgagacctatcgctgatcaacttttttcgattgatcaccatctaacctgatcaattcgaacattcctaaacaaattcttgcccaaattcgctttgatcatttgcaattaaagctgatctcccacattaatcaatttaaataaattcttaccaaattcgatctgagcatttgtaattacagccactctccccaaataatcaaatcatcaaataaattttgcccaatttcggtctgatcactcgcaattattataactggactttccaataaatttgaatgatcaacccatcgctggcccaaatttcggcctgatcactcgcaattactccaaccaattcccttggccaaatttgtttgtttgcgcctcttttttaattgtcctccgctccgtccgtcgtcccccaatttttgttttattgcaaatgatctgacaatgagtgagatgagatgttgatgacaaactgatgattgttcacattttgtgtttggaatcgttcgatttgagaaacattaattgacagtgaatgaatgtcccacaacaatcataaaaaatgataattgcataattatgttttgcaaaatgccgcaccgcaaaacaaacaaagggcgcaccgatcgaaaaacgaacgaacgaatgagtgaataagtgcccccaatttgatcgcaagtcaccacagttaaaacaaacatttcacaagcaattttatttaatttatttttttgccaatttaattggttcccggcgaccattcgtcccaaatttcgggggaaaaaaatgcaatttttacgtccctaccatatatctgtatataaaatagcggcagatttttgaggaaaaattactgattgtgagctgtatctttaaggagagcggaaattttgaactgctctgaccgatatatttctttaaaatttgctgctcgagagtctcgacccgagaaatttttgctttcagtgtgtcgagtctctgcaatttttgattgagtctcgaatatatttatcaaccatttttatacccctaaatctcaagaccagtgacaataccaaagggatccaagaatttgcttggctgaccggcataaatgaaactaattacctaaataattaaaggtttttttttatttaacacgggtcattactatttcattttttcatttctacatttgctgatggacaccatttctctgcaagtactgctcgcatttgcgatgtttgccaccactgcgttggccggactgcttccgatcaaagtgatccgaaattattaatcgtggattttaattgagagaatttttagaagaaatttattttgtatattataggactgctgataatcttgaccaattttgattaggaattaatggatttttacaaaaatttaacagaaatataaattttaaaaaatcgaatagaataagcattaattattttaaatccaattttaatcaaaacatttgatcagaattttaattaattttcagcttcttcacgcgatcacacgtcgtcaggacgaaaatgatgagcagcggagcagaaaatcggattacattttgacgcttttgtcctgttttgcgggcggtgtgttcatgagcacttgcttcctggacattttcccacatattaagttagtttccgcttatgaatcccgattacattgtctggatatgtcttcgagagtcacgagacaaggattaaaattttaaaatatttatttaaaaattgaaataatttttatacaaaaatgtacgcaaaattccgatcagaatgtttgagttcgacatttatgtcaacaaataatgatccgatactgaacagcaaacaaatcctgacgatccccacttatcccccatttttcagcgagaattacgcccatttttggccaagtcccagtggaacaccgacttcccattcccgcaattctttgtctgctgcggctttttcttggtctattttctggaggagatttgcctaaaagtgttcgcgtccgcaaaacagcaccagcaacacgcgcactgtcacaacggtggccatggcggccattctcatggcaacagcgaagggtagggaaaaactggcaaaaaattttgaattcgaaacgagaaaaacatttgatggaccttgccttgccaccagaattggtttcattttcccattggaggtcctattttccaaatttatggtcctaaatcctaatcctagattaattttgtcggtttttggatttttcgaaacgaatacccctaataggcacagacaaatggtcgacattttttaaaacacaaatttgatgcccaatttttggtgcaaaaagcacacagcatttttgagcactagtgaaatgcacaatttgaaaatttcaacactaaattaaaacaaaatcataaagaaatgagctaacgccaaccaaaaaataattatatgtctgatacggtaaaatgccttaaatttctgctaattcgatcatttacagcaaatctcatcatcatcatcggcatggccatgaagagtgcaataatgagccgctgaaaacaaacgccggcagcgacaaaaaagggtcgaatttagggacaataaatgagagacaaaaataag

SEQ ID NO: 8137 - DNA, 2368 bp, Heterodera glycines
ttttagaaaaaagaatatgtgcatttgcattttttgcacattgtcattttgggcgagtgtcggcatttatccgtcgttacaccaaaaagcccacaataaagaaactgtaacaaaaattgtctttatccatctctttctttctaactaaattttacaacgattttttatgcttaaataaaccaaaaaaaatgttggaaatttggaaatattttaacaaaaagtctatatgtattatttattgcacgtgtaatatctgtgccaaaaaaaattgttcgaaatgatggttcgatgatggacatgtggaagcagtctgaagcaaaacgcaaacaataatttactgagttaaaaagaggacaaagtgacattggcaatttattaaagagcgaagtggcggatttgagtagagattttaatggcgaagtttttaacaacacgtcgaacagctcgggattcccacactttaccacttttacggtgtgtgacaattaaatgaccagaagcattaattgaccaatcaatttgaaaatattttgctgaatgaacaaaaataatttatttcaaattatctcctttcctctcccgttttaggtcattttttaaaatatttctcgctattttggtagcagggcaaagaaactggatagtctgagctcttataaattatgagattttatttttttttctctcaattttttcttttcatattaaaaagtaattaattgccattaagacaaaaattggagttgcaaatgttcggcggcaatttaccgaattgtgccgcaaatggacggtgtttgggatttcaggaaggaatttaaagaccatgtttttaacggtgaattatatgactggggatttaaaaatttcattaaattttcggtgaggaataattcaattttttgcttaattcttccaattatgaggtaattaaggaattgatggacccgagcaaaggcttttacaacaaaagcgaggacaaagtgacactaactgttgatttcattgtaaaagaagcaaaaatggcggaagacaaatcataaacaattgaacaaaaaaaagatccatcaattgtcatagatcgcattttgcattgtttctaagatttgtccggtactagtccagtttttttaccccattttttgatcaaattttttttcaattcttcacacaccatcccagaaatgagctgctgtaccaaaaaagatttgcgtgtgtggctcagtggtttttgtaagatagtaaagggacaaagggtggtggttcgagtccgttgtgcaacatgaatattttcatttatttatgtccaaaatattaaaaaatgacgaattttgggaattatttttgaaggtttttcccaaccaaattggaaaaacttgatatcattcgaaagctctttatgaggagaagctttttctaagcaactgctaagcaattggattgaataggaaaaagatattagggttcgaaattttggttctcgaataactttttagttaaccctttttttgcgtttaaaaacccttacattttgtttgtaatttttttctctatcgatatgcaaaatttggagtggatctaacgtatagaaaaaaattaaacgtagcgaagtaaattcgatttttctctattatcagagacaaagaaatagtacgccaaaaagagagatgtttttttctctgcactctctatttattggtacacatctcgttttttgggatggtgtgttcaataggccaaaataattgtcatattcgtggtcagcgacctcaaaaacccccgaatatttgttttcataaacttttaatccaaaaatgagttgaaaaaaatgttgactaaaaaatgggatacaaactgactggagtagcatttgtccttaattccgcctttcatcttcatcttcatcttttttttaatttgtctgattttgataataaataacaaaaaatggcagtttttagtcaaaaaattgataaaagtgtctatttttggcgcaaactttttatagtttcacattacccaatggtatttgaatatattcaattttcggctctgttccagtttacgcgtccaatcaatatttacgcgtccaatgagtgaccatcctcacttttttaaatcataacttttttattacttggtaatacaaaattctttttgtttacgtttggattttagtcggatcaattttttttaccgatggcaaagcgatgaaaaaatgcataaaaacaggggggggggaaggagcacaacgaaacatttgcatgtttttgctacaaatttcctcaaaataatcacaaagcccaactgaacataaagttttgctgattttgtgccgtggtttttatttcttgcccaattttgaaattgc

SEQ ID NO: 8138 - DNA, 2058 bp, Heterodera glycines
  unsure (1)..(2058): unsure at all n locations
attacttaggtaatccaaaattcttaggtattaatctaaagcttaaagtttagcgtatttattaatacaagaaaaaaacaaatacttacatatattaagaaaaaatttacacttccccaaattttaagctttcgattagagcacaattttctcccactttttttctatccaaaaatacaaaaatatctttgtttattaatacgtttaggtaattatcgtacattgcatctatttttcaaaatatatttgtttacgtttgcatttagtcggatcaattttttttaccgatggcaaagcgatgaaaaaatgcataaaaacagggggggggaaggagcacaacgaaacatttgcatgttttttttttgctacaaatttcctcaaaataatcacaaagcccaactgaacataaagttttgctgattttgtgccgtggtttttatttcttgccaattttgaaattgccaataattttaccgcatttaaatagataattaaacgaatgatggaattgcttagcatgtccaaaccgttggctgaacgaatgaagcatttgttgagcgcgggagaggacgcggatgtttattttttggtgggggacggagacgcaaaagaggcgagtcttcaaattaaaaatttaatttattaattaaaaattggaaatttagtgaatggtaatttttgttgtatttttttaaatttaatccgcttaagcttgtgccagcccatagaatcattttgaagttggcttccgacgtttttgaggcaatgttccgttttgacgccaaaaaagaaagaccggaaaatggtaaaaaaataataattttaagggaaaatgccaattatgctatttgttcttcattttgtctctgctaatttccctaattaatttttcaattagtttctggtaattgtcctgatgttgtggagatacctgacattgaagcagaagcgttcaaagtgatgttgagcttcatttatacggatgatttaagtgatttgaatggagaaaatgcaatggctgtgctttacgccggtggatttaattttatgtgacaaaaataaataaattatttaattagccaaaaagtacaatatcccctctctggtcggctcatcttcgcaaattccaatttccgaattgcgcaatgttttcttcgcttttgcccaggcccgtcttctcgacttgaaagtgggtaggaaaaattgaaaaatgcgaaagaattaaaaatttgctaatttttaactattttgtcggtttacatttttcaatctcgtgaatttttccgtcttgaattttgctattatttgcattttttttgcaaatattttcctacactcaaatttttacaaaaattttttcgtttatttagaatgtataataaattaaggattttaagaccaattaattgctgctgtctgattgtgagatcgaaaaacccttgactttagactttttttttgtaaaatatgttcctcaaaaaatgaatgtttttttaagtttgtcaaaagccaaacaatcattagagggcttaaagaaatctcggtcttctaaactcgaaaacctagacaagaaaaactcgattcttttctcgctttggcactctcagagaaagactacattttaaagattatttttcctttgaattttagaattttgccaattgttgtttggcttacattggcaaaaatgcggacactttgctcaaatcggatgaatttttgcaaattgaccaaaaattgttgtgcgaaattttggagtgtgacgaattgcaaatccgtggagaaatttcaatttggaatgcggtaattttaacaattanattttaaaaactgtaaattttattagtcatttaattatttccattaaattttttaaaggcactccgttgggccgacgaaaagtgccgtgaaaatggcattgattgttcagcagagaatcgccgtcaaatgcttggcccggcactgttcaaaattcgcttttccgcttttggcaaaccgggaatttacaaaaaaaattggtaaaaaataagtcaaaatttcaaaatcgttctttgatga

SEQ ID NO: 8139 - DNA, 611 bp, Heterodera glycines
gcgagaagtcattgggagtgaacgtaaaagcgaaactgtgcacatcaaaggattgccatggaaaatattggcacaaattgaaaagaaagatgaaagcactgacaaaaatgagaaatggttgggcttttctctttggtgcgatgcttctgaagaaggtgtaaaattactaataattaatatatatattaacaacaattaattaattgatattgagcagaaaattggagttgcaaatgttcttcaactcttcgaattgtttcgcaaaagcgcggcgttgcggatttcagaagaaaactcgatgaccatgtttttgacaataaaaacagaggctggggatacaatttcatttcatttgctgtgagtgacaattaaacttttccttaattgatccaattatgacaattaaggaattgatggacccaagcaaaggtttctacgacaaaggcgaggacaacgtgaaattggccattgatgtcacagtgaaagaagcaaaacggaggacgaaacataaatgcccaatatgatttggggaaaaatgcccattgaatatcctccatcctatgttgaacctatttttttatttattaatttttcttaattatactttcaaa

SEQ ID NO: 8140 - DNA, 1568 bp, Heterodera glycines
  unsure (1)..(1568): unsure at all n locations
tttatcggagattcgatcaattacacttcatgtgaacattnagcggacattattgcacattcatttgatagagacgacattaatggaattcttttatggacattttatgtgagaattagcaatttattccggagaagaataagcttaggtccatttttttatgtgatgcagtgaataatgcgctgatttggcaatattttggttttattttcagcataaaaaaataataaaaatttgcataaattcaccgatttctaaatgtatgccgacaaccctcggggggtcagcaccaactctgcctgcgggcaaaatacagaatttgattggagcaaccccgcctgcgggcaaaatacagatttaaaggtgaaaagtgaggatcaaaatgtagtgatcaatcgacctgtgtggcgcataaacatgctgagccacatgaactcgagtttggaattatttggagaagagtcagtccacgcttttgatgattgggctgaccgatttaaggactatttgtcactgacagggaaaaattggaccgaagaagaaaaggtcactcgccttaaactagcgctcaaggacacgccgagggaactattcaaagaactcaagtctaaccaaatcacgacattcaccagcgctttggaagcattgagggccaaattggactcgcctcaaagacgagaagtggcgaagcggaccctttcagtttgccggcaacgtgaggacgaaactgttgcccaatttttgagacgtcttacgccattgattgactcaacaaatccttctttaacgggtgatttgcgcaaagaaaaaatttgtgaggaatttctggaccgattaagaccaaacatgagctttttgattcgtttggtcgggcttacgcaacccaaaaatttggaaatggtaaaggcccaagcagaggaacttgaggcacttcttctcagcactggaggcggtgttacgcaaatcacacaactcatcaattcaatgacggaacaacgcggaaatgaagaaccgaatgaacaaaacgaaagaaaattcgaacaacaatggagcgacaatggtggggaattcagaaatgccacttcacatgacgcgcagtgctcgtacttagaaaacgaaaggagtgaaggtaaccaccaaaattggccaagaaggcgccacggaaatatgaaccgtagaaattggtccaattatccgacctgccaattgtgcaacagggccggacacagttcctacaactgccatgaaagaagggcacaatttgaagaccaagcaaatggcgaatggcaccaacatcgacgactaccatggaacaactggcgtgatcaggcaaatgaaatgaatgaaatgccgcaatcgacatcctctttggcacccgaattcatggaggacttggtaaaatcattaatcacactgaacttacaaaagctgaacaatacgaggccaaacaacagggactgaatcacaaattgcagtttatctgcgatcaatggaagtaatggagaagacagcaaaaaggttggaattggcctgcgggcaaaatacagaaaaactaagaataagacttt

SEQ ID NO: 8141 - DNA, 5580 bp, Heterodera glycines
gaaattccacttcacatgacgcgcagagctcctactccgtaacggaatgggtgaaggtaccaccaaaattggccaagaaggggccagggaaacatgggcaacaggaattgttctaataatccgatctgccagttgtgcaacaggtccggacacagttcctacaactgccatgaaagaatagcacaatctgaaaaccaaacaaatggcgaatggcaccaacaccgacgacgaccatgaaacaattggcgtgatcagcccaatgaaaggagtgcaatgcagccatcaacgtcctcattggcacccaaattcatggaggacttggtcaaatcattaatcactctgaacttacaaaagttgaacaatacgaggctggacaacagggactgaagcacaaattgcacttcaactgctcaactgatcaatggaagaaatggagaaaacagcaagaatgcttgaattggcctgcgggcaaaatacagagaaaactaactctaagactttgatcagaactctaattgtcttgttaattttttactctttagactaaattttcaacatttgcttcgcctgtgggcaaaatactgatcaaaaacctatcataacccaaattctgtaagtttccatcaaaaaaaaattgcttcaatcaaatctcacagcagatcatttggttggaataaaagtgatttaatccaaatcggtctcatccaaattgatcaccacaggactatctttctttgttttcgggactggcacccgcccttctgccttctgcctagcccgctgctcttgtcgctgagacgcaagctgctccttgctagtggtcctctcacgatgaccactttgctcatagcggagctttcgtgccctctccttggccgaactttccatttctctgcaaaattcaactcaattttcattttacattgaccaaatttctaacttgactccctgcaggtactcttgactctgctcctcggagtattggtaaaattctcggctgctaatgcaatcacaccgagttttctggccaatcacttaaaatgaagaatttcagaggacccatggacccaaatttgaccaaaattacatttaaattgcctcgctgccctgtggttacagagctctttgacaaggcagaccgatgccccaacatttatgccacagtggaggcccacagtaagcactgcgtcgcccggccgctggacatggaattcgaaaggaattccagccttgcgcagctgggccggggagaaaaagaagctgttgtggcccaaggggttgcgacagcggggccaacggtcgccaaacaatgacttccccagctccatggccttcttctcccattggccaccaacaaacaaccacaactgaacaaaatctgattttttttctttttttttctccattttacgcagccaaaacctttaaacccggccccaggttgtagttcaaatgatggacatgctcttcctccctgtgaagcgcaaacgcggaggttccgggaggcgcacagagcccacggatcatccgcgcatcgtccggcaaactggcctaggattaaaaccgtacaaaaaaaacacccaaattttgccaccattttttcatatgggccattgcaggactccaacaattgggtaatttgccggtaagagtccgtcgtttcggccggcggggcgaaccattgtgagccgtaataccattgtttcttcggcactaatccgctcacaaattcattgaaatacctatttttaataattgttcatatttcaggaaccaaaaaaaaaaccgttcaattccagcctccgattcatcagtgaaagccaaaaattcctggccaaaattcgtcgttgtcagcacagtcctgatgtaatactcgaagccattcccgacaatcaaataggacagtgcaccgtcccgtcggcaaacaccgatgcgctccattttcacacggcatgccaaaatctccgccggcaagccattttctacataaaccttggccgtaaattgctgctttcttcggctcggcccaggctggcactcctccaccgcctgttgcgcctctcccgcaccggtagtccgtcttgctgcggcctgcttcagctgctcattgcgaaaacggatgcctaagccacccgcattccagactgccgaccactttttgtcgtcgcgcaggtatgccaacaattctgcatagaaattgaccgccatccagaattcgtaggtttcgagcattttcactaggacttggtgaatttaaaaaaatagagagagagagagtggactgcacaatatgcgaacgagcctgagggcacaatactgactataaaaaaaacaagcactaagtcctataatttattatcgacataattcctattgaaaaacatttaaaataccccccacagttaattctatccaaaattacacatttgtaaaaaaaggcatttattaaatatttaaaaatgattttaaaaataaataaataaaaccatcatttataaattcatttatcttcaatttctctggtctcgccatttttcttctttcactgtgcccaccattcaatttgagccatcataatcgtcgccgaaccattcaacagaaatgacctgaaatagaaggaaatgcttaaaaaaaaaaaattttctctctgaacagcttggacctgatgccttgctgaaagccatgtttctatttttatacctattctttccctcatatcaattttccgtgctcagtaaatgcatcattaaaattcaataaaatcatggctcagttggttttctatttttttttaagggctaggttcaatgcccctctatgttaaatcatttttattcattttctcatttttccccgatttatgcaaacctgaaattgggcgaccaaaaagcagaaatccggcacatcggatacaaaacgaaatggacacgatgccttcaaagaccacgggacgagcgaagaaaagctaaaattggaaattttaattttttttttagccttttttaaacggccaacattttcttttctctcttttatttttctaaaatttcaaaaaaaaaaaacatttttttttttctttcgtacacaaagtgcaggtcaaccatccataaaagccgattgtgaatttcgtccagaaatttaaaaaaaaagctgattttaatttgagtaaagtatgaggcctgagggcacaatacaaagaaatattttgggggtttttgagaataagtgtatatttgaccatttttgcatttttagagcatatttcggtcatttttttggcaaattttcaaaagaaaaatgcaaaaaaaaaaaagcgagaaatacccccctaaggatcgacttttggggaatttaaaaaaaatataccattgaaaaatttttaatttttagtattaacaagattaaaaaaaaaaaaaaaaaatcctataaaacctaatttttgttcttaataagccggttttcataatttagtgctgtttaaaatcactaagattaaaacccctaagttttttttctcacccaccaattttttcgggacgatgtgtcgcctcatcaacttttgcttcaacataatgcaagcgagtcgtcggtgtacaatctgacaaaaatgagtacaaaattaaaggtgtttcaaaaatttaattagcgccaatgacagctcaaaaaaaaaaaaaaaaaaaaaaaaaaacttttttttattcggcccttaattcggcagtccttcaaaaaaatgtttaggtgtataataaaatttattatttctattactgaattgccttttctatggtaatgaattgtgataggcctgcgggcccaatactgactcaatgttttttgtttaacttaaaattggctccaaaaacccaaaaataggcattaataactcaaatttaaacgtttgaagcttaaaaaagggggtaaaagctaaaaatatcacccctaattaataataattaattcatttcttttaacctttcaattgtttcccaatgcttcaaattgtccttggcctttggtgtcaattcggtgccccaattcaccatttgccatcgcaccaattctgctgctatttttgcgtcaattgcctttcgctgggccttcaaccgttccaattcatttccatcgtcggacagtgcaaaagagggcatagattgtctataatgggaaagaacctatagttcataccaaattatatttttttttttttttgccaaaaaaaagtttatttttttacaattgttaaaaatggtttattccaaaaaaaaaaatctttaagattgagttaactctaccaaacctcaattgcccttttaccaactaaacatttatttttctcttactttcaaaaacctttttacaaaaaaaaaacctgataggaagagttgaagaaccacatgtgcagcgccaatgcagtgcctccccctcgcaataccccagcgcgagtccaatatcggcagaaaatgctaattggactgcgtttctcgccaatttatttttctattttttcttcctcattatattctctttcatttctcacacttacttatgcttatacacctaattaattacaatccaaatttttttttttttttttttttttttacttttattttattttaattatcacatttcgccaaaacttttcgtttcaataaattcactaaatttaaaccgtctgtcgtccgacggaaaatcattttttgccttttattcatctattattaatttttatcattaaccatttatattttagaaatctttaattaataaatagtacaataataataattaaatattcattttaatcgcctaaatgaccaaaatagaggaaataaaagtcaccaatgggactcttatggaaaacaattaaaatttacacatcgccaaatcaactttttgcgttgatttaaaccacatgtcggccgacatattggcccgatctgtcgttttatgtccatcattcatgtacaaatatgagaaaggcttgaaagcacctcacccaatttttacaattttttttctattattattttttctctccttcacattaattttgacttaatcttctaaaacaatctactgagaatgcctgcgggcacaatacaaattcggaatgtaacaaattgaagtgggaaaatttgttaattttatatcttagcaggcataaccaccccccaattattcgttaataatttgcatatccctcattcgtttattttgatcccccatttctgtttaaggaatttgttttgttttccccacaatttttaccaatttgttttgcacatttctgtcaaatgttgcacccttctcctttcccaccgatttttgtctcatttccttgccttgttgcacatccctgcctttttgactcagacagccagtgatggcctttgaatcattaattttattccttttactacgggcaggagacgaccgcccttagtctcttccttaattgcctgccgccgcaaacattacacatacaaacattcatacttactggcaaacccaccattagccatttcattcacataaaaatacttcatttcattttgtctctattcttcatttaataaa

SEQ ID NO: 8142 - DNA, 2776 bp, Heterodera glycines
aataaaagaatgggttataaataaggaaaggatgcgacactaatttcccattatctctccctttcctttcttttactctcttttcttttccattgcaatttactctctttttttcccactccctccttctcccacacacacgcacgcgtccaacagactgctgctgcacagcagcacgcgtctgttcactgtatgcccctctcacccgccgctgcccgcgtagacagacaatcagacagtgcactattttcccaccatccctccctctaacctctacatcctagaaggagaaatcttttaccttctttttctgtgctatttcttttgtcttcttcttcttcttaactatttattttcgtctcttttctttatattctcttctttttcaaaacaatttcttttcatctcttttcaaattcatttttaacgcaaaactcaaacaaaacgccacacaaattcaaacagtgacacatacatacatacatacatacaaacactcaactttattatataggattatttcgtaggaatgatttgagtgaaatgaaaagtcaaaggaaatgttttgcgggcgacggtcactgatcggcccaatggcatttattcttttcgggacggacaaagcgtatggttgtgccgagcgatcagttgcctggtcatgccgcgtcactttgctcacctacggaggaagagcaacactaaaaagcgacaaattgaaatggcaatgccatgttggcaccccctccactaattaaagaaaatcgcatccaaaacacccttaattgcgttacgtcccaaatttgccaaagggccaatgccgcatttgccgcccaccccccaaattgccaatgttcgtcccctccgcgccccctccgttttcacctgttttaacaataatcgctgctgcggaagtgaggaccgccgctgttggcgcacttcggcataataaccatcacggacattggaaaacataaactgcatgagctgagaccaggccaacctgaaaaacggagaagggcattccatccaaattggccatttcttttggcattttttcccttttttcaatttccgtttttctttttttgcgttgtgtcattttccatattaatttgattgttcatttgttttgctgttttctgctcacaatgtttcacatcgcttctgcgtccccgcgtccaatcgcaaacattcggcgattgtcgcgtcggcgatggtggaaaaaaactcgggccgaaagccaaagtggcaaagttgggcatgcatttcgccaaaagcgaacgaagtggcggcgactttggatggcaattcgatgttcgccacacattcagtgatcagcgagaaaatgtcatttgccaattcgtccgctttttcttcctgcaaatggccaatgaacgatttgaattcggcacggagggcagaagctcttttcagaatttgtggaccaatgacgggtctgaacagaacgaaagtgcggagaatggccagaaaatgccgaaacacagaaaagaattaattaaattttaatggactgttaattggcaaatgtttcgctttaagtatgccccgtgtccctccttttcaccgactttgcgtttctgaagcattgctgaatgcgcagtcgcgtcagtgggggcatcgctcccccatttgcggtcgaagaggagaatttgcgaccgtttttgagaccatcgccggcgagtgcgtgttgataggagaggttggcgatcaccttaggaatggtagaatagcactaatcagtgattagaagaattacaggtgttcaattgctttccttctctttgttatctgttcactctctctctctctctctcgcccctctttttcacattccttcttttgttcttcaataaatgccgaattttatcacccctttttctcatggtctgattgatcactttcttcctcctcctcctcctgatctgttcatcttttctcctccccctttttcacattccttcttttgttcttcaataaatgccgaattttatcacccctttttctcatggtctgattgatcactttcctcctcctcctcctgatctgttcatcttctcccctcccccttccaaaaatgtctttttgtccttttctctgccgtgccaacctgacattccgccgctttcatttgtgccgtgcatatggatgtgctgcgaatgcgctttttctgctgttgttccaccgtcaaaagaaactccgaaacggccgaatctttgcgttgtttcgcagtcgaatttgcatctttggcatttttcgctaaataaaattccaatggcatgccgtgcttttgctgggtgtcttcgtctgctcaccggtccctccgtacgtcccctcgtcccccgggggttgcttcttctgctccgtctccacccgcttttcctcctcctttggctgcgtttgtcttccatttgtccctcttctgcccatcatccgtccctccactccatgcgattgttttcttcttccgttcctctgttttttgatgtacgctccgccgttcaaatttttcgattggtcattttgcaattcaatcgccggcgtgggacaattggaaattgggcttaaaaagacagaaatgggcaattaataagcatttgatggcacacggaaagagtttagctcataaaatgtgccctttcccctcccttttctcttcattttgccttaactcttcccctcccctcgctccctttctttcttttttttattcaaaattgaattgtcacctcttctccgctgggccttcttcaatccc

SEQ ID NO: 8143 - DNA, 1789 bp, Heterodera glycines
gcggggggtaatgagcaaatgtgagggaggagagaggagagggaagaggggaggcgtaatagagggaggggtggggagaagagtactaagtaggatgtcaagagtgtcaagggaggaggggggtcacttgtgataaatgcggcactctccacccttgtgcctatgtggtagtagaggattaagagagtgatttcgccccaagataaggtgaaatgagagtaatggagagaggcctgcgtagctcagttggaagagcacggcacggattgctggggtcgtgggttcaagtcccaccgcgggttgatcttttactcttccgcacaaagaacaggacgatacgtcaattatcagatagaccagcggaatggcgagaattaattagtaacctaacaaagactcatttttaattaagtatatgaaaaataattgtgtttttcgccacaggcaatcatttctccgttgcgcccacggccaccgccggttgcgtcgcctgcgggcagtaatccgatgcgagtggcacaacgaaatgccaataccacaacagccgtgggtgggcactgcccaacctcagcggtcactggcagccgttttacccggccaacaaatggcccttcgactccgtcgcggccgcctctaaattcgaaatggctgacggaaataaaaaatgaaatgctaaataaattggctgaagttgaggatgcttttcctcgggtaagcatgctgctgaagaaaatggcactttattttttattaaattaataatagaaaaataataatcatttttaaaggtggcaattcggccccgtgtatagttttactcgtttttttttacctttttagtccattattttggctaaacattaaaaaacaaaagattatgctgttattttttttgtgatttagtccaattagtcgatatttgccattttcggctttttggttcaaagtttttttttgttaaacgtgatcacattttatgaaacgatttagttaagatgcatagaaatgcggcctaaagtttcaaacccaaaatgccatttgtttttgatgctttttcagaagaatcacgcacttcgtcatagtaatccaacgccagaacaattaaaaggaattatgatcaaaatgatagaagaaagcatagcagcatttggtttcgagccaacagattatttggattcgaaagtcatcattgaacagatgacgacgaatgggttaaattttgttccaaaatattcgcaataaaaggacccagtttctaaattgattcaaattttagcattacgtatcgctttaccctcagttgggccccagaactttttggatataactttttttttttgcttcgcgattagacaattaccaaaaaaaaagttataatgaaaattgcgaaaagtcgttgctttttgtatggttaatagagcatcatgtaaagagctttcgaatgataccaacaatgttggattatggagacaaagaaaaaagttatagtggtaaaacaagctggggcccaaaagtgagagcgcaactgagagagtccgttaggtatggctttaaagtttaagcaattaagagtcccacgggcaaaaaacggcgctgggaaattttaaaatctgacagattttgtttcaaaatggacattttcactttttagccccatttttgaaaaataaaaaaaatgcctaatgtgaatatttgaacgagcttgtattgcttttatcttgctaatgacttttttggaccaaaatgtttcccttttttagtgacaacaatttgctggaaaaaggagcga

SEQ ID NO: 8144 - DNA, 1555 bp, Heterodera glycines
  unsure (1)..(1555): unsure at all n locations
caacaaatcgtccgaaatcgtcaattcgctcacttcttttgcatcgactggcagctgctccaagttgacaagaagagcatattcgacttcttcagtgctgtccacgtcgttgtccgatgtgtgggcaacaatgacttcttagtctgtccggtgctcagaaatcagtcgagacaaaacgtcggcatgtccaaaatttgcagatttaaaattttattgtaaaatcataattggacaaaattagggcccaacgctgcaatcgggaagccgtgtagatcgggatcccatttttattaccgaatatagccaagagaggcttatgatccgttaacagagtaaaattacgaccgtaaatcatcctgtgaaatttttgaacagcgaagatcaaagacaacgcttctcgttcaatttgggcgtaatttcgttccgcgggggtgagcgttcggctggcgtgctcgatgacgcgctccactccgtttggaaacacatggctgatcgtggctccgattccactttggctgtcatccgcagcgacaggcagaacactggcttcacattttgcttaaaatgcagcgtggcgttcgtcttcacacaatgtccgaagccaggttgaaacaccttcgggaaggaagccttgaaactggctgttgggtggcacgctcgaaagggatgatccaatccaatgccatgatgctcggcgcttcggtgtctgccactgaaagttcaagccgcattgtgactcctctgaacagaacgtcacacttgaaacttcccaacaacttcaatttgtggcccgaaaaggaacccactaatttaccaactttttccaacctcggttcgcccaaactttgccaaaccgcaagctgtatgatcgacaaatgtgaacacgaatcggctgcaagtttgatctggtggccattgacttgtaatggaatccatatccattctttggtcgcaccattcacactgaaagtcgaaaccacgacgtgtgattgaacacgtggatgagctgaattggtgcaaatatttctcgtgtgcccttgctttcgacatccaaaacatttgacgtccacaggaaatgaacagtctcgcaccgtcagagtcgctttttggtgaattcacggttaagctcaaaaatgcgcgggcgtcggcagttgttgtgttttgctaacacataaacaagataaatttattaaatgaataaacaataaaattagaatcacaaaataataataaaataacgacggagtcaaattagagagtccgaaaataaacaccgaatgcaaaataacacaaatgcaaagaatgagtcgatgggagaggacccatcaacaaataactaatcaataaaagtattcgtgtcgaaacttaataatattaaatatcaacacatccaacacgtttaaagatgaaaattgtcaaaattaacagcctaattttgaatattgcccaagtgaatttattatgatatatataaaataaaatttgttaattgaaataatacaaaaattatttattaaaatttaanggaattcatctaaaaaaaccagaatgattt

SEQ ID NO: 8145 - DNA, 3609 bp, Heterodera glycines
  unsure (1)..(3609): unsure at all n locations
ttgctaatacttataaaatatttttcgttttcaactactttaaatcagtatagtgatttantaaattaaaaagtttctaacattnaagcaaattcgttacattttagaattttttgnaaaatatatttatatcttnaggccggcagatttgttaattttaaaaattgtttttatatattacttaaatttgnaaaaactgacattagtttaaagtgtttttaactttagtattattatcgatttgttataattttcatttttttaaatgatataataagtttttttatggtttaaaatcctttttctaatcaacaagaattaattaacattcggcacgagaaggcatagaggatacagaatttagttatattggataaaaattgaataaataataatatttttaatattttatagtaataatttattttttatattccattcactttattttttgatatttttagtttttgtccgtttattttaggatccaatttctatattatttgttgtatttatttatcgcaattacataaaataaattaattttttaaattaattctaccttttattaaacattttaatatgttattctttttgaattatcaagaaattttctttgatctctgcgtggccggagaggccgcaatgcgccgaaaatatttaatttatttcaatttttcaaaggttgtttaattttctgcttctttttttgttttctaatttgttattaaatatgtgttaatgtattcgaaggtgcgccctcgctacggtaatttttttcgataaaacagtactaatgtgtcttaaacttttttttgattttatattcatgaagagactaaacatttaatatttattataattttttacaatatattttaatgaagttttactcttatagatggtcaacaaatgagataattattgttaaaaatattaacgcatttatttttaactgtttttcagtatgataaacaactaatattttgattaataaaagatataaaatattttactgatttagtatgttatagacattttgttataatttgatttaatttgaagtattaatttaatttattatttttactcctttaatgtgtagattttttctatgcaaaattaattattttaaaagttaattttatgtgattattaattaaataatattttattcgatgataattttcattttgtttttattaaaattgtataattgatggtttgcctgtatatttttatttgtttttataccctttttataagattttaatcattaaaaaaattcaattattaaatttacaaagaaattttccatgtcacacgttatcataactcgttgaatcctcctctatagacatgacaatacgaaaatgtaggagcaataatttttataaaaatatgctttatctttaacttatatagaatattttattttattttgaagattaataggaattttttgtatttaaatttatttcttgttaataaaaatttagttcacaaccataaatctattttctaaatgtatttattaaaaatacatctaaaaaaactaaattttgcactcgtcatttaagaaattgtattgagttttattattcgaatatggaaacttatgtagattcattaaatattacaaaacatataattaataataagatttttagcgaacttaacacaataataattattgattaattttgttgtctttttaaaatttaatcttattacttcttcagttaacaactgaataatttgtaatattttgtttgattttgtcctattttgaatttaaaatttatatgtttgaaaaatttatctatatttctggattaatttactactcttgaatttattttagctttaattcactaatactactgtttattttcagaatggttaataatcaagctttgtcaacgtgttgtttgaaatgatttttgcagctacaaaaagtctttgctctatgtcttaatcattttaaatagaaattaataatttatatttaatttaaagcggtaaaagttaatgaaaattggttaaaaactagctgtatgtcatgcatcctctatgccttctcgtgccgaatgttaattaattcttgttgattagaaaaaagattttaaaccataaaaaaaacttattatatcatttaaaaaaaatgaaaattataacaaatcgataataatactaaagttaaaaacactttaaactaatgtcagttgttcaaaatttaagtaatatataaaaacaatttttaaatttaacaaatctgccgacctaaagaatataaatatattttcaaaaaaaattctaaaatataacgaatttgcttaaatgttagtaacttttaatttataaaatcactatactgattaagttagttgaaaacgaaaaattattttataagtattagcaaatttagaaaattaaaatatttgtaaacggtgtgcgaaattttctaattaaaaataatattatgctagattttaaaccataaaaatcgagccaaaaaacttattggtacttaatacgacgaaaaaatttacgcactgattctcaagaaaaagagaattattgatctgcttaacgatttaaatggaaaattatattaaaaaaaaaattattttgttaaaatctcataccgaaagccctattaaattctcatttggaaaataaattaattttaatgctaatatataacaataaaaacaacaatataaaggaatggaacccaattaagttaaatattttttataaaaaatgttaaattagcaattatttggtgctttagcttcttatgttatttgctacaagaaaaatgcttttctttcatttccaataaagatattaaataattaataattagaaaaaaagataaacccacagggcgtaaaactaaaagtataatgactaaacatttttttgtccgaagctgaataaattcactatgagaagaaaaaatttaatgaagaaaaaatagttcagaatgaaatataaaatccgcatgtaatagatttttaacagcaaattccaagtgcttaataatagctatacaagaaataaagaaataaatcatggcattcattcttacaaaatgttttttctgcatgttgtggccattaaaaatgcaaaataaaatatttataaaatttgaaaaatgtcaaaaaaaataaataaataaataggtattttaacaataaatttcacgtattcctaaaccatcattgatagttattttatattgcaatataattattatttgtatctttatttttctcatttatttataatgcataagcgaattaaatagttgattttgaactttaatttttattcattctgtataaaagaatgaatgtcaatttttaaattaattaaaaatattttcaagaatttaatttttaaaattgcattaatcaatattaaaaaaattcaaaaaccatatatatttagttagtgttttaattaatttatacgaaagtaatgaatctttaaaaggcaggtatataaactatttgcgtgcagatctgttcgtaaccatttataaattattttaatttcgaattttcccctgatcgggattgcaggagtttttcgttgaaa

SEQ ID NO: 8146 - DNA, 6578 bp, Heterodera glycines
aagaaggacgagatttctagtacaattaggcagtttaacttttcaatcctattgaatgagaataaaaggcgaataggaaaacaaacaaataatgatcagagaaaacgcatcaaaaaaggataaaatattctctaccaatttccttcctttaaatctatgcccaaaacttggtacgaagggtcggatggagttcgtcggtgactttggcaaagtaattgccgcgttgttctgaattcaaatgctccatcggaaaggaaaaaactgtgcgaacgaaccgtccaactgggcttgcacttgagccctaacgtcctcaggctggccctggggcggcaagtcgaattcctggatggtttccccgtcagagctgtgaaaggaagggaacgtctccagcagaggaaggggggggggggggatgtcacgtgaatgtgcgccaattgttgcgcccacgcttcgccaagtccccggctgaatagagaacgcccggaacagctgtcgaactgcaacaaatcccatgctggtagcacaacgcgtagctgatctgttccaattcgctgagtttgatccgaggttcggcagtgtcgataacgacagtgcagcgcaaaggctgggcggttccctgtaaaaaatggaaaaggtagtgagagcggggtgtcaatttgtcaataaaaactcacttggatagtccgatggccgaccaaaagaaattccgtcagtgaggaatgcattgcctgaaattcaacataattgtccaacatccaatttgaaagtgcattcgacccttttgtccagcacagtgcccggctgacaattctgctcaggtgcgcgaccgcccgggcgaacgttgttcggaatgatgcgatagtttgagttacgttgacacacaatcagtgtcaacgcaggcttcttcgacattttgcgttccttcgtcagttcagcgaaagcagtggcgaatgccccgccctcccaatatgccaccttcaattggtctcctttttgcaactcttccgtctcgcccacctttttgtattcgccttccgaagcaccagctctgaacacgaagatgtgttcagggaagaacccgtttttggcattgaaagtcatcagtgcctccttgaccgcgttgaccatcggagaagccatttgtacggtggcaacacgcggctgctgcatccaataggtgccattcatctgcagcaagtgctcggagatcgtgtaggccatctgggaaacggcaaaatcaaactctgggacagaagcagcagcgaccgtcaagcccacttacgccaacaatcgtcggaatggccggcgcttttcccgtacgtcgttcgaataaagtctgtggcggcgcgtgggacatgtccaagccgaaaaacatccgttttctacccaaccattgttcggaactgataatgaaactggttcaaattctcacgaccaagcacttacagaatgtcatagcgaatcctattagcctctttgaatgcctgtgcagcacaaatttcataattggcaccgcccattttcaggttcgtcttcagcatgatgttgtcaaggaccatgatggcaccctggcgaccaagggccttgtccacggttttaggcgcgacatgttgagtcagaacaccttaagaagaaagagatggatggacaagagggaaagagagagagatagggagagagagaggggagaagagagggaaagagagaggggagagagaaatggatggacaagagggaaagagagagagatagggagagagagaggggagaagagagggaaagatagggaaagagagaggggagaaagagaggggagaagagagaggggggagagagagatggatggacaagagggaaagagagagagatggatagacaagagggaaagagagagaggggagaagagagggaaagatagggaaagagagaggggagagagagagaggaaagagaggggagagagagaggggagagagagaggggagaagagagagagagagatagggaaagggagaggggagagagagaggggagaagagggagagagcgcttgccatgttcaatttcctgaagtttaaaaacgtggtgaatatcaccagcgtgagccgactccttcccaggcgcgaagaaaagcacaaatttacagcgattgtttgcataataggcgaattgttcactaacatgctcactaaaagaatttaaaggatggctatttgtctgtccgttcatcccatcccaaataaaaccaaaactgattttttgtccaactcacatcgatgtgtcctcaaaattgtcgactcgtggtggcatttccatctgaaccccgcgcgcatgggcacatcgaatcaaacactcacagaacattctgacaacaatggggccattgaattcgctctgactccgttgacccacctgcactggtccctttgaacggagttttgcacgataacaaccgcccaaaccttcggaaatttacaggggacagaataacgaagaggcaatggctgtccacggtcagccaaacggaagtccaacactaaaaaaaagccgaacaaaatcaatgctaaattcgaaagacgcaactgaccaccacgattgttcggttcgattttctcaatcggcgccgagaagcaaattgccggcgggtaaaggagttgcgcttccgcttgcatcatattggtctcgacacgaatttcgtgcgcacgaaagaatgggttggcattttggatcatccctttgtcacgctgtgtctcaatgccacgcggcaaatcgacgggcagaacctggcattttttgatcatttgttcggcgagtttgggcgtctgtttgtccaatgacacacgttgtccatcgctaaacgaagtaaaaaaaaatacaaaaatacacaatgttaaacgaaatctgtccagggatttctgtaatcgcccacgggatattgtatccctaaaatggcaaacccgaataaagttggactcacacaatgttcagcacttccatcgggaagtacgattcctgattgcccctgcgatggatgacacacgcaaggcacgggtagcgcagccgcctgttgtacttttggtcgtaatactgcaccaaattcgtctgatggttgtcgatcgtaaaagttatttcgttggctccgcggtcagtcaaacccgaagcagagaaagtcatctgaaagggatgcaatgaaaaggaacacaaaaggaacagtccgaagaaacgacctgattttcaggcaaatggattgtttggacggcaaggcctgagtttgatgaaatttgagtaattctgaggttttcgaaatgttacctttgatttgcttgttaacaacgcgagccttctgctgaacgtcactttcgagacggtgaggatcggaattgatgaagtaaccgacgaaatcgacgagtccaatggccggaaagaaagccgatttcttggctgaaacaacgacattttgagtgaatggcgcatagcgtaccgtccaactgaatgacggcagtgctctgctggggactgtcgccgacgaagcgcacattcttctgcatgccctccttgcaaatgagcgggatgccctgcagctgcaaaacgctgttcttctcaaacattcgatttccgaagacaaagtgttgatttctaaaacgattcattgtcagtgcacaaccacccacttccatttactttgaacacgccgaagagatttaaatgtgaaaccaacgacaaaatgcttacttttcgtacattcgctgcgtgctaagcaactccaaaaattggcacaccgattggtcaccgcccggctccgtcactttcatattgcgaacctccacttcttctgtggcagtcagaaaggccttcacgcgttcgcagctgcgcagatacgcacggctacggacggacaacgcattctgcggaattgaaatgcaaaactaacaataagcaaagaagtaaataacataaacaagggcaaagggacccaaaaataaggcaaaggcgattttgaagggaatgccatgccaacaaattgaatctgtagtctctgagttattcaaatcggtttctttaatgcgctttacattttcggcgctactttaaaagcgtggcgttttgaaaaatttttcactttttttgttctatttttttacacatataatgatgatgaatattacggtaccgaattcaacgtcaacacgaataaatgtgaaggactctgggctcaattgaaacaaaagacgaaaagaattcatggaaccagtacaaatttaacgaattcatacatgtgtgaacaaatttttcgacttaatgctagggctaaaggaaaaactattattaatgctttctgtgatctccttcgttataattatacttttattccccataattttactgttaatgcttaatattatcattatgtgtaaataaaaatttaaaaaaaaatgtgtcaaaaaaaagtgaaaaattttcaaaatggacctctttgcaactagcgccatattttttatttaaaaataaggtcataacaagaaatttaatcatataaatgggtgttttaataaaaaaataaaataaatattttaatttataaaaaaaaagttttcaaggtggtaattttttatattattttgacgaaaataaatttttaagcttttgttcaaattttaaatacaaaacgtccgttttaattttgattaaataaggaaataaatattattcgtatctttaataaaaaaaaaacgaaatgccaatccggcttaaaatgaattgttaaagtggtgctaggtcgatccacaaaaaaactcagtgtgggcgatccaaaaaaaaactcagtgtgggcgatccaaaaaaaaactcagtgattgataaaattaaataataaatttaattattcaattcacaaaatcacggtgccgtccggttaaccctaatgtacgacgggcgcaagtcattttcaaattttttaatttttcaatttttcacatcacttctcgccaattttctcccttttgtagtagacaccgcctgacgcgattgatacctttttgtagagctcatcgagctgtacaaaaaaaaccgctggtaccggcacgcttagcttgggttggccaccgacagggtcgggggcgaggctgaggctcctccggcatatgtacccgacccatgacgggctccaagtgaatggagcaagaaccggaccgggtctgtgagatagcccttgaaaaactgtacaaaaaattgttcttaactgggccggtacggattccggatcaggcatttttggtgccccgaaagtggtgcgatcggcttccggaaaatgaccaatcaatcactgagtttttttggatcgactcaccacgatttaaaaccaccaaatcaaaatttaaaaaaaaaaaatttcccataactttgcttaaaagcaaccatttaattcttgatatcattcaataggcctaagtgttttctaatagcctggaaatttaaaaaattttttttattcattttcaacaagttctggccaaaagtacaccggaacaagattttcaaatgttttgaccatagcttttttgaaactcaacataatttttgaaaaaattttcattttaaagtttttatataaagacatagcatcacattcatttaataaaagagatgaataaattattttcgaataaaataatttctattgcatatcaatcaacaaattatgacatcatcgaatctacgaaattcacttaaaagcgcttgtgagacccgctggtgccagggttactaagcacactctcagagtcatgcacttgcggatggtctcctgaaaaattaattcattaaaataaataaaaataaattttaataattatttcaaacccttgggggcatccaagctgatttgcccaacatgaatgcccaacgcggcacagttgctgtcaattgtgccaacttgttctcggaactggacagccaaatcggcgttggcaccggcatgggaagcggcggaagcggcaatttcgaacatggcacggacgaagccgagactgcgagcacactcatctaataggagccaaattaaagaaattgaatttcaattaaaaaaataaatgattttaaagggatttaattgaggatttggtacctgatgatgattgagttgcgttgatctcgttgatgagtgtttgactaccattgccagggcaccaaattgttttcagttggttttccaccgcagcggcgactctttcggcactcatacaaagcgaagactttggcatcgaagcggagaatgtgccggtgtgatctttcatcatcgaaacgacatgttggctgccaggacagcatggatctttttaaacaaaaatgaactttaattaaaatttttattatttaatacggggtgccgaaaagcagcatttgcacagcaaacagacaattgcgacgatggaaatgattgaggagcagaaagatcaatccattttctgagaggatttgaacttttagatgatgagtgaatgtgacttgaatgatggttttatgcaattctcttcagagtccacatatgcaatgaatgaaaggtaatttaataccacttt

SEQ ID NO: 8147 - DNA, 1175 bp, Heterodera glycines
ttgtttgacattagactttagcaaattgacactttttaaattgaatttggcattttatttggtgccaattttgggaagtcagtgaaaaagggcaaaaatggagtgagaatttacaacggagaaaacacattcttctgatttaaaatgaaactattttcgtgctgaattttgttgatataatattttcaaaaaactggatcactaccacacccatctgattacgcaatcaataagccttaatcaagactcttggtctttatccgctcttcaacagcagcactttgaatcaaatgattgctgtttgtcaaaagttttctctatggtcaagaattaaatttttttgaaatttctactctaccaagagaaattttgcttaagaattccatggtagcatacgaaacgaattagcacacgattgacaactgtctgtctaccatactacctttgatgaaccgaacagtgagggcgactgggacctgctgtgcatacggtatcgtatgccaccctttgccaattgtggcaaagtgccattcactgcattattgtaacagttgttgttgttgttgctgttgatgttcatctttcggtgctgcttctgttgctgcttcatcatatgtatcttcggcttcatcgtgtccaaaatgcacattccgccgccgccgccgttctctttgccctcggggagcggcggcgccgaaagtgttggcccattgcgcagttcgtcgtcacttgacaacaatggcacggatgccaacattgtcgccgatgctttgcctcctttgtgaaggttgccgtcttcgtctgccaacgccgaatcgcccataataaagcggtggaaaagcggcacaattataaacagaaagtctgttttgggttattaatttaattaacaaatatatacaaatgatgatgactctcgagaatcgaaattgagaattgtcaagcacttttgagtcggtctcgactttcagcaatggcacagaccatattgtggcttcatttttttgggctgttcgtttgtgaaagactcgggaaaagaaagaaaacaaaagaaaacaaaaactgtttgggcgggtgcggtgcattttgtgccgaacccgttttggcgttttgggaggaggagaagtggaatggaaaggggcgatggagcggcggcgaaaaggccgacggaacgt

SEQ ID NO: 8148 - DNA, 5206 bp, Heterodera glycines
  unsure (1)..(5206): unsure at all n locations
ggggggggggaaggttggggaaggaattttgtgagaagggtcacttgatcatgcacgcccgagacacacggattaatctaccatattcgagctgacgnaatggatattggaggctattggtacggtatttgaaaatttcagtaaaataaaatgaagaaggaaaatctctgagatttgggggatcaggaatatatctaatatcatcggttctaatttcatagttttttgatatagaagctgagctggtcaacatttaggcatgtccggtattaattgagcgaattcggcatttcaaagtgcccttaactgttaattgtggtatatgggcattacagtagcatactgtatatatgcacacttacgctgtctgcggcacgcagttgagaaatggcactgttctcagaatggatgccatccaatcgctgacatttggcaatgcaatttgccggttgggccacagttggcactcgtcagcagcaacggcgccatttgtgcgcgatacacacgaggcactttgatcaacaccgtcacagtgccgttcggcaacaaacagtggattcatcggattggaactaattgttcaaaaaatcagtatattttatccaaagaaatgggagcaataaaagttgctgatcgttgcggatgagtttttcaaagtgcctaacactctttaccaacagtcctgatcgttgattggctaaccccttttacgccttacagtatttctcttagtattttctagagcccggacgggatcgagattctaccaggattttcccgtgggttgtgcctttcacagcttttttttaaaaaaagagcccggatcgggagcttgttcaaatagagatttctactgtagtatgtactgcattaacaaagcgcgtgccactgaccgtcgatggcatcgccggccacagctgtgctgaaaactgcaaaagccgcactgttttgtactcgtggtcagctgacggaaataatccataacattggagacagcctttaaaattttggcatttttttcctaaacgatacagtgggcctgctaggtcgacacttatgagtctaatcactgcatgttttttcagctaatttggcgaaagcatttggaatgagctttcttagttgaaatttttaagtaactattaagaattgtgaaatcttttatttgaataaagtattttattttctatttttcgtttaattttaactcttcccataataagccgacactgacccagagataattagagacccaattaaaggtctaatttgttttgtcatattatccgttacggcctcccaaaaaaaattttatcgtgtaataatgggaacatggggtgtgtagttcgacaatgcttaaactgggatcttagcatcggaaaatttcgatttggccaagggagctcagcccaaatgagttcccgactgcccacatcatccatcacctgtccccaacgttctcgtaacagtttgaaaaacatgtggttccggcacccgcttctgcccggcaacaactggtcaaagtaagagcgctgccaacggggatcgtcgcctcgaagccaaacgccttttttttggggggggggggacggttggtgataatttgaatgcttttctatgctgtctttgcttatacatggtccccaatcggtccattccgcgcaattctccgccctcgtcgcattgccaagcatggacacgagttgcgcatcgaaaggggaaatggagggtgatagttaataaattaatgcgtccgtcgacaaaagacggttctaactaacaattgcaaataaagccgggacaggaccggatcctgtcggggcttttccgtactcctaatcctgatccgggtatttttggaaaatcgacccgggtggggagtcgtgaaaaacgggatttttaaccctgaaatccggtccgggtccatctgggaatccatgtattcgcctttttttcaatgtcacttttaaccaaatccccagatgaacttcccgatcatgatcctgaacttttcaagagcccgggtctaactataagcccggaattcgccaatgaattcttaccggttgaaaatggcagcaaaatgagtgggaaaacgcattggagaaagtaggagatggtcattggcttgatcatcgctcaagagtctcggcaccggagggcgggggagggaggggcaatttgttgagtttcgaattttgatttaaaaaattcgctcttctgctgcaacaattaaaactgcttgacaactatgaggaaggaatgttgcacacaaatgactgcaaagatcacggtttccatacgattaaaccccatttaaacaaatttatgccacccaaaggcattaagttggaattaaattccaacccccgaggggaaaagagaccggtccatcggcgcgtcaatttcacttcgatggactatgataatgatgatgctgtcataaatttcaagttttgttctgtgttataaattgatgattgaaatacaaaaaccagatttgccaaatattcgtactcttcgttcaagactttacctaaatttcaaggggaaaacataaaacgagaatttgtttccgacttttgttcaagttcggttcgtgattagaaattggtcaaaatagatgtcatatttgttattagcagagaccccaaaaactaccgcgaaccttttcacaaaatttttaactagcgccagtaaattcgtgctagtttttagtgaagctcgtgagaaaaaacgaaaaattttctcgagacgagaccgaaactctcgagtttcacttttagtaattttaaatccaaccgggtattttttgtatcctaattgaatttgctcggtttaaatgaataatgaacgaatttatcaatgaatattaattaaaatgacataagcgcaattagttaataatgcaattaataataataccacctatgcattgataccaccaacaatttttcacaacggctaattacggtcaatatgcaattttaaaagatgattggttcagggagggcatccgcaattcagattaaaagatattgacatattaaagcgattcaaaaatgcccgccctttcccccgacttttcgatcggtcgttgattgtctctgatcgaaattggctcctcattatcgttcattttaaacggctgatgccattctcgcacatccgtgcgctgcgcgcgttggcagctgtttgagcagtgccggcaacaaacaaacaaaaaaacatttgtgtcggatttgtgtggccaaattttggccatctccggcagataatttgatggaagaatgacgaatgaccaaagaaaataaaacaattaattagcaaaattaataaaatagaaaagagcagctattattacgaactaaaatggacattaattagtcagaaaaatggacatgtgattggcctgcagatttatgatcagcaaatgggccgcaaaaaggcggcttctgatcgattcccggggattcaatcctacaaaatttcaataatcagggaactaatccaaatctcgcgcgtttttgagtgtttaaactgatagaaattaattatgtccttcgtaattaacttatcgtcggtttgtggcaccaataaaattaaaatttaattgtttattggattttaatgaaggcggaagcgatcatttgtatatattgaaatgatgccaaacagagaaattttaaaaaaaagttttgaaatccctgcaacgcatcatccccaaaaaaattatgaaaaaagtgatcaaaacaaagtttaaaaaatgaaattacaacgattataggtggatatgagatcggtgaatgaatggtcgagagtgaaaaataaatcactgattgaaagaaaagggaaagagggggaggagggcggcagaacgcaacgtgttaaaagagcaaaagcacaaaaaaactaataataattcaaatcaattaattaattagttaagttcggaaagagagaatggggaaaagagagaaaaaaaggaaattaatggacgaacgaattaattaattaattacaaataaacaaacaccgggggcgaaatgaatgaattctgatcagaaaacagctgtcaattgatcaatttaaatttaattgcattggaaaaaacgaaaaaatggaaaaagcgaaaagaaaaaagaaaaattatgggctgaaaaaagaggaacttcggagcaacagcagctccaaaatgggaaaaagaatggacgaagtgatcggaaagacattcgaaattatcaaaattttgatcagcatccttctggaaaaaatgaaaagcaggaattcgaatcatttggttttacttttcctaattaatctttttggaattggttttttttaggtaatggggaacaaaattgacttttgctggtttttatttatttgttttaaaaatattttgaaggtaaactgatcttgaatttagtaattaattagaacgcaaattgtgaatccgcctttttgcgtcggaccaaaaaaaaaagtttaaatcctatcacgatcactttgacaaagaaaaaatgcaaagcactttttcaaaaaaaaaagtgaagcgataatttaaaacggcttcaacgagaatttttttaacggttttactaaaaaatttaattttcccactttttgccattttaaactgccaaaagatggaaaagaaagggaacaaaaatggaaaaaccatttgtagcatgagcactaagaaagtgaaaaaaagaaattaaggcgatgggatgtgtggtattaaataaaaattcaaaatgatcggttgggattggcgttatatgtcatcaaaaggaaaaaagaaacgaattaataatacaaatgacggactattaattttttttaagggacgaaaatggacggacggaggcactttaagcacaaaaatggcggaaagcatccataaaaatgaatataataaaaaggaacaaaaacaacgcaaattcatcaaacttttttttttgtctttttcattgtgtatcaaaatcaatcaatgatttgaaacataaaataatcataataataaaagagagagagagatgaagagaacacacaaaaaagcattggcccgtaatcactgaaagagttggagagagagggaaaaggttttttaattaaacaaaacgaagaaaaacaaaacaaaacggcggaataataataataataaagtaataaaataataataataataaaattggagaag

SEQ ID NO: 8149 - DNA, 3097 bp, Heterodera glycines
atttcgtggcgatatattaagtaaaatcacagcagaaaaagataaaaaaattttaaactgttttcaagacggatttttaaatcagaaatttcttgctattctatatgagagaattagaagaatgataaaagatgtcacatataattggtgcaaaaattatatttatgaaattttattaaaaacgcattttaaaagattggaaaatcaataattaactcaataaacataaaaaatacatattttagttaaattaatgaaaaatcgtggcaaaaaagcaaaaattccggcaatttaagataatgtctcgcctctaaataaatgaatgaaccaattagaatgttaaaaaagaaatattttggaaatagcttttgagaattatcgtatttttaatgatcaatggacctagcaacatgttaagtcgcactttaaataaagtaataaatattttaaagcaaatatatttattatttttgtggaagtctcgcgctctcaaaattaccgatataaagaagcttaatgtgtcgaaaaatacattgatatttgcaactagtgttaagccccaacccacgacccgacccgagacgttttttgcgcctattccccgccccgacccccgatatgtcgcccccctccgaggtccccggcccccgacttttggtgatgcgacatttgcggcgcttacatttgcggcgctgacacttgcggcgcagacagttgcggcgctcagtcaaagcgacacttgcggcgcagacatttgcggcgtgacacttgcggcgccgacacttgcggcgacgacacttgcggcgccgacacttccggcgcccagtcaaaaggacacttgcggcgccgacacttgcggcgcccagtcaaaaggacatttgcggcggcgcaaaattcaacgaccccaaaattatttcaacaatttatttccattaaaaacattgataatgactctctcagtcccattcttcaaagcctttcatccctaggcgatattgcaacgcatgaatgtgattaattatatcagcttgctttttgttttccttatggtcaaaatcgatgactaatcgtcggatcgcttcatcatttcttaaatatttttttaagcgtggcctttcagcaattccacgagttgggtcaatttcataaggtctcagacggttttgttggtgttcttcctcatttttgatggcgataatgaaccttattgaaattattttattacagtacccatttatactttgaaaatgctgggtggggcgaagtgaaacgttttctgaagctgttatgccacctaagaaattaattgcaatatcgcctagggatgaaaggctttgaagaatgggactgagagagtcattatcaatgtttttaatggaaataaattgttgaaatatttttggggtcgttgaattttgcgccgccgcaaatgtccttttgactgggcgccgcaagtgtcggcgccgcaagtgtccttttgactgggcgccgcaagtgtcggcgccgcaagtgtcgcgccgcaagtgtcggcgccgcaaatgtcctcgccgcaagtgtctgcgccgcaagtgtcgctttgactgggcgccgcaaatgtctgcgccgcaagtgtcagcgccgcaaatgtcagcgccgcaaatgtcggccaatcggacgaatcggagggaaaggggcagacaaagcggatcgacgatgaatttgtacagaagatgcacttcgaagtgatcagagacctttgcgagaacattcataaaaccgatgagatggttcagcagaaatttgcaaaaattataaaaggtaaaaaaataaaattagaattttattggcattttaattgaaaaaataattttaaattggaaaaggaaaggggggggggaggcactctatttcttaaaatagatttgttaaaagtgccgcttttcaacaaaatgccgtcctttccccccgtccctttttggcattttaatttaagggctaactgagagcaaagaatgtcggcagaatttgaattcatttttgaaaaaggaacaaatcaaaaagattttcgaagtgattggaattccatttgaagaaaaagactttgaaaaccctgaacaaaaaatggaattttcatctgatcaatcggaagaaaaaggcaaagaaacgcagaaaaaagggaggaaaaatcgacgggataaaaatgggcaaaaaactcaaaataaaaatgaggaaaaatgggaaagtgaaaaagaaagtggcgaaaaatggacaaaaaatgaggaagaaaaaatgccaaaggaagaaaaagaaagccaaaaagtgccaaaggaagaaaaagaaagccaaaaagtgccaattggagaagaaaaaagtgaacccgtcccagaagaagaggaagaagaacttcctaacacaaaaggtgaatttaaaggcctttaaagtgttaattaattcatttgattaagaattttgtgatgaaaattttatttttggagtttataaaaaatattttatggaaacggaaaaaacggaggcggaaaaaacaatcatttgggtggacataatgacaataggcaatgaaatagaaggacaattaaaaggcattgaagaaatgaaaaagttaaattttataaattatttttattttatggacggaaaattattggaaaatttaaaagaaaaatggcaaaaaattccaaaaacaaaaattgaaaaaagaaattacgaaaaattaattttgttaagagaaaaaatgctcgatattttaaatgaaattttaacactttgcgaattgagagaaaaaaatggacaaaaaagtgaagcaaacgcagagaaaaatgaaaaagaatatttattgggcaaaatccatcgaaaaaatttaacaaatgccatcaaaatgggcgaatttgaagaaaaatggaacggcacggcaaaggacgaaaaattaatgaatttattcaaaaataattatttaattacctcaaaattaggcaaatttagaagcgatgcgcaaaaaatgacgaaacaaattgaaattggtagtgaaatattaaagaaaaaaataaaataataatttctaaatattaaaaatattataattaatttcagagcaaatttt

SEQ ID NO: 8150 - DNA, 3608 bp, Heterodera glycines
ggcctcctccgaacacttccggacgccctctccttatatggccaacaattgtgggccgacctgtcctctcctcagcctgcccccccccccccctcttctcttattcgccttcgcacattcattcttccgtcgatcactttcacacattctgcacaatgcctttttggagtctttttcaccgcaaccacaaccgatcgcagtcccccgacttcagtcgtcgtttaaccgtttcctctggccaaaatgcgtccgcttccaaaagtgactctgctcggtatcccttcggtctccaccaccaccaccgtcactcttctgcccgctcctcctccccaaaatcgcttctccgcttgtcctcctcctctcatccccaccaagttcagttccgttcccgcgacttcaaccgcgaccgttggtggcgagattggcccactgattggccccggatggacacaattgtgccaagagtaagtgacggggaaaacggaaagggaggaggaaaaggggcaaagggagagggacaattccattgccatttgaagagaatcgaacaaaattacaaaattagggtcattaaattagccttttccatgcattgtttgctttttgtttatgtttacatttctcttccgttcttctgtttcccaatgctttcgctttcttttggaaatgcatcacaaaataatcggatgaatttgatggggggggggcggagagaggaagtgatggaatgggagaaatgcaagagtttatcagagaagcggcggcggaggccgtcccctcccctttttctccccccccccctccccctcccttctcatgatttgcctgatgatgacaaatggaaggttttgcaaaaatgacccccgtatattttatagattatttttattctatggacgaaacattattggaacattcaacagaaaaatggcaaaaaattccaaaaacaaaaattgaaaaaagaaattacgaaaaattaattttgttaagagaaaaaatgctcgatattttaaatgaaattttaacactttgcgaattgagagaaaaaaatggacaaaaaagtgaagcaaacgcagagaaaaatgaaaaagaatatttattgggcaaaatccatcgaaaaaatttaacaaatgccatcaaaatgggcgaatttgaagaaaaatggaacggcacggcaaaggacgaaaaattaatgaatttattcaaaaataattatttaattacctcaaaattaggcaaatttagaagcgatgcgcaaaaaatgacgaaacaaattgaaattggtagtgaaatattaaagaaaaaataaaataataatttctaaatattaaaaatattattattaatttcagagcaaattttattcgatcgaatgatggccaaagaagcgggaaaagaattggccaattgcttaagcccatccttcgccaaagcgacgcagcaattaattagcgacgaattggaccaacaaaactcacaaaaggtaattagcgctaattagcaggttaataaatgaattttacggaagttagcttgagcaatttgtggaggaaagggcaattaatggccaaaggacggagggaaagtcacggaaaaagcgcgaaaaacgaatcaaagcggcgataaacaaagtgaaaggaatggtgggcgaatgggtgagaaaagggaaatgaaaaaagaatcggattaatatttttaatttaattaaattaattaatttaatttaaattaaataattaaaatttttaattttaattccatctttcagtcaaaccatcaggccaaacttttgatttcgggctcctttctgctcggactgaacacaaccgattcggacatcgatttgatttgcgttgtgccgggaaaagcgatcgaaaaagaacacttttttggagagccaaacgaaatttgtgttgagagggaatgtgaaaagggcggcagacaaaaggacactttggcacaatcattttattgccaattgtgtggggtaattaattattaattaaataattaattaattattatttttgtaaaacattcgaatttaaaatatttttcacaaatgcatcagaatggaaaagttggcgatcttctaaagatcaccaaaggtcaaatagcgatgatcaaattcactttcgatggcatcgattttgacatttcattggtggcaattcccaaaatggaaacattggcacagcgaataacggacagaacattaaagcattatgtaaacaaattttacaccgaaaattttgaacaccgacagatgcttcgcgttttatcgagtaattaaaaaatcaaaaaatattaattatgtgtaattaattattcaattaattaattagctataattgatttaggttatctctcaaacgttcacattgtcaaattatttgacgagagtcagaaaaagatatttattctaaacgacgatatttacgatgaaaaaataagacaaaatggcagaaattatgaaaatttgcgttttttgactttggcagtgaaattgtgggcaaaaggtattaaattaaattgtcctttttcaatttgcaaattatttttgactttttccagccaatttcatttactccaacaaatttggctttttgaatggcgtcattttgacaattatgacatcaaaaatcgtgcttctttacccgaattcgtcgttgcgctttttacttctcaagtttttcttaatttacgcggcgaggttaaaaagaaatgaaaaaagaaattaattaaaaattaattaatttaatttttgaaaattaaaaagagagagagaaagagagagccaatgggtaattaattaaccaaaaataaatatttaattattcatttagtaaaatcaaataaattgaacatttagaactggtgggatgccaattcaactcgaacaaatcgaagaaaagtcaaaaatgagcccatttttgactaaaaatcccatggaaaatgaaatgaaaatttacacgacgattttcccggagcaaaacgccgcacgattgatcacttatgtaaacgcaaaaataatcagaaaagcaatgatcgaaggcaaataattaattacttaatttaattaaattatcatgcattttagcgctgaacaaaatgataaattcggatgattggccaacaattttagcgacaaattcaatgaattttgttgaaaaagtgagagaattttccaatttacaaataatttattgcccttttcagtacaaaacttttgtcgcaattaattgtcttggtcaaaacggagctttcgtccgcaatttttgccaatttgtcgaaggtcgaattcgtcttcagatgacttatgacattggccacagaggggcgacgacgaattggcacatttacccggcactattccaagaaacatgccaaatcacacacaaattggagcaaattccagcaaaatttcggtagaatttgcaaaaaggctgacaatttaaattaggaattgaattatatttattaattgcccattttccttccagctcaaattaccaccaatgcaaagtttggctgattggctctgatcagtcgctgaatggtactgaccagcggatgatcaatgggcagctgcgcaacttcgactgggc

SEQ ID NO: 8151 - DNA, 5451 bp, Heterodera glycines
gaggtcattccgctgcatggaaaaagccaaaaattggaggaaaagtcggaagacttacaaaagtgtattttacacggtcaatttttgtctgacccaagccccacgagagtatttatcatgtgatcacatccttctctttgagaatcacatttaaattgtgccatattcggcattacaaacaataattaatgaagttaacattaaaagttaaagaattctatcaatgttgtttgtacatgaattatattggcaaaattcaagaaaatataagggtttccaaaatcatatttctcaacaaaaaataggctctattgcagttttacacgaccaacctaataattttttctagaagcatccaattaaaaaagtttttttgaatttttctggtcatattttttgaaacatgaattatttgaaattttgcatgataatagagaactcttacgtctattaaataataccgtctttttagggtcgtgtaaactgcattagagcccaaaaatctaattaacactaaagaggtacgtcccatcagacttattatttatgtagccggaattgttcgaccaaattacaatagtaagtaataatgtcagtgtttgtgtccattatgggttgcagatgatataaaagagggaataatggccgacgcgcaaaacagacaaagttcgaccaaggaaaagcggggagacgcggggggtgccgccttctcccctccgccgagaagcatttcgcggcttccgctcatccctcccccagcgaatgctccgccacacttcgcttcctaataaatgtccacttcaaacgaatgtattgattccatttgctcaccacaagttcgggtagaacatgcacagttgcgatgtaaagaaatgttcctgcagagaaaagcaaaacaattccggtgaattgggagggcgtcgtctcttcgtggacgccgctcaaagagtcatccgaagacgacgattgtatctgaaaggaaagaaccaattaattatctctttcttttttggtacccccagcacagaccgtatgcagaaagatgaaagtgagtacagtaccaattggggacgaaagcgaaaaaatgagtaagtggcgacggactcgcgctttgtccattccgctggccagcaaaatgctaatcagagcaaaagcagtgggcgcctaaagaaacaccgcatttgtagagattgattggataggacagactaactgaccttgtgcaacattatggccacaaagacgaggatttgaagttcgagttgagaaccggcactcgacgcacttcccatggcaattccatcggctgcacttggaaaaaacaaaagcggacacctatttaagaacactcattttggtagaaacgcaccaaaagcgtggatgacaaggccgagggtgggcattcccttctgacggctgtgggacagtttggagagttggtcaatgacgtgcataaacagaaagccgaccagcagagagacgccgatcggtccgttcaacctttcgaaatcggtccgccgtgtcccttcctcgtgccattgtcccccctcttcgcccccattgtgcggttcgtctgccgttggcactttttctgcctttgcgtctttcttccgccggtctctcgccgttttcccttgtccaattgccccttttctctgctcattctcatcccaattttgcctgatatttctccgatgcattttttcattcgttttcctttctttttcctgtaatgaaaaaacccttccgttttaattttcttttcgtccactaccaaatttgaggctgcgtcttccgttttttccggagacattttcccaatttcacggtcattcgtttggacaaaggatgcagcggcaagtgaagaaatgccctcagggattataacgcaaaaagcagtgccaacgagaagcccagcgccgaaaatgctcgctatccgaactttcctctagaaatgaattgttcatactaattcttcaccaaaaagcacctcattaagcgaaaagaataacggaataaatccagccaaataagagccgataaacattgtcagcgaaatcaccgcgaggattggctcgtccatcatttcttatttatcaattaaaaatatttataataaaaatgattagagaatcgtgtcgaagttgaacatgggctttgattgaccataacaaacaaattaaatgacaaaaaaagtttttaaaaatgtatctaattgtaaactcgcaaaacaaataaataaatggttcaacgcatttcaatcccaaatttttgcgtgagttccttttcaattgccttgtgaatggcattcgcttcttctttgctcaatggccgttccatacttcggtaaataattcggtacgtttgactagtctttcccgtctttttgttttcaaattggtcgaagaaattgacctaaatgggaaagaatcaaggaagattagtttcttaaggtctaaggtgtcatcttttaaatcgcttaaaataatcattgagctcataaaatagaaaaatcaaaaattcacttccccagtccgccccattaactcctaattactcacctgttccacaatgtcacctcccaaacttctgatcacatcgtaaacatcagccttcagtgaatccacgccgttttgttttaccaaatcgggcaaccaaaaggacagatccatcgtcagttgtggctgtttgctgatagttttgtattttatcacttcgtccattctaagtccagtaaattgggaaagaaagccgctatctttggaccagaataatcgaatgtctgggattccataaaggaccatcgccagtcgttcgagtcctggaaaatgaaattggcctaataaaaccgataccaaaaatgtacaataccgattccgaaagcccatccgactttgctgccagcacccgcagaatcgagcagtttctgttcgatgatgccacagccaagcacttccagccaattgtcattgaaaaagacttccaattcgtaggatgggtgggtgaaggggaagtagcaagaagtccaccgcatcggcacattcggaccgaaaagcgattggcacagcgactccaacgtcattttgagttggacctccaaacatttggccgtgtccatggaatgtctctgttgcctcagttcatttctctctgcttcctcgaagagagagaacattctcgacattccgggacgttgttcagcgaacagttcatggagtgcataaagacgcacgcctaaaacatccgaatattggcaaaaggcacaaaaattgttgtttcatttcacattaatgcacatgcccaaagggtgcgccaaggcgaggccatgtccattgaagcagggaggggggggggggggggcttttaatggattttttccgaatattcaaattattgagaaatgataatacttagtttaccttcttttattcttcaacattactacctcgggacccattccccaaatagaaaccgttcccaaagtgtctaccttcaatctgatgaaaacaaggaaaatgcgtcctgtcgatttcgtcgcgtctgtacacatctccaacaaccaagaaattgtctagcccttgcttcaaaagtctaaattggtgtgccgaagtgtgcgcacgtaaacaatagtcgcggttgacataataagtgtcggaggcacgtcgactcggatggtcggaagggattagcagagagtcgaaattgtcaaaaatgctcaccaaccgaggctcatcctcacaaacggtgaaaagtggagaacttccacgaggctttctcaaaaacaatggtaataatggccaaccccaattaatcccaccggtaattagtgtcaaaaaaggcgatgattcgccgcttcaaaagttccaaaggatttccattctcacggagcagccgacggctcaacaaagatttgaccccttcggaaacattaaacaggtcgagatccggcgaaatgctgagaccatcgagttcaaaaggcacggaaggaagccccttgccagtgggagaatgaatggaagcaaattgtgaatcgggaacacccgcagaaaaagcacttaaaaatgagaatgaaaatagagcatttcctaaaaatacagacgcatgccagccaaagcattcacaaagctagtcttgcaaaaaaaaagttcaactcacttgaaatggatgcagcaacacactctaactcttggccacaataaattagaaaatttagaataaagcataattgactttcaattagtgttagattaaaaaatattaataagaaaaggaatcattcgaccttttaataactgtgaaatccaaaaatgaaaattcttctcattgaatgatgtctccgtatttcaatttctgttcctttatctttagtccgcttcccatcgttttttgggcgtgcaatcgttggtattccgcctcatcaacagttaaacctctctgcgcagcctttcgcttgaccaattccaattcaatccgatagttttgcacaatgataaatgcaaatttgccttaagaacacaatgttagtaacgatgaataattaactttcgattagttcacccggaaaaactttgctcgtcggcggatggttacgaaacaattcttccaaatgacgcattccatcgtctctctgcttccaaagtcgttcttcttctattctgacagcatcggcgattttgtgcttgttctgcgccatttcaggaaatgtttcaccctataaacattttttatgagtttctgcatttttaaattaccaattgttcaacaatgaccggcaccatcaaatgcatgctcatccgttccattccgagcatttgagaaccataaatcgtggcgcgtttaaacaattccttaattttacgcctgaaaatttaaaaactgactgattggaatgatttcctcacgagctctttttctgttgttgattagtaaaaccaattccatctgccaatgcaacggtcacagctcgcatatgatcggaaacgattcgataagcaacgtcaatactttctttgtcagagtccccaaatcggccttggtatttgtgtttttgagcagtacacttaaccaaaaaactaaattttataaattaccttttcgcaatggcaatgaataaacatttaaatttaggcccaattgtcaattgcctatattattttaaagaaatctaagggaaatgcaataagttaattcataacaaaatttgtatctttgtttaaagaaccttttgaatgacatcaaatattggaacaaacaaatcagtgtcatagttggatattttttgctgcaccactgacaccaatcgttcgagtcccattccacaatcgacgtatttgctggacagtggccttaacttagcattttcttccctaataataggataataatgatatttaaaaaaaagaaaaatcggtttacctgtagtactgaataaagactaaattccaaatttct

SEQ ID NO: 8152 - DNA, 2561 bp, Heterodera glycines
cacgcctctgctcattgtcagccttgcaaagcatttcttcagcattatgcaatttagtggctttgctgttagtaggcccagttgtcttaaaaaaaaaatttcggaatttcttacaaatgatttttttgaagtgttggccctctctgacaataaatttgcaaaataactcaaaaaagtggaaaggaaatgcgatataaatggacaaaaaagcgacaaggtttatacaatgcaaccaacaaatttgactttcgtttgttatttaaaaaacctttgaacataaaaatgtgaaaacgttggaatttgacaattttattagtgccggtcataccacttgacgtactgttttgaaaatggccaagataacatacctccagaggacggaaaggtggtgaaactgaatcaggaacagcggtaggagaagttgaggtgattgcgatgattgacgaagagcttgaagtggacaatgagccgggactgctgcgtttccttggctgcttctgctgaaaatcatttggtttaaaatacatagactttgctgtcatatgcatgaccattaaataagcctaattttataagcaacaaataaaacacaccttccccatatcagtttccccgaaattttttttagttttaaattaaaaaaataaaaacaaaaaaaattcgtatttttaagttaaataaatttttttgaaagaaattcattttaaacaaaaatcaaactttttttattagaaaattctataattgtaagaaattaaaaaactaaaagttcttcattttttaatttacatagaaaaaatatgagtgaaaacaggccactctccttttgtacatagtaatatgaagaattagctattttcaccttaggatcggtgtaattttgcaattgttgttgacccatcggtggaacgggagttggagcactgttttttgtcattgtcccaaagaatcggctgagtgtctatcaaaaaaaaaaattttttttttaaagtaagtataaaaactgttttgttctgtttcagatgccaggaaacctgttgcttcagtttgggtgttttgcctttgtccgtcaactccattggtttgctgttctcgtcgggagttgtgctggttcgatttatgcccgccatgcgcgcttttgtccgctgctcgcggtcgcgctgaaggcgacgacgttcagcacttaattttacataaacagtaacatgttaagttcaagttttgttaaattaattattgtcataaacctagtttgtagctcttcagcaactgtaggccaaattaattttatttttcccataaatgtctaaaagctgagaattaaatcatttttaagatttgtgaacataaaaatatgcatgcagacaaaaaatgtaatttgttaaggatgtatatgaaaaccacgctatgtgaagcgtaaagaaaagcttcaaaaaaagtttcaaatatcaaaattatttgtagtttcaattatcttggcgtactgttattagttccaaagaatttttaattctgtataagcaacactaatttgtaaggctttcattctagacattttattgtgatttttgtgaattaaactgttttcacgtaaaaaatctcatgcattaaattaagtttattcagtcaatcaaaaattagtttgaagtaagggattggaatacattggatttaacgaccacaagtacatacgaaatacaaaacaaacaaaaattgcatacaaggtctggcaatacatagctttttgcttgacatatttcacccatttacaagcaacaattttaagaaagaatgaagaatcaaacaattaaacattaattttcgtttttttaaaattataaattaaaaaggcaaaattgtggaaacaaaatgatgggaattcttaattaggcatcgcatgtggcatggaactcaacgcgtcgatcaatttcgctggtcacctgatcaatctgatcactgagttcctcaattgaggtgtgaaaattgttcagttccacgtctaatgaatcagcacgttcaatcagggctaaaaaattaaaaagcaaaaaataaattaataaaaaatagctcacaaattttctcttcccgactccgcttaatctttgccaacaattcggttgtgcgcttgcgcaactcttccgcccgctgtttccgctcctcatttccgccttctttctcttccaataaagctaacactttgtcataggtggactgaaattaaaaaattaattataataggcattaggagtatcataaattaaaaataaagaaaaaaaaattttattttgggaaagagtttgataactaatttttggaattccaaaaaaccatgccaaatgcaataaaactaaacagcagaccgatctattttttccattgtaatacccacccccccccgcccccttaaaacccaaatcgaaaatcttggggaccgtcacctgatttattatagacaattaaataattttcaatatcatttaaaattgtttctcaccttcatagcattgtgtttttgctcaacttggtccgcaatttccgatgcgccggcggcgctttggccg

SEQ ID NO: 8153 - DNA, 1437 bp, Heterodera glycines
  unsure (1)..(1437): unsure at all n locations
acctcttgaaaagggcttcctttatttcaggggagggagaggggggggggggttctaattaaaaaatgatttttgaaaattaaaaaaaaaattggggcgaatttttcataaatttttttgggttttcctagaaaaataaaggtgcaatcattttttacgttttcagaaagttgtcgaatttgttcctcattgaatggaattgtgatgttcagaatgtgttcaaccttggccctgatgtcttcaggtctaaaattaaacaattcgcttaaataaattatttttaaattgtttattgtaaatttgacctatgcctttcggattcaaggaaatttttgatttgctcaatttgtgccaccaatgcatcatgcgttttgttgatacgttcggactaaattttaaaatttggcattttcccgtcttttttttttgttataattttgcctctcttttggagttttccaatgctttttctgttgatttgcgtgcctcctgcgttttgggcagaacatctcgcacttttttcagaagctttatataaacaattattatttgattaattaataaacgcattttaaatatttaatgaaaaacaaaaatttaaataaataaaaataattcacctcttcagcttctttttgctttgtctccaccttttcgagagcttcgtgtgcaaaatgtttggcttgttcagctttatatacggagcctaatataataatgtaaaaaatacaatttaaataatgggaaattaaaatcaatttttaattgttgcgttaatatttaatatttttcaaatttaatgtgcctggacacgatgaaccgccacaacgtgaacaggttggaccaggtccaccacacacggcatcgcatggagcagagtcggcaccgcaaacttccaaattcaatgcgggcagcgcaccatcgatggaagaaatctggcaaattaaaaaaatgtttttaaaatgaaatatccattaattatacgcaccgtgttgctgatgtcctctaagcgcgccttgttctcctcatattgacggtcaaagtcacgtttgtgctcattgagcaactgctctgccctgagtcgatcagattcggattggctgaattttggaataataataacaaataaaaatattaaattaatttgtaaatgatagaaaaagaagtccatcactttggagcaggtcgttcatgccgtgaattataccaaaataaaaatttaaaaaaacgcagaaaatttcgtagaattattaaaaagcaagaaaactctaaaattttcgaaattttggtttttaaatgtttaaaaaattagggcttttggcttaaatattgaaaaaatttaacaaattttctatgaaattttaagtttgatagattttaaaataatctctcggggggggggggnggagggggtaaagtgcagcccctgcacctgat

SEQ ID NO: 8154 - DNA, 1611 bp, Heterodera glycines
tcgacgagtccatccatcagcctctaaattaaaaattcgcgcattccacctttgccgctggccaaatcgtagtggagcggtgcgcactggtcacactggggcccgaccacattggcaaagcatgggcattggccagacacacgatcgcaagagccagcactcgaattggtgcccaaattattgcaaacgcaactgtaagagagatttgaaaaatgtccgttaaaaacatttcgccaaattactcccgccccgaccccctccccaccgtgtgcatgtgcgtgcttgcgcatcgccaaaaaatccgtccacacaatgctgacattggtctccgtctgtgttgtacaagcatttcaagcagtccccagtcgtcgcatcacaactctccggcacctttcaggaaagaatcaaataaataaattatttttcgtttccaaagcatcgcaaaatcacagacattcaaatcgatgttcccattgcagtcacatttttcacaggagccgctaaacatgttcaaattgaattataatatgctgaggaatgtgataaagaatcaaatccaataattttacccgatttcgcgcggatttccccaataattgacggcacactgatcacaacgctcgccagcatagccagacctacaaaattgatcaatacagtacagtacacagagcgagagaaatccatttgaaaattagttagtttgtcaaacgccaaccggcaattgcatgtgactgtcggactcggcggtggcgtcaaatagcatgagtcagcatgttggaagcccgagcccggcccacccggacaggggcatggcttgcaaggcaagttgatgccaagccgagggtcgccgtagtaaccgtccacgcaacttgaatttaaaattaattaatttgattagcgtatttttgggggggggggggggaatggtttgattcgggacggaagagagagaccgaccgttcgcaatgtgtgccatcggtaaggttgcgacagtcaatgcatgcgcctgttcgttgatcacaaatggacgcgtgcccattgcattggcaggtgcgacactccggaaaattcctggacaaatattcaataaattgcttttttttccacccccgcatcgttttcctaccttaaatttttttttataaaaaatgaaaaaaatttttcatagtgatttttttctaataaaaattagataaataaaaaaagttattgacaaatcgaaaaaaaactttaaatacaaaattcagtttttttttaattttctcgtgtgtgggaagcaagctgatcctaccaaaatcctggttggcattggttgcattggcgtccagtgatgccacgttcacggcactcgcattggcccgattgtttgtcgcacgccttaaatatgtttgaacaaattttcaaatgtttatagtaatcacatgagataaaacaaacatttgaaagtgatccgacactgtcacaatcgcaagacgaacagccggatggaccaaatccgtaagtgccaaccgcgcaacggtcacaacttcagtatgaataaacagggttaacgggtctgacccctgaccaccattcccgggtgaaattcccgacccagacgctatattt

SEQ ID NO: 8155 - DNA, 454 bp, Heterodera glycines
ccggtgcgtatgggtcctccgtgggaatgtgaggcgaaatcactttgtaaaccaactgaataattattgttagtttgtataccgtatttattctattattagacccggctctttattgttcgacccccctcaaaggggggtcttaaatccgtgggagggggggggggggagagtcgaataatcgaagaaataccgtatattgttttatggcaatgaatggcaattttttaaaaattaaaaaaattctgcacctctccgccagttgccggttcaaaactgctatattttttggtacaaatgacatcattgtgctttctgggaggcccctcgggaatgctgaaactcgatttttttttataatatttatttttttaatttttttttgcctacttcgggaacgaggccgagcaatcataggcgaaatagcggtaaatggtcctgaaaaggcaacaat

SEQ ID NO: 8156 - DNA, 2311 bp, Heterodera glycines
  unsure (1)..(2311): unsure at all n locations
aattacaattanttattgtaaatataataaataaacaaacttaaaaaaacaattaccaaatgtacataatccatgattgacagaaaataggaaaaataaaaagaaaaaataaattttggacatttttcaatatactaaagaaaaagattaaaaaataaattaaaaaatgatttcaataaaactctctttttaattaaggatgtttgcatagatagccttcataaaatgtggattatttatttggattccttcagattcgagttgttttttaattataataaaatttacacgaccataaaaatacattatgataattagaacaaaaaataaacaaatttaattttaggagttaatttaatattttgtaaaaaatttaactgaaacccaaaaattttggaaacgaaataagctaacaaagaaacttttagcgcttgataaactggttttttctttgcccaggaaaagcatgtccggattaagtccaggccataagcattcccaaaattaaattttcaaaggaaaaactttaaatttttgttggtctacaattttggaagattttttcatatcttctttaattttttattattttttaaagtcggataaactgcaaagagccatagtttaagcataaaacaaaatgactgtgataatttacaattatttttcagcagaaaccaaaagcaggcaaaaatcagctgattttgtcattggcattatcaagccaaaatattcacttaaaacagaaaatcatgtgaccaatttgggccggattttccgacccaaccactcttaaacataggaaatgcaaagacgtgggaaaaacttttattttttttgaatttatgttttcttaattataccgtagtaaaaggcctatttttcagagtggctataatatcatattttctggattggttataatattctgtgatctgtaccatatttttactaattaccaataaatttaaagttcaaacaaataaatgtgccaataaagtaatccaattcattcatcattctgtgatcacttcccaaaaaaacatttcatttttttcgtcctccgcgttctttcaactgaagttgcactgaagcattcggcataaaattgtagtaggccaaactctgactgtccttcatgaaaatgccctgttgaaatgggaaaacaaaacgttagccaattaatgcaaatgacttaaaatgggaattaaatttgtgttcacctcgtagactaatttttgtttggttgcaggaactccgatctgctcttggattaacgattttaacgcagtgacctgaatacaaatcgatttatgtgcaagccccaaaatagtcattaatttgttaaaaaactagctttaatttttaaaaaagtggaaaaagtttttaaaagcacgtataaaaaatttgaaaaattaaaacccgtaaaataatacttgcaaaaagccctgctaataacgcattgcttgatcatcctaacttatgactgaccgatgaactgatgtccaactgaatttgtactgtgttccccttcaggttccattcatcattttgcggcgtagcgatttgcacagcgatttgaccgtggacctgtaagcaattaaagatatattttttcctcgttttagcaaatatcggtggagaccggcgctcaccttttgaagccaacgttcttccggttccagcgtttcttcgcgcgggcgtttgtttggcggctcatcgccaacagaggcgccggggggcggaggaggaagcatgaaagagccatgcggtggacgcatcatgccaggaggaggcattccttgaggaaaaattagaaaatgaatggatatgccattgagtaatccatttatggtgtgtttgtccaaagaacaatggggtgacttcattattactatatttagggctaaaccgtgtttcgagttttatttagaaaagatagtgtttttgaatagcattgaaaaggcattccaattatttgggaaatttcactaaaatcgaaaggaacggactgatcctcatcatacataaacaaggggtgcgccagtcagaccctcatacgtcggacgtttggcgcaggggggggggggggtgcgccaggaccaatttttcttacgtcggcccccaatttcccccggcgacgaccttttttgttttgtttttttctattctgaactttttttctgacgaccttttttttattcaaaccaaaccaccttttttgcggcgcgtttttccaaaaaactttgtgggaaggggtggggcggtccggccgtgccgataggcgccgccgggaaaaattattgaattt

SEQ ID NO: 8157 - DNA, 4859 bp, Heterodera glycines
  unsure (1)..(4859): unsure at all n locations
ccttgttcatgtatgatccccatatatgtgtttgtttacccggttgcatgtgcggtggcattgcgcccataacgccgtgcggtggcatgcccatatgaggcggaggtggcatatgcggacgaccgcccggcggctgcataaattgcggtggcatttgctgcggaggacgcatttgttgttgttgctggtgctgtggtggaatagacatttgcggcggctgttggggaaccggcacaattttctgcacattggacgcaatgccaccggtggactgatgaggcggagggcgctgctggaaacacaaaattttggcaacaaaaaaaccatgttatcaacgaagcaacgttttaaaaaatctatcttgatattgtatattatcgagaagaaaaattaatacaactatttacaggtggagccattgaatgtgaagtcggcggttgtccaccgccgaattgttgtgagggtgtcgaagtcgggggcggcatcgacggcaccattcgttctgcggctgggttcggcaaatacccatgctgtcgctgaaattcaagtgtaaatctttccaccccctccattttgcctatttatatttcgtttaattccgtcctctaacctggatttcgctgatttgctgctctaacgaaacactctgttgcgctgcgcgagtggtagcatcaatcgtcgacaattgtccgtcccaaatggtcttcgggtccgaacgcggcatttgccgttcctcctcccccaactttttgccgatgattgtttgttcggctcccttttcaccaataccgaaaatgtctgttcgacgttcggccaatttggcaatatttcgactaatttctgccccgggcgccatcactaagtcttcgtcctggcgatccatttgttcactaaataaaaaaggtcttaaagaactccagcttttaaccccattttttcaggcgaagtaccttttaacttaaacccccttttgccaaaacgcaccggtctcgttgctctttgaactgtgggtcaacggtgttgtaacgcacatgctcgtgcagtttgtctgcaggaatgcgttcgtttgtcagcggcgaaattatgtacttctccgtggaggcagccgcagttttggacaccggaccaccacgcgctgaaaacaaataaaacaaagaattaaactcatcggaaatcaaaaatattaacagttaaagttattgagttgacaagtcctcgtaaaattaccagaagtcaagcattaaatattgtaaaatacccacattttttagggtcgtagtcgcggatgattacgctgccggcggtcggcgccgcgggtgccggttgcgtcagcgttgagccggtgtgttgcttctccgccccgatgttcaagcgttggtgcagttcgccagccgcatcctccgccgcttcgattgcggctcgttctttggccgtttcctcgtcacccgactcggcgccgccctcctcgtccgactcgaccttagcgtggggggtggggatttttacaataaacatatttttaaggcttcaattgttttctacaaacagtttgcgattgcctcgaatccccgtgcgaaatttacccccttcccaccccatgacctatgccggaatatctttaaaaaaaaactagatcattgttcccattacatccatcgccacactctcagccgccgctttggccgcttccgtacgttgttgcaacagaattcgtgccccgacatcctttggcgtgcacaggggcggcaaatttactaaaaaaataaaaaaccgaaccataaaaataactgacaaatagtttgaaaacaacatttgaaataagaaacccctaaagatttctttgcaatgaatcagggtaaaatgagatgataatggctacaccaaatcttgcaaaatcattgatttaacttaagagtggacctaatttaatcgaaattcaacccgaaaaatgtaaggctcacgtgtttcgctgggctgaaagtccaccgtttggacaacgacaaattcgtgccagtcgatttgattgtacgcaatgcgctccttctccaccgcttggtcctcgcggtccttcagcgctttttggtggcggtcccaaccgacgcggtaacgcacgtcctccaagattttgtgttgagtgaccgaagcacgtaaatcatccacaatcgtttttggcgggatcagcacctgtaaataaggattttaaacgggcaataattattaatcttagcagtcaagtcaatgtagattctttttgaattgccataaataaaccttcgtatactgctcgaccagcttggtgaagtattggaagttggagtgttgaggctttaagaaatcaaactggaagtttcgcacctcacggttcatcagctgagtgagaaattgacggccgttccgcgccacaaacaaagcggtcaaatggatgagatccctgaaaaaggaggggttttgattcaaaacgatggaaaattaaacacacagtaagacaaaaaaaaaaagagaacttgggtaaaaagttcaatgcgccacttacaaatcgaatgcgtttagcgtcaaaggatcggcacagaattcgaacggtttgggcggcagccgcggaataaattcggcccgctgcacatgctcacggacagcctccggcaacttcactttggactgagtgtccgccgatgcaacgcccgtctcaaattcattgacctgaaaatgagaaagtacccatataaattgacatttgcttaaaaaccttgttgcgatagtaggcaaagtatgggtcggtagggttgagaaagttgaaacgcatgttggaagcctcgcgctctttgattttcatctcaaattccaatccgttgcgagccacgaaaagcgccgttttgtccacaattgctgcaaagagaagaaaaaggcgttagttacaataatatggagcaattgcgaaggcgaaaatggcaaattcactaaaatgaaaaaagtcgaacttcgaatgtcgggcggtggaatgatcaacccgactatttgtttgccactcattgacggttcgatgttctgcgcgtcctcctcccgattggacacgcgtagttcagccggcaccgctggagccgccggttgtgcctgaggcgtcggtcgacgcaccaacggtttatcatcatccaatctgggaatcacaatttgcaagggcggctcttgcgccatgatctgaataggctagtaaatttaatcaatgcttttgtggttttgaaaccgttttgactttttaaaaagcatacaatttaaataacgaggcttaaaaaattaataaaaaattttggcgtaatgttttcttactttgctaaaaagatcgaaatctaattctatggtaacatgtgatttcgtcagaactaatgggatggacgaactggccgctttgataaatatatttgttgagtgattctacgtgtgtggttttttatgaatttaacctcactcatttgcttctttgactttttgccctgaaaaaatgagtcaaatttaaaagttgttttcggtcaatcatgatgagatacctatatatgaaattatgctcaaaagcaacattctttgtgttgaagtttttaaagttaaattttgttgccgaatggacattggcaactgttgcatttgcctgggtgggttcggcgttgcacagatgggcgtgctgccgtgcctgcacactttccaccactcatgcattcagcgcgcactgggccaaaatgcgcagtgtccgctttgccgtcggcacgccaccgacacgcaaattgtgagaccgaaatacgaaggaagctgccgcgaggcgggcgatttgccaagaaaggttgtcgtgtttaatgggcgggcgccaatgaatttgaatttctgttcgctttatggattttagtcactattcgtttattcagactagatggaatttaaattagcaaaatttcctttcctcaggccatgcgtgccgcgttagctttttacgaccgcaccgttcgccaccgcttcgccgatggttcgtcgggaggcgaagcacagcgcgaggaattgaaactttgtctcaatgtgctggtttttcctaaaattgttttagctgcgtgttcatttaaaaattccattgtttttatatattttattttgcagcaattttatcgtctctgttcatcaaattttaattttacgacagttttcagtcattggtcagcactttggagagcgctgacgcggagagagaggcgaaatgggaacggctgaagcaatttttgagggtgtgcggaacggccgcaatttttgccgttttggcatttctgttcactttgtattggccggtgagtgagcgaagggattaacggtgctaatttaagcaaaaagtgccattcacgtgggatgaaattattctacaaaccgttagaaattttttctacggtataatgaatttgaaacttttcgaacttaatttgggttgaaaccgctctaaaaatttgaattttttactttttgttcaaatccgggcaggaatcaacaaaaaatgaagggtcagcgacccttaaaacctccaaaacctgacgtgtaaagaaggccgctttatcccccccccccctcaaattggccaatttctacgcttctttttcggctcagttgttctcttctctggcggttggcgttgtgcgcaccgtttggactctgatcagttctctgcgcgatctgttggtcgcccattggcccgatttgctcttcggcggtttgctcctcagcactttcgtcgacatggaatcctccgactcgcagcaacagcaggcggaaaaacgcaatattgtggaggagccacagaatatggcggaatatgatcgatgatncatcatcccccc

SEQ ID NO: 8158 - DNA, 4436 bp, Heterodera glycines
ctttagtgatgccaatttttagtgcttttttagacaaatttcaagtatcgtttacccccgaaaagtttttgaaaaaaattcaagccttgaaatttacaagaaattttagaaatttttttataaaaaaatatcaaaaaaaaattttttttttgaaaaactaacgattttttcagttttgcaaaaaattgctgaaaagtcgcataaaatttttctaagattttctttaaatttctaattgtaaattttaaaaaaatttacggcgaggggggggggatgaaacgagggggagggggacgaacggctcatgttttcccccaccttgattcgtgtgtccggtacattgccaaatgcgtctttctcccacagctccgcgttggtggtggccttcccccacagcttggtgccacgctcgcgtatctccagctcgtagtcagtgatcggcgtgcctctgtcccgcaacggtcgtgtccattggagcatgattgatttgtcggtggtgtacagtggcttcggcgggccgggccgcactggcacattcaatgacgccttggccagcagccgttcgtccgcacagcgcacctaaaaattggaaaatattaattcattatttcaacaaagagcaaaaattttaatttctgggttttttgtaataaaaaattaaacacaaaaaatttgagtctaaaaaagctttggattttataaataaaacggataaaaataataatatttgttatcataaattcgttaattaatgataattatgcatgttttattaatattaaatcaattaaagttgattaattaaatcttatttaataaattttttaaataaaaaaaatacaaaaattttaattataaaaactaaataaattttaaataaaatcaattagcaaattgcattcactttagcaaaatttccacggcgcgtctgcctattggcaccattggatctcaccacccatccccaaaaaaaaatttaaaaaaaaacacagagaaaaaaagtggcaagaagcaaaatttggccccaccccctcccgcctcaaaattattcccacctcaaccgtcgtcatgtcgagcagctgctgctcctcctcactgtcggccacttccacctcgtctgttgcctcttcgcccgcagcgcaagccgctgctgccgcctttgccgaccggtccgccgcggtgctgccaacgcgtcgccttccgctactggacgcggtccgctcctgttcatgattttttatgcattaaatatttaaagttttttttcgaataaggggacaattttaaaccaaaatttttacaaagaaaaaaaattatcatttagaaaaaattttttgcctgtggatgcttttgtcaggaacaagaccaacagaagaggaattattgagaaaaaaacaaaaaaaatgtttgtataaatattttataaaaattcaaaaattttgcatcacttttaaaaattggttttgggttcaggttaaaaataaaaaatttattttctcaaaattcccaataaataattttaaaaaacccgaatttgctcaccatgtttttgggacgtggcggcgtcaaatggctgctgcaactaaaaaataaaatgaatgaattaaactttctttttcgttttttgtttgttaaaccaaccactgcatggcgtccaagagggtcaatgcagcggcttcctttctggcactttttggtctgcgcgactcgctgcgacgggcggtggaggacaatggttgttggtctggtgagtctgaaacaaaatgcattcttttaataaaacatattctatataaaattatgtgaaaattatctaatgaaaaaaagcaataatttattttctttaatatgaaataattattttaaaaaattaaaacatttttataaattttatattataaatatacacaattttaaaaaatatatattttaaataaaatgaaagtattaatttgataaaaaagtaaattttaaaaattaaattaaaaaccaaaaatgtccgtggaaaatgtttaactgcttttttttgtccgccccgtccaaaacataccctccacagtgacaaatgaattggtcggaactccgttcgcttcgcatttgtacttgccgctgtcgtccgggtccgggttgttgatgatcagcgtgatggactgcttgtcgatcagaattttgtacttgagaccgtccgagaacagctccttgcggcccttataccagcgcactgaaaagaaatattttggcattaaatttaagaaatttttaaactttatttttttaaaaattaatatattttttattatcctaaaaatagatttgaagatatccttaattttatcatttatttttttcgtgttttattgaaattgaaaaaagtaaatgattttatcagtcgtttaaataatgaaaaatgatcaatttttcaaatttaattttaataatcacctttggcattggcgcgcgagtatttgcatttgagctcggcaaatttattctcctgctgctgaaattgcaacttttctggcaatgggtccacccatcgttcttgaggcacttcggtgggcggctcggctgctttgggctgaaaaagtgtaaaatatttttttgtttttttactaaaaattgcattttttttgttgtaaagcataaaaaagactctaattcttaaattttgactccaagataagaccgccaactatcccaaggagggagggggggggggggcatatcgcttaaatgattgagcctttttaaaaattgataaaattaaaattttattttttggacttatttgcaaaacttttttgagcaaacatttaatcaatttatttctaacaaggaaacatttctgacagtaaatattcaaatcacttttaaaccacttttattttgtggaggtattctatcataaattctcgacctttttttggccctcaccaacaaactgatcagaaaaaagtgatcaaagtttcaaaaacctaaaaaaaattaattaaaaaatcaaaaaaatttcaattttttcggattaatttgagtcaagacaatatatttttatacggcatcatgacccaagttttttgtcggtaccgtttgaaaattttagtgtcggatattttttatacaaattaattccgaattcaattttattaaatttttatgttttttgtccattaaaaaattattcgtttatgcacatatagtcatggtcatatgtttatgggagccggtgataattccaaacaaccgataaggttttgcttaaaaagacgaacgacaatgttttcattactgaaaatcgttttattttgtgaaaatattcaaaaataagaacatttacaaaaaggataaaattttgtttattttttcgtttgctatttttcccttttcgtttttcacccacctcgtctggatccggcgagccagcaaacacctcgtcgtcaaagtcaattctgattggcgtcacattgacatgacaggcactaaacaaataaagaatttgtttttaaaggaaacagccaaaaattttaactgttcagatcactttaaaccctttttatcatgaagagcaattggatttgctattcctaaattttcagctatttttaatcttgacctcctaactgatcagaaataatcgatcaaatgagaatcttgcaaaaatacgttaattttatgagatttttcaactaatattttaatgcccattgtcattagtttggatcatctcaacagctaatgaattattttttatttttcctttattaatttggaatttttatgaatatggaatttaccactgaaatcaaattgctatacacagtaaaaagtgattttagaatgaactgagcgaaataaggaaaatttattaccggtgtttgtcaaatgtgtccttcaagtcacagccataattgcaatgttggctgaatatttatacaaataaaaaaagataataagaatcaaaatatttttaccatttgtatctcccattgtacccatgattgcgagaatggcttgccaggtacaaaggacgagcaaatgcatctgtgcattctttgcacttgtatagctttaaataaataatagaaaaggtactttttcgttatgccataccccccccccctaaaaatgtcataatcccgagaaagaaaacacattctatggtaattttaggtgttaattaataatctgaagttaaggccgtaaaaatctatgaatttgttgatgttattacaaaatccacaaaaagcactgatgagggtgagaataattttctttttaaatcatcaacaaaatcatatgaagaaaatcatagataacagtatagattttgcaattttgagttagactcccgatcagtgcccaaaactaccattgaaaaaagctttcctttgttcgtatcatgatattttttcggggggggggggggggcgggggcgggg

SEQ ID NO: 8159 - DNA, 1756 bp, Heterodera glycines
tttaaccagggttgccagattaaaattttcaaaagcctcctttaggtcggcaaaaaagcctcattttgggtcaaaaagcctcatttttacaaatttattcaaaacacattaaaaatattcaaatattatatttttattttccatgatcaatttgagcaatatttgttagaaataagcattttgtgaaattcttagcacgaaaatcgaagttgattttttgcggcgcttttttctaaaaaaaaacttggggaaaagggaggccggcggtgccgataggcgccgccgggaaaaattttgtgatttttaatacaatttgttaacagatttgaccacaaaaatgaccaaattttgcgattttgagcaaatttttaagaaaataaaggatccctggagctcaaataaatgaattgaaataggaaacccggcaaaaacccaaaaacccggcaacttcaaaaacccggcaaaaacccggcaaggacccccaaaacccggcaaatgccgggtttccagggcaaaatcgcacgcctgattcaaaggtgtgaaccattttttgtaattttaaaataaaaaagtgtgaatcattttttaaataaaagtgtgtgatttttaaaacaccattaataaagtagtcatatttctaccctattcaaagagaggaggtgtggtggtaaatgccccaaagcacatgtccttaaggcattttccctatttcggtaaaacctgtgcctataaatcatttttacacaaaaaattgttatgaatttttaaaccattagatcaattagtttaagaatttccttccagaatggttgatctaaagacattattctttttgagtgatttgaccaagttggtgaaaggaattttttgataagcatcaatatgttggcatgaatttcttattttcaaatttttcttttttcccaaaaagctgctcttccagctgaaatttattcccctcacatcgtccagcagttggcgttcctcccgctcaatgtccaattccaagtagtcgtccgccgccttctgtttccgaaacattttaaatctttagagaagacaaaaatttaaaaataggtttaaaaattttttttaaatattaaagttgcatatgatatcaatttgaaaaaacaaaactaataaaacagacataaatttgtaacaaaaatcattttatgaaatttgaacccggttttgaccgggaccggggaccagtctcgggttttttccggttttcccagccaaaaattcccggtttttcaacccgaaaaggtcccggtcccggttaagcccaaaattcccggtcccgctctactctatttttaaataagaatcctaaccgaaaaatatttgacgtaaattatttacgtgaaaacttgaaaatataaattaaaaaattaaacaagctgataaaaatagagtttttcaaccgggtccgggtttcttatggtgaattgttccctgatttttggccttagcttgtcaagagctttcgaatgataccaaatttgttcgaaaatttttatttaaaaattttttataattaatttttggtgcaattaatgattttataattgcaagacaaaaattaaaaaaaatttgaaaataggtttacactcttcgtcgaagattttttgacattcatcaacaaaaaaacatctatcaattttgaattttcattgcatgaacataagcattaaatgcccattcttacgggggaatacataggaggatgcaattgattaatcggagcggg

SEQ ID NO: 8160 - DNA, 5407 bp, Heterodera glycines
  unsure (1)..(5407): unsure at all n locations
cgaacaattgggcgcagtcagctaaaaagcatacgacataaacgcatttgttattcatttattacatctccagacgagagtaatttttggatttcaacattctgccgccggtcttcaagtggacgaaaacgaaccgtccacatttcgaccgccgactttcatcgcgtcaaaaaaccaatagaccccagtagggtgaggttccgccaggtgcggttttcaacgcttcaaaaaaccaatagaccctaaaagggtgaggttccgctaggcgcggttttcaatcgccgaaaaacctatagaccctaggcgggttgcggttccgcaatacgcggttttcatcgtccatttcaacagtcaactgaaaagcaatcgaaaccaccgacatggcacaacaagccaacattcaacaatttctggacgcaattggccaactcgtcaccgcacagcagcagcaacaaatcaaccaaccgaatccgaacaataatgttccgattccggtgctgcctgacatttcggtcttcgaaccgaccgacgaaaagggacgtattaccgaatggatcgaaaggttttcatttgctatggactgttcggcaccaaacgcaaccgacgcagtgaaagtcaaggcattaatgaataaattgtcggaaacggcattcagcgagtattcaaaatcgtgtttgccaggaaaagtgacggacttcgacttcaaccaatcagttgaaaggcttcaaaagctttttgcaaagcctcaatctatattcatcgacagatatgaatgcttaatggccacgaaaaccgaaaggagaagattttcgtcaattcgtcaacagacacaaagggctgttgaatgatttcaagttcacatcacttaaggaggaacattncaaggttntgatgctcttgacagctctaaagtcgccgaaagatgcaacttgagacaaagaattttgtcaagctcggcgccgaaggagataacgtcaaatatgatgaaattgtgcaagattgtgtcaatttcatgacgacaatcagcgaagtaaagctgattgaatcatctgcggccaaccgaagcataaatgcagtcaagccaaagtggcacaaaaccgaaaagggaggaaggccaaacaacaagcaaggccaatcatcatccgctccggcacaacaatgttggcgatgtggttggacaaatcacagccactgggagtgtaagcataagtcagcaaagtgccaaaaatgttcccaaaatggacatttggaaggccaatgcgacaaggtgcaggaatggagacggagaaacaaattgccaattccaaaaaggaaaattggaaatttacgaattggaacggccatgaaagtgaactccgcttcgcttttcaaaaccgacgtggcggcagatggcaaagacatcaaattcgtactcgacagcggggctgaaataattgtgatcgatgaactatcacatgaagtcatcggcagcccccgactccgcaaatgcaccgaaagtggatgcatgttcgatggaacacaagtcaaattcgtcggaaagggagtcgcaaatttcaaattccgcaatacaagggcgtagccaggaccttcgtttcggggggggggcaactcaaaaagtcggttcttaggggtgtattttttcgtttttgtaaacctctatttttagtggtgtattttcgtgttttttttaaattgaattgattgcattattttgtgtttcctttgcataaacgcgttatttaaattaaaataaaattattccggcgatgtttcaaaaaaattttttcaaaagaaagagcgcagatgtggggggggggggttgggcgggggctgagacggaatggagcattggatgtgcgaaaaactgaattgtttggccaattttctctccacacattatctgctcgcctgtaccttcaccaatcggctggaacaattttttctgcattgacttgggtcattgaacgccgaaataaacctaataaaattgttttttctaatttccgcctttgttagatgaaacgtaaaaatcctggtcgccaagacattagaaattttttcaatttgccttcgacgagcgtctcgcgtccactctcgacagcagaaaatatattcgagaacaatgctgaaagcgaaaacaacgattttgtcggatatttatcagaaaattcagaggatgaggaaatctcaaaaaagaagcattggaacggccgattcgtttgccaaaaaatttcgacgacaagcactttctccacgagacattggtctgactaatccttttcattttcaaatttaactcgcacgcctatgcatagactattcaaccggtctgaacaatgcccttcaagaccaccaacacccactgccgctacctgaggatattttcgcaaccttaaatggaggaaaatatttttcgcaaattgacctcagggatgcatatctccaaatcgaattggatgatgaatcgagaaaaatctgctcgatttcaacacaccgtggcaattatgaagttaagagacttccttttggcgtgaaatcagcgccagccatattccaatcggtaatggaccaaatcttggcagaatttgaattcgccacagcttacttggatgatgtgatcatcgtaagcaaaagcgtcaaagagcacgctgatcacttgaaaaatgttttggaaaaattccaagagtggggattccggatcaaattggaaaagtgttcgtttttccgagaagagatcaaatatctcggacaaatcatcgacagaaacggacggagaccggacccggagaaaatctcagcaattagtgaaatgcccgcacccacagatgtgccatcgctgcgttcatacctcggaatggtgaaccactaccagcaattcgtcaaaaacatgcgttttgtacgaaaaccgctagacgatctgctgaagcaggacagcgaatggaagtggagtgagaaatgcaaacaggcattcgacaaaattaaggaaattttgtcatccgatcttctgctgacgcattacgatccaacaaaagaaatcgtggttgcagcagatgcatccgaactcgggattggagcggtaatctcccacaaatttcccgacggaacaataaaggcaattgcacatgcttcatcagctctaacaccggctgagaaaaactattctcaaatcgagaaagaaggattggcactgattttcgccgtgcaaaaattccataaaatgatctatggacgaaaattcacgttgcaaaccgaccataagccacttcttgccattttcggaagcaaaaagggagtgcgccagtgcagtgccaaccgacttctccgatggtcgctgatcatcctcgcatacgatttcagcattgagtacatcagcaccaatgattttggtcaagccgatgtgctttcaaggctgatcgcaaagggaaaaagcgacgaagatcgactgattgcatctctccgatcagattcgaaaattgactacattttgatcggatcaattgaagcagtgccaattaaatttaaggaaattgtcgcagctgctgaagccgacaaaaccattcaaaaagtcaagaaatttttgacgaatggttggccaaggaacgtcggagacgaaagtgccgaaataaagctttttcatcggatcaaagaacagctttgcatcacgagaaattgcctgatgtacgccgaccgagttgtcatccccgaaaaacttcggcagaaaactcttcattcattccacaagggacacccgggaatcaaaagaatgaagcagttggcgagaaattatgcctattggccaaatatggacgccgacatccaacagatggtagaaaactgccaaccgtgccaaatggaagcaaaggcaccagttaaaagcaaccttcaaccgtggccaaaaccatcacttccatggcaaagagtccacatcgactatgccggaccatttttcggcaaggaatatttaatcatcgtcgatgccttttcgaaatacccggaggtattcgaaatggccacaaaatcgacagcggcaacaatagaaaagcttcgatatttgttcagccgacacggcatcccggaaattttggtgtccgacaatggcacccaatttacgagcaacgaatttgctaaatttatggccgtcaacggtgtcaatcacctgttttcagcgccgtataatccaatgtcaaacggccaggccgaacgtttcgtggacacgttcaaaagaacatttcgaaaattgaaaggggagggagccccaagcaaagaaatcattgaaactttcttggtaagctatcggacaaccccgaatgactcgttgccaaacagcaaaacacctgctgaaatgttcctggggagaaaaccccgcacaactttggatttgttgcggccgccaccttcacaaccgatcgacagagatgttgaaatggcgagacgcttcaataagcgatttggaaccaaattaagggaatttccgatcggaaacaaagtgtttgcccgccaccgaatttcccaaaattggcaacagggccaagtttcaaagcgaactggtgtgatttacgacgtggcattcgccgatggaagatcagggcgctaccacgccaaccagcttcgtccccgaaagacgtccgactccgatgatcagatctcggtgatgttcgaaaccttcgacatcccaagaccgattgctgttgaggatcagagggaaatcccagtggaaatgccattggaggacccgcatggcgaacaggaaaatttggaaggtcaaattgaccatggacagcaacaacggtaccctcagcgaaatcgccgtccgccgcagcgcttctcaccgtaacctcggaaccgcgcttaaggggggaggtgttcggggcactgccgccgaagtttgaatgatatgacataatgccaatcgatttctgttccatttcatgttccttccctcgcccataaatatgctcccattctcctctaagattgtcttcccttcattcattttgcatttatatttgttccccaaattattgtgactttcttttccttctccaataaataaatatttaattggacttaaacaaatccctcggaccgaacagttgagaattgagaatgaatgttatggaaaggcattgatcgattgatcagtgattgattgggtgggatcacctcttccaaagtgcgttctttgaagaaatcggcacgggcgggcagcaacggagtcaacggatcgccgttcaattccttcagtgagccgcgctgaacaccgccaattggctgaaaaggacaagtgagaaccaaatcaaattggcattggcattggcataccatccaaacggcggaagggaaagtgtgccctggggggaagggatagaaagtattaaggagtgaatgaatgaattcggctcattct

SEQ ID NO: 8161 - DNA, 1493 bp, Heterodera glycines
atttaagtttgaaaatttttatgcatttaaatgtccttacattttttaggatgaccataaaaatatgaccctattaattctttcataacttttttctaaaacaatcaattttaattttgtttatataattagatagcctaaagattactctattgttctgctaaatttcaaaaaattttattgaatttcaagaaagcttgggtcaaaattgttgagtcaaaatttttcgcacttttttagtcacaactttttgtaaatttttactaattttttgaaaatttcataagtagcagaggatgcttcgagctgtcgctaaatacttaattttattaatttgactaagcttaagctaagttatgattaattacttggaaaataaaattaaaataataattaaatttaattattacaaacacccatatttttgtcgcttcgacatagcaccggaaaacaaacacccaaaataatgacaacatctcttaattagctcattaaaaactttcattttcatttttcatttttgataaattgcccctctcttttcccctatttccccccccccccctccgatgtccgtcgatcgaccgttgtgccgttcctccgtccccgccacccattggccatttgctgctccgtcccctccctctcgcccccgtcaatttccatcttcggcctctttgaactcttccggcaccaccgccgaagcactgacagttttggaaagggtcggcaaaataaaaactaaaataaaacaacattttcactgctcagagctgtgcaaaacttattctagctgaagatggctttgctaacagtgcaaaaaacagggccaacggcgcgcgggagaattcgtcggttagagagccattgctaattaatgggtcgccgaacaaccacaaaccgacccattggtcgacttgcaaccgagtaattattttatgaatttaaattcattaagtgccgccgagaaaatttagaaaatttattttatttttatcatttatttatattttatttttaataatttttatgcaatatttaatctattagcattttttagcaaaacaattgtaaaataaaaaatttttattagttgggcttcatttttaggaaaatgcctagaatttctgcgcacttaatacgctcagataagcacgaaaaaaagacccctatgaattgaatcctctgaaatttttttttcttcataaaaatctttggtttaaaaattattcgaaaaactttaaatattataattgcatttacaattgaaataaaaccaaattattaaatcttttcaattaatttttatgtgttttgctacctaaaaagcgttaaaaaattttttgcctatttttgtgcatgcctttaataccttttcgctattttttgtgcctgaaaaacaaagcctcatggtggtggtagagtaaccttttgaaattttttttcacttagtgtttggtcaatttttttgtttatttttacacataataatg

SEQ ID NO: 8162 - DNA, 3289 bp, Heterodera glycines
aataaataaacataaataaactgaaatacataggcacattttattcagtaaaggaaattcaaatggaaataataaactgccaaaaatgtctattaacggtgccatcgtttcatctgttggccatttcaattttaaacttttttctctcttcaagaaatcgtcgaattgtttcgcccaaatattccaacaaattgtccgaatatgaaatgtccacctcgagctctgccaccgataaatcttccatattttgcactaaattttgctaatcgtttcggcaatttaataatggctttttttactgattaaaaagtgctcagatgtgttcaaaatgttcagcaatcccaactcggccatgcccaattcgtccaaatcgccgtttttggcttcgataaccaaagtaaaagtgagacttaattttaaataagaaaaacatattttatgggcaatgccaaagaataaaactgcgataatttaccgaatgttcagctgcgtccattgagttaaaagtgcaatttgattctgattcaattcgtagtctgaatttgatttaggtttttcgagttgaaatcgttttttctaattattttgaataattgccaatttgccgtgccattaccgctctgatggtctaagtcaaaggattctgtgagcaattgcggcatttccgcgtcgtttcgcgtcacgcattgttcccgcgaaaagtccaaaaagttccattcgacaaaaactcttccgccctcctcaaaatgcgaaaagtgcagagacgctgaatggtccaaaaattggagcctcccaattcgaattcgaacattggcactttttggctgcactaaatcaaccgacgatccctccaggccgctttcactgttccaatcggactcgggaacagcagggcgaatctgaaacagccgaataatcaaatagctaacaaacaatgcgacctcaataattccacccagggtccgatcactaatattcagtaaattgattcagttttggattagtacgcgtgctatttcccattggttggagttttgaatgattaatgtcaatttgtgatcagttcgccctccgtctgatctgctgacccttatcgccggcgttggtggcaccggtgcgatttcaattggcgcttttgtcggcctttttttccttggcactttccgctgcttttcctccccctcgccctccatcttttgtcggtcgttcgcatttggtggtgttccatttgaagctgtcgacccaccgttggcttctgatgtaattgatgaccgttcactgccaaaagtgatgtcatctgcaaagcttgaggacacttcgctggctgaaattttagtttaatccaatttcagggccttacaaattagctaacgcggaattgacgagtgcaatggctccgcaaattcgactgcttttctcgtcgttgaccattcttcggccgttggcagagggggcggtggtgccggaagctaaagccaatgggccaattaattgcaaaaaagtgccattaaactcattcttccaacttttttgagctgttttcctcctgtcgttgtaattggtgggattgggccgagaagcgaccgtcgaggagcgggcactggtgccattgttccggtcggcttttcttcatcagattcgtcactttcgccagttttctcatgaaattggtccattcgtccttgcaaatcttcgtctcgaatgatcatcacctcctcttcatcatccgttcttcctattacacggggctcatccatttcaatcggaccaagaggctaagcaaaaaatgttcatcttttaatttgtttttttttgaaaattttcattcatttttctccccttggccattgttttccctcttttcaccccttctgctgtgtaagttgcgtccgatctgattgatccgtcctcttcttcttcgtcctcctcttcggctgcttctttcttcgctggttcatcgccttcagcagcagaatttgagccttccttaaacaaatcctccgaaagttcatcagatgtcgtcctttccaatgctgtctctcgatcgaccacaattgttgctgaactccttgaactttttcccgactttggcatttcgtcgctgagagaatcctcagaaattttgctgaagtagattttataaagcattaataatatcagttttgctgatttgtttgatccgtcctttgtctttctttcttcgtccgtaccttcggtccgattcgctttccgttgctttttccatttgacttttttgtccattcgtttcaatgcttttttgtgttattattttttgttcattgccctttaaatgaaaaataattattttttatttcgcttttttatttatttttattttttgcatttttcattggttttggcagcagcaaaagccgtcttcgcagctcctcctccggcatttgttcgccccattgctcctccgccgttccttcgctttcgcttcggtttgattcgtccaccgatgagtcccttttgacggaaaggcgcacttttcatttattttaattcggcaattccggcatataattatcattttagtattaattacccttttgttttgtcggtttccctttgctttatgccaatcctttccaatgccttttgctctttgctaatttcccttttttgtgccatttcttcgggctttttcttctcttctccctgcggcggaatgacgtttaattaatgggttactgattagactgatcatcacttttttaatttatttcattattttattaattgcctcctcttttttggcattttcccccgcaattcgctgcgttttcctttgtccgttttcctttggcccattttgttcagttaattgagcgaatgttctcaacggaaccttaaaataaattcaatttaaatgaattcttttgacttactttttcttcgacttttaaattttcgaatccatcaaaagcataagcgaatttccaataaatcgacacatcgatggacgcctcggaaatgacagattcgtctgcctaattttgatatatttaaaaacaaatacttttttgtccttttttctactctgtctaaaagaggaaaagtgccgcgaattttgtgatttcgtgccaaaggaaaaagcggcaaacgaacggaggcgagcacacgcgccttcggcgacattttcccggccgaagtgccgccgtccgttccttcgtcaattaaataaagaagcaattcctaaaaattaaataattatttgctaatttatttattttttccccgtttgtccttcgctgtgtttactttt

SEQ ID NO: 8163 - DNA, 2036 bp, Heterodera glycines
tctcttcctcccattctctcctttccgactcattttcgttggcgttctgttgcatttttgcccgaaggcgcactaactcctccagggccgcttttccactgttctcttgctgcaacgacctgtgatttaaaaattaaatataataatagctatgattgctcttgctcatttgctaaataaatttaaatttaattttcctttttttaatttctttttatttttgctcacttttccaccagtcgctcgtgcgcatttcgtagcgcccggcactcctcccgcgcgatggccaactcgcggtccacgatttcggcactccgtgcgcttccgtccgctcgtcgttgcgcgtcctcccgctcgctgttcagcgagtcggactgcgagcggagttcgcgctgcgcttgtgacagctcccgcgccacgcggtcgaactcagtgcgaagcgcggacaaacgctgaaattaaacaattgcacttaattaacattaaaccaattaaccatctgaacattctctaattgccttattcacgtgccttttcacttttctcgagggccaagtgcaactcctcgttgtcgtccgtcacttttctgttttgcctttgcatttcccgcagtttttcctttatttcacttctttaaattaattttaattattcaaattaattttaattatttaaattaatttaaatatttaaatttattttattcgaatttactcttttctctcctccaacaatcgcaagtgtttgttttgctcattgtctgctctttgcgtcatttctctgctcacaacttcaaattggtgctcgctttcttcaaattcgtcccttcaatttttaattttcataataattatcttttccatttccgttacttttcttcaatctccggctgactaattggcctttttctgttattaatttgtcgtcctaattgcgacgacatcatttgctgaggccttttttcttggtcactaattatgcattttgtttggttcgcgacggagccaacgaaggcactttggggtctttggctggggcgattctgctgagattagaaaacaaaaatgagaaattgcaaattatggtcttaattttcaatgaccactttttgctgctgttggcgcgtttcgggccgataacgacccgttaaactcgttgatgagttgacttttgtgtagttgagaagttgatgcttcaacacttttaactaaatttagaattattcaatttgcctaaaattagcatgtaattatcggcacttttctgttttgaggcatagtttattttgacatttttaaagtcacaaaacattcccggcggttttcatactctctgatcactttatgacatcattttaaatattagcagaaaattctaatttttcaaaactatttttacatgtaaaaccaagtttaaatacataaacgaaatgaaatcaaacccatggcaaagaataatatttgaatcggtttgtctcgtaaatacgggatataaaaaaataagtttaatactgttacggagttcgaattgttcgaaatgggtgccattttcatggtcagagttaccctggaaacatccgggaacatgtttttattatttaaaattgtcaaagtcaaaaaaggccccaaaaatagaagagtaccaatatcatcagttagtgccttttgtgccatcaactgattggccctgtgcaattcgtccaattcatcctttttcggcccatttggcactgtgttcctttgcgaatttcttccgctcatccgtccatttaatcttttaatttttgttggcattttaaataaaaattaactattttttaaattatttattgttttacattttcacttctctctccagtctattgtttttctgtttgagtgtcgtcaaattgtccgcaacggaatggaaatggtcctccaattcgcttcggctccatcgctcaatcggcggacgattagtcatggtacggtaggagaatggacgggcaaacgctaaaaagtttacaaaaaaataaattaatgaaaaaagaaaaaaca

SEQ ID NO: 8164 - DNA, 3524 bp, Heterodera glycines
  unsure (1)..(3524): unsure at all n locations
cattgcttatcgcgacagaatacgtggaaagtaaaaatttgtaatccgaaatcccaatttcaacggaaatattccgtattgggcaaattcgagaaaatcaggtcgccgaacaggctgaagacttaagtgatgaacagaggaaagagtgggttgaaaagaccaaaaagagcgaattggcgtttgtctatgagtttttggaaaaacgcgttttgccacatgacgttcgcgatcgagaaaattattgtcatctttgcacaatttttcgttaatcaacggacttttgttccgcaatgagaacgatggaaaactacagctttttgtaccaaaagagttcagggaaatgatgataagagaaaggcactcgggaatttgtgcggggcaccttagcggaaaaaaaatttttcgtcagctctcggagctttacttttggccaaatatgtacggagagtgtatccgggcggcacttcgttgtagagtttgtgcacatgcacgaaaaccacgatcaaatgagcctcccctgaacatagtcgagacaaaagagcctttggaattggtctgtatcgatattttatcgattggacccgcagcatcttcaaatcggtacattttggtggcagtagatcatttctcgaaatacctcgtggcctgcgcgatcccaaacaaaaatgccgaaacgattgcgaaaaatgttgtaaaaaacttcatctgtgttttgggaacgccaaaaaagcttcatagcgacaaagggacggagtttgttaacgaaacattggaggaaatttcaaaaacactcaaaattgagagaacgacaacctcaggatatgatcctcaggcaaatggtgtaacagagcgcgttaatcagacgatactaggaatgctacgaaagtcgacttattcagcctgggaatgggacgaaagactgccttttgtagtgtttgcctataattcgacaccatcagaagtcacgggtatttccccacatcatttaatgttcggaaaaccagccaactttccgttggaacacgaattaaaattcgccgtaaatccgctctacacaatagaccaaaatacgtatattcaactttttcgtgagtccctaatgcaattagtggacgaagcgcgaaaaaattcccaaataagccgtgcaaaaatgaaagaacacttcgacgcacaagcaaaagtcacggagaacaaattccaaatcggcgacagggttatggtcatttttcccgggtcccacattcgatcaccacataaaaagattttgtggaaccattttggcccatttcgtattacggaattgaataaatcgacggcgaccgtaatcccgtccgataatccatacggtaatccaatgacagtccctcttgaacgattagtgcgcgtaccaaaggaattgccaaacatttgtacaatgccgaaagggaaaaacccctataagaatgttttaaatggactgataagtgtggccggattgatttgccaagaaaacttaaaatttgacggggaagaaaaattgaactctaaaccggacggaataattgggcaattgaggtcaattgcatttttaggcggtgaggaggagcaaatggaaactgaacagatggacgacaaagaggcgaagacgaacgagagcgaaaacgaggaaaatgtggaggaaaagacggacgacaatgaggttgacgcgaaccggagcgaaaaagaagcgaatctggaagaagaagaccaaatttcggtcaggaagaagaggagccgaaaacgctttcttggacattggcatgtgcaggagacgggcacaaatgctgttccgatgtggtcgtggccgacttggatgccgtccttgaccgatcaggcattgggctcacgaagatcgagaatccgctaaaagcgctgttggcaatgtttctgctgaagtctgaagcggtcgcgtcggcatcagctgccaaaaagctcatttcgcaaattctggacacggatgccgattgggaactcgcaacatattgcagtgcccgagaatacgacgtcaaaaacggcacatttccatccgaatcggacgtggaaagcgttttgcgaatttggatcggccactgccaaattgcccgaaaagaagtcgaaaaatcggcatttgggccaatttcaattgagctgccccaaggcctatcacttctgcccgaaactgaaagagaaggcatgaggaaatcgctcgaaagtgcgccctttttgctggagaagatccgtgccacggaaatccaaaagaagacactcgtcaccgccgaaagagtgattttaggcgattcaaatgcctaccaattgaagaaactatggccgagatcagcatttgtcggagtgcaagaaggatccacagccgaagtgatcagacaatttgatcaagtggtgctggcctcaaaagtgaagtggttgattgcgatggtcggaaaggactcaattttggctggcgactcggtggacagtgtcatcgaaaaagtgaagagactgcgccaactttgcctccgatttgcgcatgtgaagatcttctggctgttgccgccttttatctacaacaaaaaggccgaatctgaagaattctgtggaagaatgagggcgctgtttcggaagaaaagcgaaattgagctggtggcagtgacagaagaaggaagaagtttgctggagatttggcgtttcgggaagagctttaacaatgaacatgtcaaccacaacggatggatgacagaaaaggggctaaaaacgttcaatgcctggctgacatcattgatcccgaattttccgggcgacagagagctcgggatcagaacagtgaagtcaaaagtggtgaaaattggcgccttgaagggtggtggtccaggagacccttccccgattcgttccaatgcacaggagagaaatgtgagaggagaaggcccaggtgacccctccccatctcgatcgatttgcatttctgacgatggccccacaggttccgcccgaccaatgatcattcaaaatcgcgggtttgagtttggacgagtcggcacaggttaccgctctgtccctcctccgacgttccgtggcccgtcttcacgtttccatccgtatcagcaaagtcggggtcgtccggcgttccattcgactccgatgaatcgccgtaatcagttcgagcctcgtcgctgaagcagtgatcccagacgagcccccaccttttaacagccgaatcgaatctcgttttttttgtttgtctttctttaacggcagggacgccgctcgtaattgggtgggatgtgatatttgacctcgtatttaatttaaataattaatttgtggcattttgtttccttaattttgttccttttcgaaatttgttttgtttcggggttttttttcttctcatattataatttggcgtcaaatattggtaatattatattctcatcgctctctccgacttttgattttttttattgaattanattggttgagttttgtgctatgngctttaatttggtgtgacttatacagcgttcggtttt

SEQ ID NO: 8165 - DNA, 1427 bp, Heterodera glycines
ccccgatccccgacatgtcgctccccgaggtccccggcccccgactttttgccccccgacataattcggggaatggtggtctgagtgaaaaattagagatgaaaattggagataaaagaaaaaattaaaaaataagcataaacatatctttaaaagcgataccgccattgtgcagatggcctagtggttagtctacttgactttcctttcttcttttcccatttttaatccctctacagaaataaaattattttaaattttttttctatattcattggtttcctatcgacaaaatatgattcctcatagtttttttcaattaaaacatattttatcatttttaaatgaaaatccgtacaaattcttgaacctggtaatcccaaccagcctcttttttttgtttaaaatctgttagcaaattaactcgatttttcaaaatttcccccggcggcgcctgtcggcaccgccgtaccccttttttccccaaaagatttctgggaaaagcgcgccgaaaaaagtgacgtgaatagcaaatttgaatttctaataatattcgatcatttaatccaaaatgattaattatttaaaataattaaacaaatttgatttgaaatttttcattaatttaattaagctttaagttttggattttataaaataaaaaattaattttgtattttcacttgaaaataaataaaaatttgaattttttaaaattcccggttggtcccggttctcggtcccgaagaaaaatcgaggtcccggtcccagcttctcaggtcccggcaagtcccggtcccggttttgcccaaaattcccggtcccgcttcgctcaaatttaaatacaatcggttcaaaaaaatcatattaaaaacaaaattttgcgcacatttttttaaagactttttgggaacaagcggggcggaaggccggcggtgacgacaggcgttgccggaaaaaaagaagatttacgagcatttaaaaagaaaaattggttttttagttaaaataaaatttggtcattcctcgattggggtccccgaccaccgacaattgagctcctccccgtccaattttcaaaaaaggtgaaaaaactgatccattaaattataggccggtgtcattaaccagctgtagagtttttgaacgaattttgagtagtaaaattttagaatttctgaacagtacaagattctttgataaagaacaatttgggtttttaaaaaatagatcgactacaacccaaatattaaaaacgatggacgatatatataattctatacaaatgaatcagcaaattgacatcatctatattgattttgtcaaggcgtttgattctgttccaattgatttattacttcaaaaaatcaaaaagattggaattgaaggaaaaattcaaaatttttttaacttaactttttaaaaaa

SEQ ID NO: 8166 - DNA, 1642 bp, Heterodera glycines
  unsure (1)..(1642): unsure at all n locations
gtgtgaaactgatttttcttgcagacatacatcattatgtgaccgcattcgtgtgctntcatagttaaattagttttaatttttgtcaatcatatgcattattataacaatgtaactcattttaaaattgggccgccggtaattattttattagcttcatcatttaattatcaatttacgaagccaaattttcaggtaaatccgtttgtagttatttaattttttttttgattaatttaattaattagttatatttttaattgtattttgaatattcctttattttaattaaaattttattttcattatttaatgagattattaatcatataaattaatagtatttcagatgtttttaaatttatacaaaatttcaacaatgaaacaaaatttacaaaacaactctgatttttattttttaaatattatttttattttagtttaatttcgtttttgtttatttttattttaattacgattttaattttttattatttttgtttgactttaatttttattaaatacttgattttttttagttttttgcgaaagaaattgtaatggataaacgcacgacccaatttgggtatatatacaaatattacattatggttaaaaataataaaatgattatcttaatttttcctaaaaatagtaccttgacaaaatcccatatttgggcaaggtttcactgattcagaaattagttgataatttttattcggattctttttcacatcttagaattaattcttctactgaaaattcagtttttaagtttcgaattttgtcttcgagttcatcacaacatttcgttgcattgaaaatattaataatacagtgagttcttgatttttcgggtaaaggtagaaaaaatcttttttaattataatttgtcttttgataatcttcggtaaagtattgattcaattatttcccattcttttattatttggtttttcctaataagataaattatttctctttgatcatgataacaaattttagttccatttttatcacattgaaataattcacagtaatctgcagttccaatcgttagattaccatcccctaaacaacgaaatcatatttgatttgacatatgcataatgaatatttaaattttccattaaatatgtgcttatcacacacaaacgaaatgtaaagaaatttcctttggttttgcggatgcatttcgtattttgcttaaattaacaaataatatattgggtttggctttttgaatgagttcttttgtttagcccaatttgaacattacatttagagccataatagccataatacggtatatgtattattgtagacaaatgcttatttagaaaagataaaataatcgaaacataattcgttaatctatattttaagaacaatgttccttcttcaacacaaaaaatgttaaaatagttgtgtaatttttaatatttttggacaactataacttgagtaaatattcaaaggaaataaaataaatttagagaaataaaagtaatttttaagggaatattgaaggcttaaaattttttctctatttaatgataacttatttaaattaatattattaaaataagtttgatcgtaatgtgcgacatgatttagacaanagttattgtataaatta

SEQ ID NO: 8167 - DNA, 2913 bp, Heterodera glycines
ctgcgactctgaaattttttgaaaaatttaatgatttatttttttatttgaaaatttgggtgactgaagtcttggagggggtacaccgacaaggaaatcgcaaattcaacataaaaactataaaatactatttttccttaaaatttcgagtgtggggtatcttaggggggcaatgggaccgtcgctgatttagggtcctttttatcgcgtaataaatgcccaatttaacttatttttagttggaaattaaattttttaaaaatatggcaatttctgtgccgtcccaattccctccgcccgtcactcacccatcgctttggtctcctcacgtttggcgttcagaatagaaaacttgaatttggcgcgcacctccgtcttgttgcattggacgagcagcaaatacagggacaagtagtccttggattcttcgtcgaggcctttcggattgatgcgcaggcaccacttcagcttgtcgttcgggccggcactgaaccaatggacaaattttacggcgtaagaaggcggaaatgtgacaaaatccaaaattcaagtcccacgggcaatgagtgaaccgactcaacccaaaaatcgaaaatttaaatcatttttgccaatcaaattttcaaataatatgcagcccaaaggtttaagaatgaacacgaacccaaaaaatattctattaaaaattttaattaaaaaaacgttttaaaagggaaaaacctgaacgtcgaactcttcaaaacttcgcccatttcctcgcgacaaaaagaaaagttgttaatctaaaaaaggggatatatcagacactggtataattgaagttcaaattaaaatcagcaatgccaaacacaactcaccgtccacatgtagttaaacctaaaaaagaacaataagaatttgattggtgctaaaacattgggtgtactgctcgaattccaaggctgagcaaagccaagtcaaagtaatccaaaagttattaacaggtaaagaaattttatccatcttgtcatggaaaaaattcgacaaatttgcttggccccgccctgtcttcccctattttattttgcattttccccgtcccatggcacttacttgaccaccttgacctgcgtgttgcaccaattctccgcaatcggcaacatgcccaggccaatgtccagcggaatcactgaggaggaggacgacgaggaggaggaggacgtgctgctggtgccagaagctgaagaagcggccgccatgcccaggccgctcagcggcgacatggaccggtactgctggtgggaggagccgaccgcactgttccctccggcaccgttcccaccgccgctgctgctgcttgtactgctcccgccgccgttgttgctgctctgctgggccatgctgccggtcggacagttggcaatgtaaccgggaccatccgtaacctttacaagggggaaagataggcgatgcacacaaaacacacgaatgaactggcgagatttcgaggtccatcgggaaccgaccccatccccacgggtgcatttgacccaagaaatatgtcgagttaatttggccaactcgtcaagttttgcaaagtaatttggtgttcggtgtggtgaaaacccaactcgtactgcaccgaatcgtgttgttttccgacaaaaaatcgtcataacttttgtcaaaatcgaccaaaataaacattcttggtgtcattcacattaagattctccatgcctaaatttacaatgtttcgaaaaaaggtgactaaaattagaaaaacatatttaatttggttgaatttgacaaagttatgacgacttttttgtcaaaaaacagaaggcctagtacgaattgcgtttcgtccgtcggtataccattcgaacctcctgccaaatatttgtgtttctgaatgcccataaaacgaaccatctcatcctgcgcagcaccgtcaacgtccatcacacagcgcaaaggtcacaggtcaaatggatgagtgaagtgaagtgaatgtgggaagaatgagtaaaagtgaatgagtgccgtcacttttccgcgaaaatttggcgttttaaatggcgtttttaaacaaatagtcgaattgtgcagttgtaatagctctaaaaaggtggtgtcttcttacaaatacgctaaaatgaaaaattgacgcaacaaattgaaacagattttgaagagaatttcaacgaaaaaagggaaaattttgatgaaaaaatctatattgaataatttttgtttagcattttgttcattaaaattttaaatatttcctgtatccttgacttctaaatactgtatttgaaaaaatattttttgattctccacaaatgtacattcgaaattctgttaattcttggttatctgtttaaaaaatctaatcacaaaaaggcacataaaatgaaaatatattttatctttttttcgctttgcatattttcgaatttaatcagataatcaaatcacgcacacaccgatcaaagtgcgaaccatttttatggtaatttaagtgctggtggatattttttgtatgaggttaacaagcttttcaaagtgcaaaattagcgccttaattgccttacaaaaaatggacaggggggcattaaaagggagaagcaaaagcaccgacaaagtgaggagcagcacagcacaggacaaggcaacagggcatgcttctgcctgctgccattttcaacatatacacacaaattctaatggcaattatgatggtggtggtgatgatacgctgctgctttgtggcggtggcggcggtgaccacaaattccttcccctttctcccccaagcagcacagcccaaccaacacaaaccaactgatgagagccccccaattgcctccgtccgtccccgcccaatttgttggggtggcgattatgtgatggtgtgggggggggagg

SEQ ID NO: 8168 - DNA, 897 bp, Heterodera glycines
aaagtcgtcagaaaatagaaaagtggtcggttggttttctctcatttggtgtgtgtctgtgtgctcctcctctcctcctcctccctccccttccttctgctgctgtttttgctttgctttgctctgtccaatccaatcccttctcatcccttcccccctcccctcccccacttttcttctcaatgccctccaatgtgtggggaaattgcaactccaattaagattaggacggagcgagggagggagggagggaagggagagtgaaattaacattatgtgattgtggcgagtgaaaggggcaaaaattaattggaaattctcgtctgaaattcgaatgggcgcacaaaatgccaatcagttttaggcattttaaaatttaaaaaaggaattcatttctttttctgttaatgtttaataccgaagggagccaaacatggaccgaaggggtgggggggggggaagctcatattaaatggccaaaatctgtgaattaattttcgaaccgaaaagaaaaacggaaattgaggggggggggagagaaattaattgggccattttaaaaaatggattttaaaatgtgcgaatgaaaataatttatgaaaggaaacaaaatcactttgaagtgggaaagaggaaaagaaactgtgttgtatgtatttataaaacggggggcggagggaagggggggggggacgacgacgacgaggaggagatggaggacggacgatgctgctgctggtgatgaggacggacggagatggaggtggaggtggtggcgatgcgacaagcaaaagcaagtgggcgaagaaaaatgtacatattataggcagaggagagaccaaatgggggagggggagaagcaaaatgggagggggggaagtgaatgcaaatggcaag

SEQ ID NO: 8169 - DNA, 1939 bp, Heterodera glycines
gacggacggaggactcctccagcaccgcccactccatgccatcgcttttccgtcctccgtctccccccccccccttctcactgctctttcatcaccatttctttgctcttttgccccaccggacggacggggagcagcaccaaaccgctgctgctttctcgtcgtatcggctgtgaccaaattggggaggaaaatgtgcggcgtttggtggccgcaccaaatgagaaaacatcacacatacacacaaatttggtaggatatttaggcgaggggcagcaggacggggccaatttgtatggggtatactgctacagcttccgctgttgtatgttcatcaccagcatgtagcagcacagccattaattaattacaataattaactcgttaattgatgcgacgtttgtgtcgcccgccgtccgttgggtgcctctgctgaactttaatgtggcactttatgtggtgccgttcatttgctttaaatagtgctctttttgatcagtagatgggcctaattacaccttgccgcgccgtttgtactaactgcttcgactctttgtgtgcacaactgtcagaacattattctttgcagtgaaattttaggggaaaaacggaggatggaaaatgaaaaaagattgtacttatgagttattattgttttttaaattcttttaaatcaattttaaatcagggcagctgggattcgtccttaaaatggcaaatcgtccttgaaattgggctcccacacttgaaaatatcctggaattcaagaagaccttgaaaataagcacccaataaagattcataatttacaatttttgaaattttctcccaatatttctattaactatgtatgtaatattttctagtgtcctttaatttatgaaaatttccctttgtgtccttggaaaaggggttttgacgatgcaaaccctgtgttaaattattttgttttttagacatgtgtttttgtatataaatttaaggaaacattacaagaaaaaatttaaaatggtttctgaattttcaattttattagtacaaattgttcattgaatgcattgcattggttcgccgcgttcgtaaaatattttcgcgccggggggggcaaatggtcaaaaacggacgaacgaacgaacgaacatggagagagagagagagaatgtggagggggaggaggggaatgaatgaatgggaattgtgaatgatttgacgccgcgggggtaggcggggcggacaaattttgcgaagagtgaaattttgaaagtttgtgtgaggtcaaagggacaccaccgggtgaccgacggacggttgagtacggcggcgaaggcgggatcgggtcaaatgcacacgggaacaacgaccgacggggggtttgccccgagacttttgagtaactctcattcagacagagagcattgcttctccaggacaaacaatgagtgtatatgttttccagggtaaaaagccaactcgtgctgttagtactagagatcggaccggttcggttttttcggtatttttcggtttcggtttttgaccgaaaaaaccgaccgagaaatttttgactttttcggttttttttcggttcggtttttttcggttttttaaccgaaaccgaccgaccgaaataatcaaaaaaccgaaacaaattggagcgatataacctgttaataataataaatttattgcttttttgtgctctttttcattttgaagaattttttgtaaaatattttctgctattttgaaaaaaattattaacaaaaatgcaataaaaacgaaaaatacacccctgagaaatggaaaattttatcaaaaattcatattcaaaatttatttatttatttatttacttgactacatttttgatttttaaaatattttatctcatttccatttttagcacctattttgggggtttataatagggttgctcccc

SEQ ID NO: 8170 - DNA, 5790 bp, Heterodera glycines
cagccgattataatcaaccataatcatttggtcgaattcacccaagacaatcatctctacaccaccaagcggaattggtgaattgaatgtggctcgtacgtttgttgtaccgaccgcttctcaacagctcaaatccacagctgtcgtcaagcgtggatgtcattggaattacaaaaaaggtccacgcttttttgaactgggccattgaaatgtcaaatgaacgttcagagttagccattccgagtgcctcatacatgtcaacaaaggcgctgacaaagtgatcatttgaaaaatttagtttataaggaacagctgggtaaactacgccaccagcatgtaccaaaatctcacgcaaatcaaacggctcaaacatgaagggactcagtttgtagtcaccatgaaatgctgaatttccaaccaacgttattgtcacgcgtcgatgaatggtcgcgctgaagacattgtactcaaattcgtatcgaccgacactgatgaatgaagacttgatttcggtcttgcgtactgcataagtggcgggttgtttttcaaatgttttgtaaaggctcatgttcaatgacggctgaacctcaaccattttggcataaatcttgacatcgtgaactgtcaaacgatatttagttgtatcatttgcttttaaagtttgcaaaagaaaaacatctttggctttgtaaattgtgaacagcaaatccaaattgtttaagagataaagctcctggtttcccaaatcaaagtcgagacgggagagaaattgcgcattttttccacccttaaaaattttacaacgctctttgaacccctcgtctgttgagtcatcttagtttacggtgtgataataccctgttgccaagaaaatttttctttgcatttattggtaagctcaacacattggtgatatacgctttgaatgggtataaatttccgctatcgtatacttccgtgttgccaaccgtaacttttagttgctggacaaatgtttgaccaatctcttgaatggcagagacatagtattcgcatcctctgtcgcaacccattgaactaagaaaatgttcaggccactgttaattgctaatggactgctgtcactgattttttgtgttattatttatattctttgaaaattatgctttttacaaagttgtttacgagcgtgtccggttgctgccctaatgttcataataatccaagtgcaaaggagaagcgcaataaatgcatacccaatgagagctacgcgaggtgctggggtcaagattcaccaccatacaatgtggaagtttgacaattgccccggcttgtatttggtctgccgcaaaacaaccaatatagtagtggcgactcacgttgtttcttgccaatgttttgtcaatttctaacgtgttcattatttaaaaatagacatttttctaaagttttgtgttaatgtacatgttccgtattggaatggcatcaagcttccgatatttgtactgatctcaatcaggatttcagaaacttcctttaataaaattttgtgatattatatggcaaaaaattgttcttcaatcacttggtcgggtttacgggctcaacaagcacctgtcgactaagagtatcaatacagactaacaagtacttgtagccacggttttgtttagcaattcggtcaaaaatagccaaatcggtctgccattcagtgtgtaagccaggtgccaatgttggcaatcgacggtagcgccgcttggcctgacgatgcagtgtgtttgtacgttgggtggctaaataattttggacatcggttagactaatttttggttgagttttcgcgcctctctcagcagcggttcaacgctcgtgaatgcgacaggcaaacataggtccttgtacaagaactcaagcaaacgaagctttttaaaatccataatgatggcttaaatttcattgtggtgtttttataaatgccttttgcagttggctctttgttttgagcacgtttgtccttgttcagcaggtgactaataatgtcataaacactgctggttataaaaagccgcccacccgctctcaagacctgtccttcctcagacactccaagagattgggcgtttttataaattaattttaagatttccgtttgttaaggttgtcgtttatttgaactcgatgcactcccgcatttgttccgctcgtgggacgccgctgtgtacaatgactggcacattgccaattttgccggcgcgctgcagattcatcacatttgtgttcagctcaccatagctataaataacgcgttcaatcaggggtagagatcattttatccacatttcgcaacagacgcattatccactctgacttcccactacctgtgctcccagacacaatcattgtgaatggatgacgaaattgtccatcctcccttttaaattgttggaaggcgtccattttactttttttttatgtaattttctttttatttatagtttttttttattttcacagattttaaatggatttaattcttgccaccgattggataaacaacgcttatcccgaaatggatttacaggacgccaacaaagagaacaaagagccaacgaaaaagcaagaggaggaggcggaggatccaagctggatcagcctgattgacgaggagatgaagcgcgagccgctcgctccaattggtgaggagacgccagcaacaagttgcttttgttttaaacgtatatttaaatttaaatttaggcactccaaaaaaatgtgcatgtgccgaacgccgtcgccccgttccgctcgtggaccatctctgcaagcggttcaaatgcagtgcccatgaactgcatgtgcttttcaaaagcttagagaaacgccgggacattgtggagcatttgcgctccgtccaactgcgcactgcccacctgcgcccgtccgtgcgcaattttccagtgcgttgtaatgacctgtccatcctggacacccactcggcccccgcgtaccgaggctacctcggcataacggtatttttatttgttttgtttgtccgtaacaaaaaaattaaaggtccggatgcactactacataaagcatggcatccgcttgcgccaccccaacttgccgtgcgtcgttgaatttggaggcggagatcacaaaacttttttccctcttgaaattttgtccattgttttgtagatgtgttcaatttccaattgtactgttgtttttaaaataaatgttgaacccttaactcgagagcaatttttggcaattgcacagcgtggcgcaaacacggagtacaacgcacgccgcttccacgctatcatcatgcgaatccgtacaacaacgggcaaaactgtggcagcactggtcttccaatcggcgcgtgtggtcctcaccggagtacccaacccaaacagcgcaaataaaatggcggcacgtgttttgcggcgcatccaacacacacagagcatcccactcggaatctaccaactgcgtgtggtcaacattgtcggcgttcaaaccttcccccagcgaatcagtgtagagcgaattcaaaacactctgggtggcacatatgatcccactatttttccagcccttagatgcaaattgtcgaatggagtcacgtgcctaatttatatttcgggtaaggtcattgtcactggggccaaaactttggatgtcatccaacattcatttaatgatttgtctagtattttaccaaattattatcgttgaataaatttattatttacaattatttgaatgaaatgaacaaaaaataaaaagacaacatcaaaaccacccggaatgccctggttgggcggggtcatgatcaacaaaatttctctttcgtcgctccgtccgttgtccatcgttcggtggtccatcatcctccacatagccaaagggacgcgtctgcattccggggcggacacgcccctttgcgtagaagggcctgtagtctttgtgtgcctcgtgtgtgtaaaggtcggcgtaagcgttgcggtcaatatgtgggaagttgacccgaatggcgcgatgctcaccgcctccgaacacgtagaggtcgtcattgtccagcacgtcgtcgctaagattttattatttacaaacttaatgataaattgcaaaactcacattggtccgtcaatgttgtacgtggccagcgtgagctctttcatcgcctcaaagttgagcaactgttgggccgcgtacgacaggcggaagctgcggatcttcaggttggcacgctcatccgtaccgtcccgcgcagtatgccggatgccgtagttctttggaccacccgcaacgaactcgacgattctgcgatcagtgtgctctcgcttcatctggcccagtgcctcgccctcagcaacacacggaccacccatcttgtttacgtagtagatggagtccgtgtctaaagcataagcgtgtacaccaaatgttttgtgaaaaaacagcataccgcagtagagcagctcagctccgtcaatcgccaacacctgctcaatgtagtcgtacagatgcaggcgggcatatgaagtgacgaaggaagcgaccggaagacagttggtcagcggggccttggcaaactcggggcgcttccgcacgacacagcggtccatgtgctcggacacgtggacaaaatccaacttgtccagcgacgggtcttcaagcagctcgtggaattcagccggcgtccgcgtgtagcgaatttcggttcggcccacccgctgcgcgagctttcccctgtaaatttttcgtttaaaaataaataaattttattattaatgaccaaagtgagtttgccaaagttttggcgatgaggcgcaggccggggttgaattccattttggcagggtccagctggatgccctcggtgcgctcaaagtcctccacaaatgcctgacgctgctcgtccgtgacacatccttcaggccagcccgtcgcctgcactttgagaccgacaaatgtgttgacgtacgagctgaacagtgtgccgtcccactcgtcgtagtcccaaacctaattggtattttgtgcaaaaaaattttaaagagtgactacctcaaaaaggtcagtgaccacatagccgagctgcagggccttgttgagttcggcatgcgtgtaggccgtcacccacgaacgcttgtcgtcaccgtgacggcacggtcgctgctgtcttcggtcggcacaccacccacacaaagggaaggtgaagcgctcatcctttgtgcggtagccgagcagaggcacacggatggtgcgtggcgccagcacccggacaagcagcagcccccggaaggtgttgttttccggcgcagtccacgggaggggtgccgtggggggatggagcagcacctcgcgcgtcagaacccgcgggttgcccaccgggaagcggtttgccttctgaattattgacgataaaaaaattaaggaaacagttcaaatgaccaaccataacgtatgggtataggctcacgatgtcgatgcacaaaatttcttcgttgtcgctgcacacgtggtggagcttgaacggctctgtgcggcctcccctcagggcatcgttgcgcggatccaacgggcaggggacaaacacggcctcgtaccgtcgtttcagctccgggtcgtgacggagacgctccgcccaatgacaggcccacactttgtgtatctcacaaccgtggtcgtgctccaactcaaagagtcgccgctccgtacgttcgtacaagtcttctgctgttcgcccagccgccagttgttgctgtcggtcggggaagcactttggacagcctt

SEQ ID NO: 8171 - DNA, 3765 bp, Heterodera glycines
caccgcttttcatgcaaaaaaatgaatttataattttaaatgtctattaggaaatgtgaatttgcttaaaattgtgaaacctgaggttgtcgcagttgacaaaaaaggccaacactttgaccgccaaagtggcactctctttgttgttcttctccgctttaagcgcaatcagtcgctggttaagttcaccaaaactaaacttacaatttttaaacgatcggattagtttaagaaacaaaatgttaaagggaaagcggacaaggaatccattttttaacaaaagtcgcgccgcgcacctttcgttttcggtcctttccatgtcgacgtcattcgccccattgacgtggttgttgatcattataacaaaaaaatacttcagacagaaatactaagcaaaaaaaacaataaaaacagagcaaaacaatgaatttttaagcaagtacaactgaaaatttttgattaccgggcaacggaataaaattgatgattttaattttagttattttttggcgtaatgtttgttgcatttaatttaaattcaatgaaaaaattttaaaattaaatctggaatttttcgaatgtacgcgtaagggatacaccgctggacatctaaactgggtacaaaaaattttttaaaattagaattcttatttttgtatttattgtctgaaaatcggaatattagtaaagctactcggacaattgttctgatatccatcaatcctaaaccatggaggatttcattaaatatcaaattatttgaacatttgcattttttgattcattttaacagataaattaaaacgagcaaaactcgctaatacaaaacaacaacaacaataattacagaagacttagaagtcctgaggctattgaatttatataatttattatggcactttgtgctattaattatgtgacaaattgctttttgttcgccaaatattccgcacattctttcatccacggctcttccgaccgttttgcgctgtcgcttttcgtttttggcatttgattgctgctccttttctgcactttcttcctcttcaccggcttctcccctttaagtcccaacgcggaaatgtccggcacaatttcctcgttggccgtgccacaacagagcaacacttcgttgatgtcttcgtccccctaaaatttgagcaaaattaatggatttaaaaaagcaaaacaaacttttattgaataaacgcatgggaaaatggtggaaagcactctcttcacactttgagatgcttcttcgtctcgagtgaccaaattaagcgaaagaacgccgcctgagggggaatttaatgcattgggaaagagcagacgaagggcgttaggtaattagttaattatgtgcctttttcgacaagacaactgcgcatttgcttcagcgtgtcctccgtgacaaattgggccggtggacagtaaaggccgccctttccgacactgccgccggacaaatcgaccaaaagcacatcaaattttggacaatctgtacaaaatggggcataattatttaattggccttttaaattgccgaagagtatgtaaaaagagcagaaattttccattttgtggagcaaaaaaaactcaccttgcgcagaattttcgcgcaaaaaatccatcgcatcgcaaatgaccacttccaatcggtcggattctgtcggaaagtcgaaaagttttcgtgcaattgccaacacctcggggtcaatttcgaccgcaacaatttgggactgaaaaggaaagactattttttaggagggggggggagatttaaaatttataatttggccaaaaaaagtttaatgaaaataatgcccaattaatatacagaaaataacacagcgaaacaaaaagacaaactaaaacacacacctgcttgaacttgtcgtgcataaacttggccaaaattccacctgataatggcatttttaagttatttttgcaaaagcctatttttccaataccgccaaggccgagcagtgcaatgcgaagcggcgcctccaacgcatccgccaaaccggcagaggacaacgacggcaaaagtgcaaacgcagagagcatcattttgtggtgttggcatgacaaatcggaccacacaatgtgccaacggttgccattttttgactcttaaaaataatgcaaaagtgtcagtcacaatataagtaatttttctcagcaaatcccccctttttgctacggcactcacttcgcaccacctccacctcggattggatcaaattggcactgtccaggaacaccaaacgccgccgcgtggcgcccccctcgacttcgacctgttcaacggaccatttgccactgatttttgaaaagccgtgcccaatttgatcagtgacatcggcagagccaagcgacagcaaattgatctgaagcgggagacaaagccatggaaaaccgttggtaggcgattctgctgatttaaattttaatttgccattgcttccgtgacaaatcgtcgcttactttttggccggcacacgccttgggcataaagtccaaaatgaacacgttcaattccctctgaatgtcctcaaccgtgccgtatctctgaccacgaaaaaggctgacgaaagagtaaaaaaatgcaaaaaattatctaaaaattgtgttaccgtacgacgacgagtcgatgaagttcgcaattctttctgagaactgtgcggccattttgagttgcgaaaagccaatcattttccctaaaataaaaattaaatggaattaaaacaacggaatttcaatgagccgttcgctccgccaatagactgtttggatatttaattcacaaaattttgtggctcccaaaattgggacggaatgccaacctgcctaatggcactataaacgcgccataactgcacattgttttcaactgttggtcatcgaccacaaacagctcgtagcgttcggcaccgtccaatgcagaaattttgatggaagtttggtcgacggggcctctgaatgaaaaaaattaaagcaatggaagaattggggaaaatccacctggaaataaagtgccgaaaccaattcatttgttgggcagcgcaaattcgctccatcaatttgtccaaagagtgcaccaattcgggcgactgtccgtccgaaaaagtgccgacaaattccattggccgccgttcggtgagcgccgttttgaatttggtgataataaactgacaaaaatggaaacatttacaatgcttattttttgtatgggttttcaaaacccacggcaaaaacgggcatcgcaaaatcggcattggtccgctcgcaattctgcactcggaccatgaaagagttggtgccgaaaaaggcggacaacctttgaacaatgtgaggttgggccaaagtgatctgaaaagggcaagtgatttcaggcaaagcctatagccgagggagcaaaagtacttttcatgggggaccaatttggattgcacttttagaaaattaaagtttttggagtcgttccccgaatgatgccatcaaatccatccaattcagacaaatatttacggaggagttatatctcaaaaacggcaatcgtaaagaatgggggtcccaaatataaaattattattttaaatttgatctcaaaataagtaattgggggttttcgagggcgctgatcatgagattgaactcggatttgcccagttgcgaaccccggacccgaattcgaacaaaaagttggaatttttttccaaaggtacatttttctgggtaaaagcttcgataatgcttcat

SEQ ID NO: 8172 - DNA, 1250 bp, Heterodera glycines
caaaagggcatcttaaaaatgagacaattctggcacacaaaaacattgttgaaaaaagtaacgattggatgattaaatcgcaaaaaggggtccatttccgtggctttttgtgtgcgtttgccacttcgttcgcaaatgccgtgccactcacccaaagtgcccttgtccaacacaacattcgccgacgcgtccggcaatccgagctaaaaatgccaaaataaaaaggataaatttgcaaaataaaatgtgacgtcagcggcagaacgttgctcaaatttgagactcggacgcttctcggagtgtttctttcgctgctgtgcaatcacctgaaattgtgaaaatgagttaagttggaaagtcgcacaattcacaagttccattttttaaagtttttcgtagtgaaaatggatggttcggtgaaagaatttttgcaatttcttatgtttcaatttctaaaaaccttcccgatatcgaccccaccggaccccacttttttaccaaaactttgaattttaaccaaaagttgcaaaaactgcatttctataacaaaaaaaacaaccacaaaatttctgcgttttctaattctcgtttggaccactttgatgtttctttaaaaggtttatcaaaaaattaaaattttcattggatttcatttatcgtatttttccattttacttgtccatcgatgtcaatgctgtgaatgttgcggaaaccgttgtcataaagcttaaaaaaaagcttagtaaaaagaaaaaacaaaaacaaggaaaacggctgcgtccacctgctccgctaaattggagttgccacagccaatttgcaaaatggcatccgatggacgaatgtatttgtccaaaatggggctcaatttgtcgtaattgccatacctaaaattgcattttcaaaatttttttttctttttattatcagaattgctttaaatgacaaataaaaacgagttatgtgtttattgggtacagttcagcgatttgtgaccacaaattataaaaaatatccggtcccccaaattgcttacgccacaagaaatccgaaatatatgtggaaaaaagtgatctgtgactgccaaatctcgcttatctttaagcttttcggcaatcatggagtttactggtcccgttttttttctttaaaaatcatggaaaatttttttaagggctattttactgtgctgagcacgaatccgaccttatttttggccgattctgaaccccgaaccctctgattcgaac

SEQ ID NO: 8173 - DNA, 1098 bp, Heterodera glycines
agattacgacgaacggcagaggcagagggacgaaaagccaatagaagaaggaaagcacaagcagaaagtggctggaatatgattgaaccaatttccaagtctgaaatttttaatattggataaacattatgcactttcttttggccatcattttcctttttctctcctctcccattctttcccgtgcgtctcatttcggcactttctccccctccctccctctgtgtgtccctcgcccattcgtttgctaattggattttaccaaaaatgccccatcccatcccccccccccctctctctctctctctctctctctctctctcttctctctctccctctttttgtttcctgttgcctatttcactttcccataaacttttccgtgaacgcgcaacaacactttggtgtcgattctcctttttttgcacagtctctccgcccacttcccttctctgcccactccaattaatccctccctctgtccgtctttctctccccgttaatcctccaccccggcacttctgccaatgacaaatcccttcttccgaatttcgccttcttccactgctgcgcgtcagttgtgcttttcaatcgcttccctccctcttttgctcccttcccccgcccgctctttcccttccggctcgttagctccctctccccccgtcctgccaatgtctcaactttggcacttttcgtctcaaattgtccttttgtccttttcgtgtcaatctgccaaactgctcactcattgatgggttccatttttatggaattcaaaaatcccaaaatctctttctctccccacccattttggcttcttccattttctgctgtttatatccctcccctcttttacttctctttttgccgatgaatgaatggtgccgagtggagcctaaataattaatgtgcacggaaggctttccaactcctcttaatagtttctcctcctccgcatccccaatttctgagatggctttcccattgtatttgttccctgcaacaaatgatgatgattagagggggggggggggcataaaaaggggtaattggtaaataaaatttgttgggatttgtttggataagatgccgatt

SEQ ID NO: 8174 - DNA, 3839 bp, Heterodera glycines
ccccccccccccgccaaatgttggccaatttttactttgggcaggcacaatgcttgcctgtgcgctttgtgtggccaacccaaacgcttgttccaaccccgtttggtactccaacttttgccttatgctccaggcacttggccattgtccaacgattgggtctaatcaatggttgggccttttaggaaatgtatccgaacccaacacaatttgataaaacagcaaatccatcgtcggaaatgaacggaattcggtcgaggtaaatgagcagcaaaagagccaaaagcaatttgaaatgataaagcaaagacattcactcttcccttcatttgacagaatgttggccatgcaaatcggcgcggctgcggcggccgcggcgaacgatccgccgcaaagtgaatccggcgggggaagtaatttgcccttaaggttcgtcgttctttgcctgctgccctttgtcctcttaattgattcccatccctgctaaaggcaagaatcgcgtgccaccgtggcaatgttagcgccggccgtgcacataatgcaccaagtgtggcgggggatggcatgggttgcggacggaatcgaagaggaggatgagcccaccaaaagctacgaacacgccgaacaggtggccaccgattggaagagagggcattgatcgatcgatcgctcgatcacctaatcaagcaatttattaaccattcattctttgtgctattctcacccagggcacttcgagatcgtgcagtcaagaggggatcgactcggcacagaaaaggctctccacaattgctgaatcgagcagcagtgcgccggaagaagcgagcagcgaattcgcgtcgggaaatgacataatggtgtgattagctgatcgccaattcggaatcgatgcgcaagtgcctttgacttatctctgatcactttactttttgaccaataaacgaaaattcggagagacttaatgattggtggtcgtcatcctccgaaatatgctgaacaagaaatggtaagccatcgaatccgttaattagcgaatgtctcctccctctcggcgtcaccacccatcccgcttcgtctgctttatcgtcccgtttctttctcacaagtcaataaaaagtgatcagtcctttccttctgatcgaaaatccgccccaggcattttcatcttccaattatgttcccgcgccccctcagttgtcctcctaatcacttctcctcacttagtcctcctaatcacttctttttaattagtcttccgaatcacttcttaattagtctcctaattattatcctcaattattcttcaaaatcacttttctccatcactgtgcctcccttcccaatgctatcactttgcttgtctcctttccttctcctttccctccgcctccttctcatcactcgccgattcgtctcttctcatccgctccgttctctttccgaatttcccgtccctccaactgacgacaattggcaagaaacgaccaaatctccttttgaggagttgcgggagcattttggcaaaataagtggaggaaaatttttgaatctggaggaaaagttggcaaatgccaaagaatatgtgcaccgaatggaatttggggacagaacattcacccacgacgtaagtgaaatttcaaggggaagaaatgccaaattggtgttgcacagaatgaggcggacaaaaggaggcccatttcgatcagtccgtcacagccaaacgtaagtgccgtaatggcaccggtgctttttgaaggtcagtgattgtgcaaagggaagtgccattccctgcccccttcaggcgacattatcctaaacgaacgacaaattgacgccatcctaaggcgccttaaaaaactgcaaaacaaaaatcgcagaaagccatcgcctcaacggacaatgtgccaacacagttcatcctcaaagcgtagcataaatgctgacccggacaccttttggcatcaaatgccaatcaaattccatctgcacgattcgctcggtgtttgcttctttctgttgttttctctaattttcccattttcatcttcagatttgacggccattcaacaaattgcgagtgccattgccttttgggagaacaacacttgcgtcacttttgaacatttggaccgggagccatcggcggcggaagaaaaggaagaggattttgtggacttttttaagggccatgggtcggtcggatttaattttgccactgatggcggattttctctccgactctttcagttgctattcgatgatcggccgttccggggggcggcagggagtgtccattggcagcggatgcgaaagggtgccattggcagtgccaacatttattttccgagagagcattcccaatttcagcttggcattgtggagcatgaaattggccacgtgtggggtgagttgcagtgttaagcaccaaaaaatccaccttatttgtccccccttttaggcctttggcacgaacagtcgcgcccccgacgcgtggaaatatatcaaagtggaaaaggtcgagcacagaagcacaccaattaacactaattagtcacccagcactgattaatacatgttttcaggaatttgttctgccttcctatttgtctgactttcaactccgcgacgatgacgaaattatgacgctcggactgccttatgattacggctcagtgatgtgggtgaatgcgattatctaatggattttatttgccaaagacatttaggcattatggcccaaccgcctttagcacggacggaacaagccaaactctgatcgcaaagtcagtgccattttaacgatttttatgcgactttttaggaatatgctctttcaatcgaccatcggacagaggtccgtttcattctcaatttcgaatgtttaaagtttaaagaatgaattatttagggaccaattcgccttttacgatgtccgtttgtttatttttcgatttccattcgattcgtttcgtattttcccttaattttcaggtgatggccattaataaggcgtattgtgcgggtgaattttccatggcattgattgcttttgccaacccaaagccgttagatcagataaatgtggtgggattgcgcaacttcagcagtcggaccgtccgctttccgtcagcgatccccaaaatcagcacgcgtccccccaggcggcgctctgtctgaacgatggctatcccaacccttcgcgctgttccgagtgcatttgtccgaatggttacggcggaaaacaatgcgaaagggcacaacaagcgcagagtgagtgtagcaaaattaaagggggaagatgaaaagggaatgaattgtgattgttcagatgcgaattgtggcggcgaattgaccgttgggacggacaaatgggcacaattggaatcgcccggtgggtatttagcacggcaactaccctaatgagatggtcggccttcccccgaaaggctattccgaggatggctacgaagtgggccaacagtgcaattgggtcgtccgctcgccccaagggacgcgcattttggtcgaatttgttgacgacttctccatgttttgtggcaacatctgtttggattatgttgagctgaaattggccatggaccaacgtctgacgggggcgaggtgaagcgaagcgaaggcgaagaaaggaaattctgaccattcgacagattttgctgcaacgaacgctttgccggacaaatggtttcggagcacaatcaaatggcgattctcttccgagcccaactttcgcaggacattggtttccgaatgcgtctgagggcgagtcggtttccgatcacttcccaaccaaagtttaaccaattcagcacaacttccag

SEQ ID NO: 8175 - DNA, 1375 bp, Heterodera glycines
tgcaatttcgtcgcctgcccaattcgcccgatgccgcaaaagcattgtttatgacagatttatgtccacactcgaaagcgtcttcagcaccaagtcaaatgtgcacggagaagcttcgtctgatgacacaatgcaaccagccgagctgttgtcccccgttttatgcactgaacggaaaatgcgtacagacggaaaccgaaaattaaaccaattaataaaatgaatggaagttacaattaacacaaattaacactccaacacaaaggcgtctttatttgataagacattgcaaatttgaagaagaaaagaaaatggtaaataaaagtgtaaagagtgaaccaccacatttacataacaatgcttctgctgaatgtaaatgtggggaatatttattacttaagttgtttaattggtttagattatgcgaagaacggagttaaggatcaatcaaattttagctgggaggtagagatttttggaaggcgagtgattatatgaagggaattgggcgagtaagtgagttcttcaaactggcgagatatggccatgagggaatggagaaaatgggcattcagtgagagattagacacggaaaccaatgagtgatcagacacagaaatcggtgactgatcagaaacggtgacaattgaatgatcagaagggaggagagacattctgatgtagaaaaaaaaagatgttgatatcattggcggacaaatgatcagaagggtcaaatgaccaattgaagggtaaattggccgacaaaagatggagtcgatttccaattttagttcgtatttaaatccaaaagctctattttcactgcaaaaggcattggtaaattgactacgccaatggtaagtacttctctctctcttttaatttctctctgcccttacatttccgacaatttcaacttcattttttaatcttcacattattttgttttttaatattttgtgggttatcgctaaaataaacctaaaaatgaaaatctcgaatgtgttgccgaattttaagagaagtactggacattgtttatttattgttagtagggaaagttgggctttgtgaaagttggcaaattctcgaaactgtagccgggccgtccgcagagagtgcagccgatgtaccaaacgtggtaaaagccgggaatggcgaagagcactccgacgacgaggaaaatccatccgtggacatctaaagtggagaaaagcgaaatgagcaagaaaaaagaggagcagacagaacccatgtcgttggggaaaagcattacacaactgccgaacaccaaaaggacggagccaagcaaagccaacgcggcggaaccgagaacgactcggaagttggcacgaaggacacttctgaaagaggg

SEQ ID NO: 8176 - DNA, 1934 bp, Heterodera glycines
tgatcaattggttaagttagctgacttggaattaactagccaactgatcggaaatgctcaatatgtgttgttggatcgatgcggttggttggcaacgaaagtgcgatggccgaagacgacaaaacattcgaattgatcgctccaattcattgactttgccgacatatggtgcccctgctgctggcctcaatgttctccatctgttaagattgaaaaatagaaaaatttgaaattatgaccaaattcgttaattatttttaaatatttgaaaattttgaattttattttttctataaactttgtcaatttcggacaatcaataaactttcattttcaatattttgaaaaaattataattaatcactttattaagcagtaagaattacaacattaagcacgtaataaatagggcttcgatttttaggtttttacatatttttttcctgagctccccgtggcctgaaacgcacgaaaaacatgtttttttgggctgttgttaagctacttttcgagttattagcacctattttctaggtttttatttttagcacctaaaaaacctaaaaaaaattttaaaaacttattttcacctattttggcattttgcccaaaatttgttaacaaaaatgaaataaaaaggaaaaacagacccctaagaatcgaccgaaaatttttttcaaaaaatatacccctaagaatcgactcgaaaattttcaaaaatatacctatgaaaaaagaaaaatttctcaaaaatcatctccaaaatttatttgtttattttcttggcgagaattttttattttgaaaattatctatctcattaatgatttggcataatatttttgctttttgaagaaaattttcgattttacaccccaaattcggaactttttggcacctattttcccatttttagcacctattttgggggttttttagaacctaaaacctacttattttggcagtttttagcacctaaaaatcgaagccctaattataaaggaggaaaaacttataatatctatgtttagctacaattcaaatggaacagcccaatcaggaaataaagacaaagcgaaacaaggagaagctggaacatgagggttcactttatgttcttcacaaactcagtgacgatggacttcggaagtattggcgatgcgagtttttcggagctaacgacaaatgcaaaggtaaatgcataaaataaaataaaaactatttttcaaattcagggcgccttcacactgacattaatggtaatgtcctcaaaataattggaagccacacatgcgacatgagcgccgcacatgtggagtgtcagcgacgtataacccagctcaagcggcgtgcagttgagacgtgcggagcgccggctacaatccgtgcgcaggtattgcggaacactacaacccccgtgttggctgcttttccgaccaaagctgcgactaaaaaggtcaacgtttgcaaatttttatgccaaaggttggtatttctcgaaattatgaaatgcgcccgtaatttttcaatgcttgttattttttttttgttgttaacacattgataaatatgttatgttattaattttaaacattttttcggaaaaaatcagtagaatctattttggacaaaaacagcttgccgtactaaactgaccctcgtactaaactgaccctcgtactaaaccgacccctcgtactaaaacggccgtactaaactgacccggtccgaaaaataggctctctcaaaattttttaggcgctaaaaataaaagcctaaaaaataggcactaataactcgaaaagtagcttaacaacagcccaaaaaaacatggttttcggggaaccgcccacttcggcgcggccatttcggcgcgggtttttcggcgcgaggttttttcggcgcggacattttcggcgcggccttttcggcgc

SEQ ID NO: 8177 - DNA, 3801 bp, Heterodera glycines
  unsure (1)..(3801): unsure at all n locations
tgacctgcagttttagcagaatgggcattttaactgcttcgaaagtgtgcactttgccacggctttcttccgctcgctctatgacttggtggtggggcccggagaaaagcaatgggcgcgaagttgttggccccactttccacggggatgaagtgtgttgacttggcaattgtcaaattattatttgtaataatttggttccgatagttttaccaagatcgtcttgaccgttggtacccgtccattcgatttcgcaaaaatgacgaagtgatcacgcccattcgccacaaggaattgggagattggaagaagttgagcattgaggagaagaagcttatctaccgctactccttccgtcaaactttggtcacatttcgtcgtacattttctttggcattagcattatttcgattcgatagattattattattttttctgtttaggccgagtttgaggcattgacgccttatggctatctcacagtcactttgttcttttctatgcttgggcttactattctgtacgcttcgtttgttaggacttacggtattcagttataggtactttgactcttatttatattttttgaacagtgacaaaattcaatgaccgattgcctgacactttcgatgatgaatataaagtttgttttgaagttttaagtaattttcaaagcaaacaaaagtattttaggaaagtcaggccgagcgccgtgtggtactggaaagggtaagaaaattgcgatgccatttgagaattattcgcaaaaaaatttagggcaatccttatggaccggcctactactacgattacgagaaaaatcgttggaaggactgaagtggacggaaaagtcctactcgaaattcgttggagtgttttttaattttaggggatttttaatggacatttcaaatttgcacattttttcgtaaatttcttattcagtttttacgattgataaagttgggtttcagtttttaattgttgttaattttttgtaattaaaaaaatgttttttattcgtataaaatactgccatttgctctttttttaataattctttttagctttccaagttaagccccttaacttttatttgtcatcgtcaccagtccaattaaaatctcgtccttatgcctgcttcgcactcgaacaaagaaggggctcacaatcagtcatccgaaggcgcacggcgccatttgcaacttccgtcgcctccacccgatgattttcaggtcatttggaaagcaaacatttgaattcattgatcagtcaaagagttcgatttgttcacaggttagtcgtcgggttgtgcttttgtcatcggacgaagaggacgaagacagcgacgaatctccgtcaaaggtggacaactcatatttagtctaagtgtgccacttttttttataacaaatagccttttttagccgtccagttcagcagcagcaccaagggagaaccgtggcagggcaattttattgtccgaggaggaggaagagccgcagggggaggagacggaatggttggggaagaagagtgccgccagtgctggcccatcaaatacggaaaggaaacgcgaaaaaaaggtgaccgaccgtaaggcgggagtaattttgaaattaaaaacaaataaattaaagaagcccgaagcccatgggatgctgaagtcgttgaagctgaaggcgaagaagttgagggagaagcagaagaaacggcggagaaaggatcggatgcgaagtgacgaagaggagggcgaggcgatggactcggacgggtccaacgacggagacgtcgatatgcgcgcagacagttacgacagtgaggacagcgatgttagtgcacacattgtgttggggaaacattttcaaagcatatagcaatgattacgccatttttcaaacaggcgaacgaacaaatttccgcccgtcaattgaaattgatgcgcgaattggagcagaaatgtgtggaatttctgaatgagtctgatgtgacagaactgaacgcttgcgagaaattcaacgacaaattcgttgcttttgtgctcgccaatcgcccattcgaaaacttcagagatttggtgatttgtagcaatttggaattcaaatcataattaaatttttggtttaatcactttagaaatccaagcttaccgtcgcaccgggaagaaaggctggcgcgggagcatttgttcgtttgttggacaactatttggaatggttggagaacagaggcattttggataaagtgttggacgactgtcgcaagcacagcaaagtgatcgaaaaggcgctgaacgaaagcgaaggaagtgcgccggtggagagaccagccggactgaacccgaagtgaacgacggattcgaatggatttaacccattttttacaaataaaaacaatttgttttttgcagttgttctcttcatccctaccaacaaattggtctgaattggcttattttgatgagtcggcttgggatgaatgccattctggctgacgaaatggtttgtgcatgttcaatttaaaaacaacacattgtgtgacttttgcttgttagggtctcggcaaaaccatacaagtcatcgccttccttgcctgggccaagagtcaacaagaggttgagcctcgtctgcgcggaccgcatctgattgttgtgccttcgtcgaccatcgaaaattggtttgaaaaatcaactattctcattttgttacctattgagcttaaaggatgcaagaaattgcccattgggccccctctctgcgcgtgctcacttattacggttcaattgatgaacgaatgcaattgcgtcacagtgcttggcggcattcggtgcgtttatttcttattggatcaacattttgggtgttcgaatggagcattattggttgactgttaatatttgatttaggtcgatgtgatcctctccacttacaacatggtcatctcgcggccagaggaccgaaaatttttcaaaaaattttccctcaattacgtcatctatgacgaggggtgagtttattgacaaaagagcagttcgtttccctccccacgaattagtttttcgcgtatttttacagtttcatttaaaaaaatattgtttgatttttcaaaacatttctcaatttcggattgtgtgatagggagggggagcggggtaaatgaaagttgttaattgagttgaatggtttttcttatcgccagacatatgcttcggaattgtgctacgcagcggtacacaaatctgatgaaagtgcgcgggaagcgcaaaattctagtgaccggaacgcctcttcagaacaatctcgttgagttgatctcactgatgtactttaccatgcgacaactgttcgacagagtacgttttgtagagaatcaacaaatattatttgtgtgaccctttttccttaatattattcccaattcttcagtattgtgatgacattacgtcattacttcaaatgttcgccatgcgtgccaaggttttgatggaaaaatcgcaaaacaaaggacgtaatgccaaaaaaccatcaaaaaatgagtccaaaaacgaggatgggggagaggaagaaatgccagaagagctcgacaaagacaatggactgtatgaaaagcacaaaattggacaagcgaaaagcattctccaaccatttattctccgacgcttaaagacagaggtgttcaagtattatattttaattacttgttgatttttcaaatgtttcctttaataattattgctttttcctttaaaggnntttggtcagtttgccggccaagcacgaacacatcgaattctgcgaactg

SEQ ID NO: 8178 - DNA, 1209 bp, Heterodera glycines
taatttatgtaaacccgtgatttttagtctttccccacacccccttgtacacaaacccacattttctaagtgcttttcttgtgaaaaatttttgaacacgctcaattttatctatatctttttttaaattagggttccaaactttggtggcatattctacttgaggtcgtacaaaagttttataggctgctgttagagtttttatttccctgcttttcaacactctcaaaatttggaaaattctaagatatgcgtttcgtataattttgctaatatgttctgaaaaattaagtttcgagtcaattataattcccaagtcacgtacactttccgattctgaaatcttttttgagttaataaaatattcttttttcttgttatttttccctaaataaagaacaaaacatttttcagttgaaatttctaacccatttatttttgaccatttttccaaagcctcaatcgctttatccaactgatttgaatggtcatcgttttcatgggcataatataatttaacatcgtcggcatacatttttatgccaactgatgatgctttatttgaaataaaggacggcagatcatttataaaaattaaaaagagtaatggccctaagacacttccctggggcactcccgaaaatattttgaaactttctgacaattcatcgccgattttaaccttaaaactccgattttttaaaaagttagttaaaaaattataaatttttccttcaattccaatctttttgattttttgaagtaataaatcaattggaacagaatcaaacgccttgacaaaatcaatatagattatgtcaatttgttgattctattgtatagaattatatatatcgtccatcgtttttaatatttgagttgtagtcgatctattttttaagaatccaaattgttctttatcaaagaatcttgtactgttcagaaattctaaaattttactactcaaaattcgttcaaaaactctacagacagtgctggttacattttttggaaatgcgggatttgcgggattgcgggttaatcccgcgggatcccgtcccgcaagaattttgagttccatcccgcagcgggatccgcaaatttgactttttgtgcgggatttttgcggatttcattgattttttgaaaattataaaagacagaatgcccaaataaagtgtttaatttgctttataaaatataattaaa

SEQ ID NO: 8179 - DNA, 4233 bp, Heterodera glycines
gggaacataccgaagagagccacagaacgcgccgggagagatgtagaaagacaatttaagcatatcaacatatctagagttccatccaaaccaaaacaaacacactaccgatacaaatcctcaaattttaaaagagcccgatataaaagaatggtttgacaaaatagacggcagcagaaagatagacaataaattctgaaattgaacatcctcattggctaatctctctctttttgtggtcctttttcagcttcagatacttctttattttcaatatccttacgtttaaaatgttcaaccagtgccccgttaagtctattcactagagcccggcgcgggacgggatcccgcgcgggattttgcgggatcccagtccgcaatcccgcattttttggaaaatgcggggatttgcgggattgcgggattaatcacgcgggatcccgtcccgcaaagaattttgagttccaatcccgcagcgggatccgcaaatttgactttttgtgcgggattttgcgggatttcattgcttttttgaaaattataaaagacagaatgccaaataaagtgtttaatttgctttataaaatataattaaatattccagtaaaaaaataaagatatatatttttttaaatggcaatttagtgttcaatattttcttatgttttaaaattttcaggaacttctaaagcccaccgaagaagtctctttacattattgtaaagaaacactctccgcccgaattccgctcgctcgaactttggtctccactttggaacgagttgatctttcagtgacaattgatggcgaaatcaaaataattaacgaagttgagcaaatgcgtacaaggctgattgaggcggttaaaaagcgttttttacaaaaagaaaataggtatatacttaaaatactattatattttaaattaaacatttagactttgtatgttgagtacttttctctaccctcgcttcaaggatcgtttttccgacgaaagtgacatattttttgcgcgcgtttcacgttttttgaaggacgaaggagcagaagaaaatgacattttggaaaatttggaggatgaagtgaattcgactcgaatttcgccaccagccaagcgcgcttgttccattgtggagataatgcagaacatagccagttgtaccaaaaaaggttgtaccaaaattgttattttgattaaaaaaaattttagctacatcatctcaaaataagtgcatgtcggaagagattctcacatacaaagaggacatttgtgtttccatgaatgttgatccgttgcagtggtggaacagcaatgaaagaaaatttcctaaactttcaaagatttcgagtcgttatttgacaccaccatggacaagcatttccagtgaacagctttttagtgtggcaagagacgtatatgactaccgtcggtcaaatatctctccagaaacggccgaaatgttgatctttttgcacaattctattcctgatgtgaatttctcatattaatttctatgttcatcagtttgtttttaaaacggcacattcatttattttttgaagaattttttattaatacaatattttttcgaaattcaaaaatcccgaaatcccgcgcgggatcccgcaaattttaaatgcgggatttgcgggattaatcccgcgggatcccgtcccgcaaaaaattttgagttccaatcccgcagcgggatccgcaaatttgaaatttccggtctctaatatctaccatttatagacagttcattttctattgtatttctggggtttaaccaggtctcattgatgatgaacattgatggatcatacttatgtgctatatgttctaaatcagatattttatttgaaattgatcgggcatttattaataggcaggaaacccagggatttttatctaagtattttccatttttatggtttggtttgctcgtgtaacattattgagttctgagtggtcgaagagggtgcggagttttcaaagtaataatggagaggtcaacgacacatatttaaacatattttcactttggttcatggcataggccttacggcgaagctcataaagcaaattgagttcaggccgggtgagatcccgcctgaccgagacattttttggaaattgaatgaattttgcgagggttttgcgaaaatttttaaggaaaatgtctcggtttttttttgtccacaaatgggaccttgacaattcggttattgcccgaaggcaattgtaattttggatgtcggtggatctcttcaaaaatcacctcgtccatcagtccacattcggtagcgaccttacgcacaagttcaacggcatcgatttgttctggtactttctccaacactgctctcttcgattttgcgataatctcctccgagtccaacacggcattgttgaccagcaggggtggggcgcgcacagaaaaatcccgcggtcgcggatcgcgcatcgcggattccatttgccgcggtcgcggatcgcggatcgcgcaaaaaaaatcccgcggtcgcggatcgcgcatcgcggattcaatttgccgcggtcgcggatcgcggatcgcgcaaaaaatgccgcggatcgcacatttgtaaaagcataattagaaaattcccatattatcaataatcaaaattgtaaaggataatattatgatgaagaaaaataagccgttcgagattttcatgcgagagactttttcggaggtcattcaaaataaatcctgcgcagctgaacaggcgttccgactcaacacttcccggcggcgcactatgatactttctcataagccgtcccaaccatcgttttcagattcatttgtctccctttcgttcaaaaagaccaatttcggttgagaattgttgtgtttctcaattttttccttctttttacgtaaagcttcgtccttttgcttgtagtgttcagggtgtttcaattttaaatgacgttccaaatccgatgttcgttttttcggccctgtgtcaactttatagttgcatgtcttacatttggcataagaagaattgtgaattttgtcaaaataaaaccaaatagagtctttttcgttggtcatttggtctaaattacaaagaggaaaattgtctataaaatgaacgatgaatgtataaatattttctgattgcatattccatttaaatgcgcgagaaaattggaatttggtcgttttcaaaattttataccttcaaatctaaatattcaaaaaagaaaatcgcttcaataaattttctttataaaaattttgccctaaaaaatgcgcggcgcgccgcgcacagaaaaatcccgcggtcgcggatcgcgcatcgcggattcaaattgccgcggtcgcggatcgcggatcgcgcaaaaaaaacgccgcgaatcgcggtcgcgtcccagccctgttgaccagttgggtgaccattccgatgcaattgaaacttcacaacaaattagagatgaagcatatgaaattacggaaccgcaaagggaagcggcacaaattgtcagggataaagcattggcaaaagcgaaccgacaaagggacgcggcatacgaaagcgcacaacgcgtgcgagacgaagcctatacaaaagcggaacggctaaaagaggaggctcacggattaaagatcaagcataggcaaatgcgaaatgatgaggacgaatgcgagacgagtgagagacgaagcacgctgcggaccgaatgagagacgcggcctatgccaatggggactatgaccgcgacgtagcgtatgcgaatgcggaacagcaaagggaccgctcagtggcacatggcatccgaaacggagcaagagctaccgcaagtcagcggagagacgtggccaccagcgcactgaattgtacagaaacgcgaaccagcaaatggagacggccaatgcgaatgcgcaacgcgtccgtgaactggaatatgcaaaggcagaacagatgaggcaacaggctcaacgcatgaaagaaataggttgtgatattttcctgatagaagaatgaaaagttggtaaattatttagacgttattgatagattttgttgataaatattttaccagcaaatgattttgctataaaattcaagatattatgagggttttttattttattattaaatttgaaaaagattctaaacctatttaggtcatttttctgccattttgtgccaaaaatgacactttacgaagattttttttccaaaaaataacca

SEQ ID NO: 8180 - DNA, 1928 bp, Heterodera glycines
ccccccccccctccccctagggcatgattgttttgtgtgaatagcagccagcataccatgtgcccatgccaagctgcttctcaaagcaattttgttcattcattgctctccgccatcagcagcagaggtgaagccgccgtttgcatcgcccggaggcacccaaattaactccccgccgccccccccccccctccggctgtgcttctttttccaccaatttttagccgcacttcgccctaggcatgaaaattggaggtaaactgtcaaattgggcaaatccgacacaaaggcacaaggtattgtggctttgtgttaacgacgctttttgtcggacggcctccgccagcgggtccaaccgcaaattttggctaatttgcgtcgctaaaacgtcctttcatttgcaatatgttcagcagccattgacagcagcaacagcttctccttcaatctattttttacatcatttaaaatagaaaaaaatatttaaaatacaatttaaaatatgaaaaacaaatcataattaaaaattctatcaaataaataaataaattagaaaagatttatgaattaactaattaatttttgttcctttttgaatattcgttatgaataataccaaaaaagaatttattattacatctaaaattgaattgaaaccaaaaattccaaaataatttatcatcatatcactaggcttttggcaaaaaattggaacatttagtgtcaatgccggattttaattgtctcccattgccccaccaggcactgctcaaatacatcgaaaaatgatcccaaaaatcgcactttcttctctcatttcaacatcttacactcttttcctcaaatgcctagacatctgtcaaatgtaaaaaatttaaaaaataataattaacgcatttgccccccccttaccccgggggtcggttggtccgtcggcggatggtcgactttcccccgtccccggcactttacccccgccccctccctcccctcgggggcacttccccaccacttttgcggccattcgtcgtcccctccggcggggaggggggaaagctttgtgatgtctccaacattcttttcaccctttgagcagttaccggcccactcaagcgaaagaatggtggataagaaaagaaaaaaaggagatgggaagcagcagcaaagggtgagcgggttggcttttcattctccgccaatccgtccgatagaggtgtcggtcgattgagtccggcttcaaaccgtggaatgcccgaataagggcggaagtccctaaatgttatcataaatctgaatggaaattctgataacaacatttgggctgctttttatggtcacctgtttagacgctaataaacaatgttttgagactgagttgtccccctcatgcattcgtttgtcccccgaggcgcaaaaaaaatcgtgcaaaaaaatgacgggggaaggatgaaaagcggacgctaagcaaggaccagcagcacagggacccctcccccccaaggggaggcaaatttatgcgacaaccaccggtgcgtgtgccgtgccattttcgtcctcccccccccccccacccactcgcggcttctaagaggttccaccaccgtttatatacaattccttccttccatgaaaggggggaattgcctttttttgatgccgtgcccccggaaattttcaatttggtagtgccacattttggagggtggtttcacgaatatgtcgccgatttttgatgcatagaatgccagaaaagggaaaattattttgtcatttgtttttgaatgtgccaataattaaatcctttcccggcagccattgaaaaaatgcatcatttgggattaatcatttttgttacattttattcattccttgtgtttctgtgaaaatcccccgtaataattcaccgattaagcaccaatttttcatac

SEQ ID NO: 8181 - DNA, 2824 bp, Heterodera glycines
  unsure (1)..(2824): unsure at all n locations
ttaataaatttttgcagattaaaaattgtttgactacgaatggatatttatctgaagaagaaatgcgcaaaaaaggacaaataatgggcgaattgacaaaaattattaaagaatgggtaagaggaaaattgggaatagagatagaaaattcaaatttacgaatcccgcgcgggattgtaaatcaaaactttttgcagtacgatatcccactggataatcccgcaagtcccgatgttaaaatttgcgggaatcagcgcgggattgtgagcttattgaaatttgaaaaaatatcgatttcaactaaaaattcttcaaaataataataataaacatgaccaattttgtcaaggtttttgctaaaataagtacaaaagaggtaaaagctatgaagtttcctaaaagatttttaataacatttcttctaggttaaccttttttcttctttatccatttaatttctcatcacgcctctttcaaaaaatttctggttggggacggaatggcgataattcttagcagatttcgtcaaaaaatacaagggattagccctgaaaaattcccaaaaaatcttgcaaatcccgtattttccaaaaataccgggattgcggaccgcaaaagttccgcgcgggattacgactggcgccggtctctaatagtgaatatttttaaaaatcaatttgtttagtgcgccgatgccattatacaatttgccaaattggtattgggcaatgaaaagatggaaccaatttgcattttgtctgaacaatttgacaggaatttaattgttggcgaattaaattgtgaaatgtacgaaaggcaaaaatgcacggattcatcactgtattgcatcatttgcaaggttaaattagttgaaatttggaaaatttgagactgtaaaaaggcgtttgataaattaactggccaaaacacttggattttcggcaaattttcagaaaaaaacttccattaccagggccagatctcactctaagatatcgatgagctcgtttctgaatgtcgtcgctattctgcaaaaaactcaaaattgttagggacagagacgctttgactatgactggcaaataaaacacacaaaaatttatttgtaacaatatgatgacaaatttacggaataattcagaaattctgtcgatcctttgttatatctaggaaatcattaaatatgacttttctcgagcaataagaattaataaattaattattgtgtttattccataattagtaattaaatatttgtaagcattccgctgtgaaatcactgacaaatgcaaattcgtcggcacttccaaagttgaaattcttttttatggacgtgtcaatcgaaatgaaatttatttttgtaccaaattacaaattgtcaattccaaaagaacagaacaacttgagaaattatgaaaaattcgccaattattttgctgaaaacattgagaaattggcatttaatgacaatttcgatgataaaatcaataagtatgaaatagacctactggaagactttttagaaaaaccgacttttcgcagttaaattaacaaactttaaaattatatttttcaaataatttgcagataaatttgaaatggacaaagtgttggaggataaaaagcaattagagaaaatcaaagaaaaagcattaaaagagagacaaaatttggaagaacagaaagcaatgctaatgacattgtcaagtgagaattaattaattaatgacgaaaaataaaattatttttcagagaattttatgaatgaaagaatttttgaaattttatcatcagagcaaaaattgtacaaaaattattctgagaaaaaactgttggaagatgaaaaaaacaaccaaaaactgcgcattgtgctctcttttttggatctttggaccaaaagtagcaattaaaaacaaataatttaaaaaatatttaaaaatttagataattttatatatgggccagaaattggctatttgaacacaccgatgttattgataatggtgtcaaaagtgtttttgttctttccggaagcatcagtgccttttttgatagagaaatttttcttaatttattcaaaatggtaaaagtaaaccaaaaaattcattataaaaaaatgcaaaattaaggaaatggccaattcccgtccaattagtccaaattgagcatcagagaagtgccgagtttctggtctggagcccaggacgagaatggtttatgaaaaaacaattcggacccggcaaaatttccgaaacgatggccatgccaatcatttcgccattgttcccggaacaaaacgaagcttatcggattaatttgtcaacggcaaaagtgattcaaaatgagctgaaattaggtacagaggcctaatttattaaataaaaaagcgattttagcatttcttcaaataagaaacatgaacgaaacgcgacaaataattgatccaattctcggcaataaaaaattcacagaaaaggtcaataaataaaaataaaataatataaaataatagaggcagcagaatacgagaattacagcagaagcggatttcatgatttaaatgctttttttgcctaatggtccttgtgccaagtttagccttgcttgttcaaaatattttatttaaaaatttgggtttttcggacaataatcaaagttatttatttttttaaaacttctgaaagaaacccattcttattccgacctctaaaagtttaaataattaagtatgaacattttgtcacttttgtttgcgctggaaccaaatttgacgtcgaanagtttgccattnntgtcggaaacgattggggcatgaattgctgca

SEQ ID NO: 8182 - DNA, 3173 bp, Heterodera glycines
  unsure (1)..(3173): unsure at all n locations
tgaaagattgcgtacagtatggtaaacacagtaataccttctctggtcaaacgatgttgccgccccgttggcactgtaaaatccattgcgaacaccgtaagcacaaaagggggcgttgtgccaaggatgcaaattgcgtacagttgcattcgttcgcgcgaataattaattgtccaatgacggagaaaatgatggtggtaccacccgaagctgatcgttttcttgctgattttgttgatgaggtgtatcatgttgatgaccatttacagatacagtagcagttgtacggccaaacactgtcaaatttgacggataaggtcaaataaaaaacttgttcattcttagccaatttatcttttttttgcctccaaactgatatttctagagattaacctggattcaaacccaggtttttttgatcgagagattatagtaaaaccatttcctggtttcgaatattccttttcaaattcataattcgaaactttttctgtctttcgatttccaatacctttcagcacttttttgacaattagccaaataaaacaaattgcgtataatgcggttggaatgtatgaagtcgttgtgagatttattaagttgactgcatcaattaatttaaaatgcaaattgttctccttaataggcgtcataaaaatgtattccaaataaataaataattatataaattgttttttatacctttattatagctggaggatatatggagactaatgtgtaaatgcatgaataaatacgcaaattcggcttccaattgacgaccactgaaaagacaatgccacaaaaccagcacatggcaaggcacagtctcgtaaagctattaacaaattgctttggtatttaagggacaaaggcactaattaggcaacccacaccgtatggtaaagagatggcaatagaaaattggggccattattgcgatgatcctatttaatgctaacaaattataagcaacagcaaccgccatggcacaaatttggtacataatggcatccaaatcaagcggcaccgcaattcggtggccgacaaaatggcccacatagagctccaaagtccaaaacataatcaaaatgtgcatgatattctgaaaaaataaacaattaaatataaatgcaaaaaaaaaaaacaataaaaatctaagagtttgtaaaataacataaaaaattattggaaataaatgaaaaataaatttaaaaataattatagtagaattttgtatcaatttatcattttattcattattattgaaattaatatttgttttgtttattacaatgttaagaaggatgcaaaatgcagtccgcttttttgcgagttttgccgtggccggcagaacaagcaaatgcggcaacaatccaagcaaatgtaagccaagataaaagccggcttggaaatgttgggcagtcgaagaattcggatgggcacattttgccgcaatttgtgtcaggagaatttcgttggaataattcatttaattataaataataattgctttaattctgctaattttaacaattagttatttgagtgataattagggctccaatttttagattttttacttattttttgtcctgagttccctatggcctgaaacgcacgaaaaacatgttttttcggttgttgttaagctagttttctagtattagcaactattttctagttttttatttttaacgccaaaaaacctaaaaattttattttcaactactttggcgtttgcccaaaattattaacaaaatgcaataaaaacgaaaatacactccctaagaaaacggcccaaaaaatttcagaaaaatacaccctaagaatagcccgaaaatttcaaaaatgcacaccaaagaaacgaagaatttctcaaaaattcatgtccaaaattttttatttattttcttgacaagaatttttgtttttaaaaattatttatctcaatacgggtttggcttaattttttgctttttggataaatttttacgattttacaccagtaaatttgaaagttattagcaactattttccattttttgcacctatttggagttttttagaacctaaaaactaactattttgacagtttttaaaaataatgtttttaaattttgaaaaacgaagtttcctgagccttaaagtatgacaaaaaatcgataatttctccagataactctctcgagcacttcaaatggcgacgaacaattgtttggtgtattttaagaacaaatgaatgtgcaacatgccttaggctcaccaattagtagtaataagggaatttaattattttttttgagagtcagcttacaatgagcccgaaataagtgagtccagaggcaactacttccttatcttaatgaaaattgcccaagaaaaacgcaaaattaatacaaaattaattaaataattatttttttaaataaaattaaatccaaagagcctccttacataattacatttttaagtcttggagcaaaattaacttaaattaaaaagaaacgattctgtaaaaactaattttctcatggatccgatgtgctcgcgctggcgtgtgtcgtcggccttcgtttccttctccgtcttgatgttgttttgcgggttcttttcgtttttgttgttgcgctgtttgttgttcggtttctccccgtcccggtttggctctcttcggtggtctctctggtttggtggttggttttggggtcggttttttttgtgggttttgcggtcttttttgtttttcgctttttcgttttttnctttgcctgttttttctgtcgccgggttgcctggcgtttgctcgtgtctctggtttttgcgtctttgtttctttctgccctttttgctgttggtggtccctgggtcctttcgctttttttgcgccttcttggtcttctcgttcgtcgtgtgtgccttgtgcgcccggcgttttttcgttgctgcctctcttcgccgtgcgctcctttttgcgggtctgtgtcgtttcggcgccgccgtttcggcgcccgcccttgtttttggcctgttgctttttttgttgtcgttccgttctctccgtcttggtntcgttcgtgcgctgttcgtgttaaaagctctttctgtgcggttgcttcgcgcttcgtcgcttaataaaaaagttctaactgaaaattgcaaaaaagtcaaaa

SEQ ID NO: 8183 - DNA, 940 bp, Heterodera glycines
gtgtcaggagattttcgttggaataattcatttaattataaataataattgctctaattctgctaattttaccaattagttatttgagtgataattagggctccaatttttagattttttacttattttttgtcctgagttccctatggcctgaaacgcacgaaaaccatgttttttcggttgttgttaagctagttttctagtattagcaactattttctagttttttatttttaacgccaaaaacctaaaaattttattttcaactactttggcgtttgcccaaaattattaacaaaatgcaataaaaacgaaaatacactccctaagaaaacggcccaaaaaatttcagaaaaatacaccctaagaatagcccgaaaatttcaaaaatgcacaccaaagaaacgaagaatttctcaaaaattcatgtccaaaattttttatttattttctagacaagaatttttgtttttaaaaattatttatctcaatacgggtttggcttaattttttgctatttggataaatttttacgattttacaccagtaaatttgagagttattagcaactattttccattttttgcacctatttggagttttttagaacctaaaaactaactattttgacagtttttaaaaataatgtttttaaattttgaaaaacgaagtttcctgagccttaaagtatgacaaaaaaatcgataatttctccacataactctctcgagcacttcaaatcagggttgttccgggttacccgatacccgaaacccgacccgatgattttgggtcgggtttcgggtcgaaataagcactggtaagaaaggggtctgggtgaaaattaggtggataaggaaattgagaattttttttgaaacgattgtgttcaatggaatagaaaattttgtattcgtttttgttcattattatccctttt

SEQ ID NO: 8184 - DNA, 3003 bp, Heterodera glycines
  unsure (1)..(3003): unsure at all n locations
taaacatatgaccatgactgtaattgctatataatatatacttttaccgcaaaaaaaaacttttcattagcacgatttattcggagataaactcattcatttccatttcattcacaaacaggtcagaatntaaaagctgttattaaattttgtctattatttattagctaatgttatacataatttacccatgtttttaaactatttatttaacgaaattttcccgccaaaatgttactatccagtcaccgattatttttaatcacactaatttttcatcactctttctccatttttgacattttttcaagaaaacaacaattttatttatccagaattttagcaattataattctttatttttcaatttcagcaaaacaaaaaattttccattatttattttgttggacaaaataatgcacgaaattttaatagtttcaccaatttttcatccaaatcccactggcaatatcctatgcgatgatcatttttgatttaatatgcaacctaaatttttgttcatatcaactaattttaaaataatccttcgcttcgacttttaattagtgtataatatagttagcacatctatcatgttaaagcattttctttataaaaatttatttccaaaaaatatttttcaactattcgttttgcatttattcgcgcactctcttcgattttaaaggacacttttcattaccgaaaataaataagagttttcccaaaataaaaatcatctcgaaattttcgtaatataaaatcgtgaacaaaggataaaatattaaaaccaaaaaattttcgcacactttcatagtcctttatttcccgcactaataaattttcgaagatcaaaagagaaccaaggggtttattccgatcgtttttcttaagttttttcaattcataatttcgtgttttaaaaattgttgcgttcacaaatcgataatttccgttgatatcgattagttgggggggacacaaaaataaacggctgaacactcgcgcagtggtgctaagcgtacccacccaagaataccattaggctggggctttagagttgccgctgtccctttacaatttaatcgttttttcgagttttaacaattactctttttctctaattctctcctctctcctatagtgaatgcgcatctctctgcccaggggggggcccagatttttatactaatactactcatgatgaatgcccctctcaagctgctgtggcgagagaaaacttccctttggcacacggaaacggtattttcggccgtcgtgcaggtgaacaatcacatattgtcggtctgatgtacccagctttgcccaacttaagccaaaaatcggacccaatagccatgattttcgcccacctgtttgggtaaattatgcctgacagtccaaccatccacccgaccccatcgaacaccaacttctttggcaagtgcactttgaatttgtttgttttatttccaacaaagccaggcgtgttgctcggcaaaattacaaagaaagagtttgtcatttgatcaacaagtataaattcttcaaaatgagatcgttcttatatcgtggtgtggcatctcggttcactttcccccatctttgatccagcggaaactctttgccatcgtcgtcgtcgtcgttgccggttcatccttctttatgtgcttcatgatcagatcggtgcagtcaaagttcagctttgcacagtcttggcaaaacgattgggtgaactcaaggcgttgctgctcgccattctgattgatgagtttgaatcggctgttcccctgccggaaattgtcatcacgacactctttgcagatgaacgtgaacactccgtacttaagaaattttactattttttcaaattaatattagccaaaacctttgggcgggccaatttccaaaatatggtcgggtactcaaacacattggtcggttgttttttgggcgattcatctactaaaatttggctaattcaaagaaatttgcagaaaaagccaaaccttcagcttccatggcttttgctttcttcattgcggaagcaatttcctcatggattttgtccaagcgaggcttgcgtcccctttttgagggccccggttgcaggtcaagcagtgtttgagtgttgttgttgtctccaattgtgatgacgtcatcatcattttgaggggaaaaattttcccgtttcgactcatccatttctttaaatttaaaaaaaatttgaaattattataaaaaactcaaaaaatgattacttttgttctcaaacaccaattgatcattgatttttctcggggccattacgattaaaaaatagtttatgattataattgttaaaagcataaaatgaacctgcgaaaaaaaacacgtaattattgattgatagtgagaggggttttagcgcgcagcgacctccagacgggctgtcccttttaatcgataggccacgcccatccacaaacacatagacgagagtgtagtggttagagaaagatacaaagggcgccaattcaaacacacagtgaaacccaagccaatttattgattttttacagattatggtactccctctgactgctgccctatccaaactgctaaactgtaaacccgaaaatttagcagaatatttgaacaaccccgaggcggtgaacaaagcgaacgcttacctggccggcaaaaaactcaaaacaacctaccagggtcgtgattccaagaccaaagaggtcaagttcggcacattttcggtgaaagccgctgcggaaacctacgcctttgagggatttcttggcaagtttccaaaaattcagtttcggtctaacacacatgcgttcaggggttaaagtccaccagtatttctacataaagcaccggatccgcctactgtaccctcagctgaagtgcattgttgagtaccacaaacagggccactgcaaatactatcccttgggtataaaattttgtcaggaaaaaaatccataatcattttcagagttgttg

SEQ ID NO: 8185 - DNA, 2562 bp, Heterodera glycines
ccaaagtttttaaccccaacaagccagacgcagggaagcagccgatcacccaggaccaataagaaagcggctaaacagcaaaaattgatcgagaagaaggaccacctgttggccatcattatgtctgatccgcagagattcggcgcaactgaccgtgggaaaatcattaacccaaagacgggccgagagtttatcgactcggacctggcctggtcaattgaacgcctggtggaccctcgcccggagaatgccccatcgccaagcggaaccaaagagttgaagaggaaactcgcacagaatccgctcgccagtagcctactcaatcgactgtttgttgggtctgggttcgtcggacaagtcaaacaaacgagaggatttgttccctcaaaatggacaagaaaataaacaaaatatacaccgacccggccaatccgggcgggtatgcgggtgcgagtgccctgtacgcggcggtgaagaagaagcacccaaagttgaagcgtaccgagtttgaagactttttgcagaggaacaccacctacacgctgttcaagccaaagagggagaagttccgacgcctacgcactgtgcctgcgggtttcatgaccggtaagttgtactggggcttatttcgcacaattcagggttcagatgttcaggctgacttggccgatttccaagccctttcgcgcaagaacagcggctaccgttacttgctgttggctgtggatgtgttgtcgaggcgaatgttcggcgcgcccgtaaagagtaagcgcccagtggacatgaaaaaggcgtttgaggagctatttgagcaaatgccaagggtgccggacacactgtacaccgatcgcgggctggagtttgtggcaaaaccgttgaaggagttttacacggagaagggcattcaaaagtttgagaccagttcaaagaaaaaggccgccgtggcggagcgtgccatccgcaccctaaagactcggctgtacaaatatttttccgccaacaacacatcggtgtgggtggatgtgctgccaaagtttttgagtgccatcaacaactcggtgtgccgcgcgaccggacttagacccaacgaaatcagcgacaccaatgcgagggaggtgtggaagagggtgtacggcgaagggctcgcacaattggacaagacaccaaagatcagagccggggaaacggtcagaattcccaagcctaagcacattttcgaaaagggtactgtaatacacacattttccgatcaatttattttaatttttaaggctatatccccaattactctgatcacgtgtacaccgtggatgaggcccgctcaaccaacccccagcactatttgctcaaagactattatggcacaaagttgaagagaaaattttatttgcccgaattaacaaaagtacaagtggatgaaaacacaatgtatcgaattgaaaagaaatacaaagaacgagtgagagatggtaaaagagaaatgttggtgaaattcattggatttccggaaaaatattgggtcacaaatgaagaaataaatgaataaaaatattacaaatttaatgaaaattaaaaaataaaaacaattatggcataatgtcggggtcgttcagctcctcttctgtgaacatgttcacattgaggtctgggttgaacagacaggtacaagcgccagggcagttccacttacaccactcttcgtcgctgtacccaaagggcaccaccttcaagccgtgatccctgaccacccccttattcacggtcgggttgaactgcttgaccaaggggacggtgaaaatctctcccttcttggtgatccgaaagttcttcgttgggtagttaaggcggacgttgttgtccggctgtcccagcttgttctgcaccatgtccttcatcttctcgaaagttatgcgctcgcaggcatccgagtccagggtgatgccgcgcaccttcagcttgtactcgtcctcccccgttgcgttgttgtgcagccacaatccgtacgccttgggtccggctaaacaaacattccatttattttgtttaatgtttaatcaatcttaccacaaataaactccataatcgtgtgattcgggtactcgtcagcgagttccccgagctgctcaccacccggaagcgggtcccccagccgcgtcaggtagtcgtagaagatgctgtcagtgtcctaattataaaaaattatttcctattttcattttatttccagagttttaccatgtagagaatgcgggtgtcgtagcgctctacaccaggagcagggccatacacctttttcaacgattccagcagatggattcgcgcagcagaggtggtccatagggcaatggccacctgagaaaggcaaataaatttcaaaatttaaaaattttttcttacgttgctcgtgctgtgttccaccacatgctcatccttggccttgtagcagaccatccaaaacttttccgtcagctgatcgatgctgctgacctcaatcttcgagtcgttcagcagtttggccagctaagaatggcactcgacgatttcggttttggtgagccgatt

SEQ ID NO: 8186 - DNA, 2632 bp, Heterodera glycines
ttattatttttaccagccattaaaattttcctataggctcctgtgaaaacatcggattacacaactttccttattaataaaaaaaatgtccttgttttgaaataatcattaatatttataccaattacatactattttctcatttttgcaccattttgtgcgtttttagtactgaaaagccaaacattttgcattttttttaccaatcatacgattttttgtttctcagctttcaatggagcgaagtgtgaattcgaaccctttcaaaagtgcagaagatgcgccatcattagcctcaacgagccaaaacaatttgctggaagcgcaagtcaaagagcaggccgcacaaattcaaaaactgacggaagttttaaatgaactacagcaaaaagtgaatgttggcaaagaggaagggcagcagagcacacaacaacctcaaacagtagcagcatcggtggaacaacggtgatgcgacatttgcggcgctgacatttgcggcgctgacacttgcggcgcagacagttgcggcgctcagtcaaagcgacacttgcggcgcagacatttgcggcgtgacacttgcggcgccgacacttccggcgacgacacttgcggcgccgacacttgcggcgcccagtcaaaaggacatttgcggcggcgcaaaattcaacgaccccaaaaatatttcaacaatttatttccattaaaaacattgataatgactctctcagtcccattcttcaaagcctttcatccctaggcgatattgcaacgcatgaatgtgattaattatatcagcttggtttttgttttccttatggtcaaaatcgatgactaatcgtcggatcgcttcatcatttctcaaatatttttttaagcgtggcctttcagcaattccacgagttgggtcaatttcgtaaggtctcagacggttttgttggtgttattcctcatttttgatggcgataatgaaccttattgaaattattttattacagtacccatttatactttgaaaatgctgggtggggcgaagtgaaacgttttctgaagctgttatgccacctaagaaattaattattaataaaaatgaataagataagctttagtcaaataaagattaacaaatttaagaccccaaaaaaaccaaaaataaataagttgttttttgaaaaaagtaaacaattcagaaaataaaaaatgaaaatatataaaaagacccaatatttttggggtcgttgaattttgcgccgccgcaaatgtccttttgactgggcgccgcaagtgtcggcgccgcaagtgtccttttgactgggcgccgcaagtgtcggcgccgcaagtgtcgcgccgcaagtgtcggcgccgcaaatgtcctcgccgcaagtgtctgcgccgcaagtgtcgctttgactgggcgccgcaaatgtctgcgccgcaagtgtcagcgccgcaaatgtcggccaatcatcaccagcagaagaagacacgtgccgaagagaaagaagaagaagccgaacaaatggtcaaagcaacgcacgaggggaaatcagcaaacaatcgacgaaaaatgcaacaaattcaaattggaaaattatttcatcattcgacggcacgaaatttattttattttaattttgacaatttcttaggattaaataaatgtgatttgcttttgacttcatattgacaaatgaatgcgatttttgccatcccttctctcccattttagagtcacatttgaagttgtcatttcacaattgtccattgttagcattaattagggtgtgatgcgcttgaattgagtctgtcggttgccgagtaaccaaaataaaacctttaattgttaatttggcggacggtcaaagcaaaggcgccaacagatgaagccttacattggcacgacgaacacaaaaaaactgactaaaaatgagggggaaattggagacggaaagagcgaaggaacagaaaagtcagaagggggaaaagtattagagaatgatgagaaggaaaagcaatgaaatgagagagattgtgtgtgcccttctcaagttcatatttggtaaaagaaaagggaggtaatgccattcccccggggggggggggggagaaggggccgaacgaaccaacgcccgggggggagtcaacgcaatgcatgcaaatgaatgctttgttggctaattggtaattgaaatgcctgccaaactctcttcatgcccccccccccctctgccacctcatttgtcagaggagaattgccaagcaggtgttaattgctcgccttgccatttttgcctttcattattaattaataatcattttcattaattcgatcgattgctttttgttaaattcgttctgtccattttataggcgaaatgagctcaacttttctaattcttagacttttaattgtccacttccatttttacttttggaggaaaggacattgtgagaagaggggtcaatgggaaatggaaaaggggagggaaaagggagtggtggtgtctgaagaggttttgagagcattgcggggataccgcaaaaaatgagcctacaattaatgattcggcctttaaattcccttaatataacctattaaatgatcaattaaagttttaattgcccctaatgactg

SEQ ID NO: 8187 - DNA, 2777 bp, Heterodera glycines
cggattgattatcggtgccatttttacgccaggtgagcgcaggccaatccacggtcaatatcattggccaattggctatgtttagcatggcgacaggtcaagtcgaacctccaacagggacagctgaaccaactgcccccgttggacatgggactgttcgccttcgcatgccaacgggacaattcggggtaccaaggagtgacaacgtacgacaacaccaactacaacagtcagtacggtgggtatggcatcggcaactacggtaatggcaacaatcagttgcaacagcaacaacaacagcagcagtatccgcagcaacagcagcagggaatgtcagtgccaagaaaaataatttaaaccatttttggctcgtttcagctacacaacggggtatcccgcttttggccaacaaagtgccaacaacggcttcggccaggccggctacaatggcttaatgggacaacaacaaatggcacagaatggacagtacggcgcgagtggaacgggcgcgacaatgaacaccgccacaggcacacgctacgtggacatgtgcatggactggtggaacgtacgacgggccgatggcgaggcgtaaccgcagccccctccctcccaaaaaaaaaaaagattttagggatttcttgtcccatacataccgggattgggcttcggttaacccctggcaggtagcagggaaaaggcacccattggcctcgtttcagaatcagcccgtgtgggagaaggcggtcgtttgccttatgctaattgccttggcatccgccgctttgtccttggtttgggacttgctcactttctgcgcctgcttctgtcccggctccatcatgaagccgttgccgggcttggcaagcaccgcttttgtcgctcttctgatcgctgtcatcgtttattacgtcaacaaccaatcgtccatcggttggcttattttttcatttgcgtttttcttccccaagtcaatttcacacgatttttcttccttttttgtcgcaccattaaaaaaggacaaacttattttttcgagtaaaaaagggtcgacataataggaaagtgccgtcatttatgggaaaaatgaaaatggcatcccaaaagaatggaaaatcggtcctttaaattgccaatgttttgactttttgcttttcatttatttgttctttcccaaaaagacattatgcgcgcgacgtcgcaactgcagcaattggacaaccaaagcaacgtcagctacagtttttacttggcggtgggcgccaccgtagcctcactgataaatatcgtagtcggcactttgactctgtttttggcggacaaatgtttatgagaaggaaacagacatacaaaagaaacaaacaaacaaacaattgttgccatgtttccccattaaaatttcattccgtgtgatcagttatatttttaaatttatttaccgattgaaattttaaaaaattttaatttttcgaaaagggggcgaagtaccgtcggtagttttttatccatattttaagattagccattgaatatattccgtggaaataaaatttcaatttattgtcatttatttaaatttaaatgtgttatatggaaaaacaaaaaaataacaacaaaaattgagtgaattaagaagttaaagcaaatggcaaaatgatgaataaacgcgaagtgtttgttggaagtgattgattaagaaggcattggagagagttgggaaaagggagagaccgtaaaaacagcaaaacttgtcaaaaatgtaactttaaaatgaaattaagtcagttaagtattaattaattaattaattaagcccttctgtgtcatttcgtcgtttccgcttttctctgttttttcagtcgccatttgccatttcgctgccgccgctgagcactttgccgactttgagcagcaaacggaccattttcccttcactctcttcactccacagcaaagcgaactcaaaaacatttttgactatttccaatcttattttgtttttataattaggcattatcgcgtcgaaaaatgaaaatttcgacccaaaattatcgatttcaagaattttaggtaaaactcattaatattgcttgttttttaaagtccggagagcgccgaagtgcaacgaaatgggaactgttctctgacaacttttctcttaaatctttcgctcttttccccctcaaactttttggcataacaaataataaatttgacaaataaaattgccaactcacttcgttcgacgacacctgcgaacagcgaatgttcttgcaattggtgcgcacaaagtcaagaaggtcggcttgttcaggaaaagtgtgccggaagagattgccatccgaataattatcagacaaataattgtgcaatttggagagctgaaaagggaattgttgcgaaagtgcgcaaattgggcactttcggacttacggtggtgcttttgtgcacgtgcagaaatgtgctgacccccgccgagtacaaataagcgtcgtatttggtcatctgtccacaaatgcgtgccaatgttttccgtcgtttgtttttcctttccctttttttgccccccccccccaaaatgccacctcatttttccgctttccgttcgccgttggccccccattcgccgatgctccgctgagtttgtcccattcgtttggctcttcgtcctcactgctcccctgcttttgctgggatttgctcgtcattttcccctcttactttttcccccttttaccattttccccgtcccttttctcttttcttctttttgctcc

SEQ ID NO: 8188 - DNA, 6916 bp, Heterodera glycines
ctttttatggcattttgtgattagttcactttttacgaagatttttttccaaaaaaatgacaatttggaggttttttacatatttcataactattttagcatttttatgcatattttatttacataattcgcaaattttcttacataaaaaaggaagccctagtaattacataattctcttttccctttgaacgccgccgttcgatcaatggccacggcttatcgaatgaatgaatggccacagttgtacttttttaaggttgaattcaaagcaaaatttcgacgaatcaatttatagtcgtgcaattagtgggaatgacaattttttgggcacactttttgtgctttggtctttgtaccggtgacactttgcctgtttttctccatactttgtcaattccatccatttcatttcacacctccctaaacattcaattaatccgtaaaatcgtctattaaaatgaggggcaacatcagcagcagaacgccatacaatcactgccttggtatgcacttaaatatgaatattagccattgggattttaggctatgaaatgtatcaatgtaaaaatgaaaaacaaattactcgttaaaaattaaaaaaatgtttctcttcaatttgaaactttaacctgcctcgattattgtacacatacagtactgcttttgctgattcgcaagcactgaaaagcttttatttgttgacatgtcgaaacaaagcctgaggctgagccgaaaatgcaaacatatgccgccggcattttagagggtatttttggcacttagaaaataggaaattgaaatttttttgcaatatgttttcaaataaattgtaaaaaattaccactccatggaatactaacttacaattagcatattatggtgattgcttcgactgcgttcctctaataggcagcctcgaacaatacaaattcaaattattttaaacatttgtaaaatatttaagtcgataaaattaagaaatatgtttctttattaaaaacaaaaaaatgccaaaaatttacacacagaaaggaggaaagattgtttttaagctcttctgaacacctttcttatcgttttgactttgggtgttcttggcgggcaaaggcagcttaataataattgaaacattaaatatataatttaaacaaaaaatgtttttactattcgccgtcctttccgttcagtccgggtgggcccggaatgccgggttggccacgattgcccggcgtcccggactcgcccatcggtccgactggcccaggcaggccgggccgcccttccgtggccggctctccggtgggtccttgcggccctgccggtccgacatggccaggattcccacgaggacctggctaaatttgaaaaatctattaagataaataatgttcccgcgttacgtgtccaatgccgcccgactcgcacgactgtcccggcagcccgggcagtccgacatggccaagtgggcccggttggccggggtcgcccggaggcccaaacggaccaggctaacaatttatattggttatggcatgccacattcgctccctcattacataggcttcgatgccgagtgttccgggcggtcccgccagtccgtccggcccttgcggcccggacggtcctctcgagcccgcagtgccgggcggcccggctggacagggcgcacaatgggtggaatgcgcatgaaaatagttgaatagttcgcttccggaaatgccaggccgtcccggctcgcctgggaggccgggctcaccggcgaggccgcgatgccccggcggaccgggcgggcccattgggcagcgaatgggtgcaaaatgcggtgggggaggagggattcccccagccaaatggtgattgaaatttggagaagaatatctgaaaaaaatatgaaaagattattctttattattaaatgtttaattgaatattattttttaatcgagaattttaccaattttaaaaacaaaaatttttatcgcatattgttttttaattagtagtaatttgttaaaatttcaatgtaattcaaatataatacaatatatttttgttataataatctatttaaaagagtttatcacttttatttaaacaattaattttaatgttcaattcctctagcaaatcaacctgttgttgttgttgttgttgttgttgttgttgttgttgttgttgttgttgttgttgttgttgttgttgttgttgttgttgttgttgttgttgttgttgttgcccatttgctgttgttgttgaccgcttccctggtaataattcatcgaattttgaccgcagcaatttgtccagcgacgaccacggacaaagcgcggaattgtaagccgaatattctccttaaatatctaattaattattacgaagattattttatgggttttttttggttgccttaatttgctgcattttggtccaactttcattagcatacgcattgaattcccaaattccattctcaatttgttcttgaagtaaactgagttccttaacactttttttttaatttactaaattgattaattaaatttacttgaaaaagaatgccaattatggctaatgacgcgacggtgaaaatggcaccaaaaatggtaaaaaacaaaaagaaattattctctttcattttaatttaactaatttttattgccattttatacactctcaaaatgtaattttcggaagtaattatataattgggaaattattaaaaggcataagccatgtctgctctataaaaagaagatcattccgtacaaagttgaaacaggaacgcgcaaatacacagaataattacacaacactcatgcaaagtgaaaccgcgccgcgcagagacatttaggcaaatagattattaaataaattaaatagagcaaaattaataaataaattaaaataaaatataccaattcttggattaagttatataaaacttgtattcgaccgtttttcatttgattgagcactattttattatgtctatgtccacaagcaagttgattctttcctttggtggaatagtaaattaattaccaagtaattacataattaactttattgctgacaccatttctttccctttgtttctcatttattcgccttttctttcactttttctttttttatatatttttatttgaataaataactttattattctaacattcttttttttgttttttttccattcttcttttcttcatccctctgctttttctgttccgtctttcttcagctgtcccactcgccaaatgggtcacaatatggcaacaaatcgcgcagagaacagccaaagcggcaacaaaactgtaaaaaaaaacccatttatttaatgttgatagcaattaaaggtggggttttagcattctcaagataataattaaagagaataattatgcttttttcttagtgtggaaattgcagtaaattattggtcagaatacggcgacatgacaattatcaattatcagtgggatgccaaaagtccaaaatgggagtttaaaaatgagtataaaaaagtgggaatgtaatttttgattgaaatcgaagagtttcagtgttgcctattgcttccgaaagagaatttgaaatttttgaattggtttaaaaatacggtagaaccattaactcaaatcatccaatccaaatttcatgccatgcttcttccctccccgccgttggttaagcaattcccacccgcatcatctcagtcatcgatggggcccggtaaagctgcttgtcgtcaatgtcatccgctgccgatgccattgcgttttcttcgccggcacgcccaatttgggacggtcgcccaaaaaacacttcgccaaatgatttccaccatgatttgtgcggcattggttgtgtgacagtggccgatttggtcgtcgtcacatttgcccggcgttctcccgtccgattgtcggcgctttcatctgctgacaaaggatcattttttaatcaaaattgctttttaaaaccatttttaagagtagaattttcaagcacaatgaaacagtgtcgagagtctcgagatttcttttcaacgcatagcgataatttttaaaactcaaaatttaaacatttcgtctaatttctcaccgtcattgggccctctcgccccgtcgtgattgtcctcattcatctgctgttgttccccatcattggcattatgggcgccccgctccgtcgccgacgcgtcccttttccggcgacgcatgccgcaagtgatttcccacgcggcagcgaacgactgaccgccgggcgggcacaatttcataatgccattgtcgggacgacgaacaaatgcttcgacgtcggcggaagagagcagaacaaccgcacaaacagcagcaacaacaacgggacggagcagtacatggaaggaggaagaaaatggacaaattgatgagtttgttcgccgcatttcactgcttgaatttgatgatttttgttaatttggaaaatgagtttcatgaatagagatttgcacaaaaaggaagtaagggttactgtaagcaacattatggcaacaacacagaagagatgcatccatttttcacttggacacaagaatggcacaaattaaagtccatgtcaaaatgttttatggcacaaacatttcgggaaaggatttatgttagggagcggcaaattgtgtgattcaaagtgcatgagtgacaacagcacaaacacaatatgtcggaatcgggggttccttccggtgccgcccgacgtccgccagcgaaagcggcagtgacggcacgaacagaaattactcatcagaagcagcacaaaccggcgggggggagaggaaaaaacgacgaaatgagtgaatgggcaaaaaccaatctaagagtgaagggattacatccaattccccaacccatttccaacgcattttgccagctaatacattaagcatatttaaaatgggagggggacggaggagtcacgaatttcttggcatattatggggaagtgaatgatgagagaaggcaaaatccaagcaaagaaaaactattggaaacagattaaagagaaggacaactctcattaatttaaagaaagtaagatattttcagctaattattaaaaatctttgagtttttgattactagggttgtaaattatatggattaacatattttttctgcgcatatgctatgaagaaaggggctcaaattttttgatttggtgaaggtttttagtccatataaatccatattttgggtgttttcgggaataaatccatatttcgtcatttttgcgtttttggtccatattttggccattttttggaaattttcacaagaaaaatgcaaaatagcgaaaaatacacccctaaagatcaactttttggaattttttaaaaattacatccccaaaaatacgaaaagtttgagttttcgtcgtcattttggcatttttaataaatattttcgccattttttttgcgaacatttctttttttaatgagaattttattcgaaattttgccaaacttggaggtatttttgatacaacgaacaacaataaaaaaaattgcatttttaagttttaaatcaattttttggttgtttattgtactttaaaagtttattaagcaaatattaaatatacacaccttttttgggattttggaggatttacaacatatattttggcattttttagtccatattttggtccatatttggccgtttttgggctttttagtccatatttcgggcttttttagtccatattttatgtccatatttagcgttttttagtccatataatttacaaccctattgattacacaattagctaattcttctctttcatattgattgcattggcaaaatgtaacaggtcgaaaaaattactaaaattttgtaaaaatgttctatgaaacgttttacgtactcataattaaaattataataatttacaatttgaaaaataatttgtggtccatttcaaattgcgtgttaaagaacgtataatttttttgaaattgctatgcttttatttaattgctttcggaaaaatgtaaaattcgaagacagcgccagacagaagagaaagaagagaagagaagaaaacaatggcataacaagaaaagggggaaaaagggaagtaaattcacggagacaattttaatcattttttaatgaaaaatataataataattaaatttttgttattgagaaaataaaaggaataatcaattaaggaaatcaaaatgaaacttaacggagaaacaaaaaaagagaagaaaaataaagactttaaacagaaatttatttgacacattagtgaactgttgcagttcgaaatgggcgacatttttgtggaaagccgcagccgtaggaaattaattaaaagtgttaaatgtccacgcgagaagagattaaaagctgcgtcaaatttcagcagggcactaccaatttatacgcaaacaaaatgagtaataacacttattaagccatggatggcggcggcacgtcatactttttgggtttatggccaaatgaaaaatgcccatttaagtaactgaatgagtcggaggttcctttcattacattaggccctatcctaaagaaaccaatctttggcaaggtctgcgccagtagctttgttaattgtgccaaattacaatcgccttgtcttcatcattcatgtgccattctttggggtccgctttggcttacgccccactcctcctccccggagggcattcgccgccgcgcgggcggtggtgccaccctccgctgctgatggcaatgcttcttcctctgctaatgccaaagggggaagttggtgagcaagtgccggtgccattgctggtttttgctgtgccatttgcactttttctatgccgcttctccgccctcaaataatcctcgtcaacagaatgacg

SEQ ID NO: 8189 - DNA, 3142 bp, Heterodera glycines
aggggtttatttttcgatttttttgaatttttaatggaattcttcaggaaaaaacgctaaaaaaggcagcaaatcgctaaaactaatctttgtggtttttatagaatcaaggagcaaacacatgtttttaggctgcctttttcaattattttctcaacttatacaccattgatagagcttcaatatagctctacaattttactcagaggtgatctttcgctttttctattgataaaaatggtttattgttttttttgggaaaagataaaaaaattcaaaaaaactgaaaccgaaaccgaaacggtataccgaaaatttttcttcggttttttcgatttcggttttttaaccgaaaccgttcgaccgagaattttttgagtttttcggttttttcggtttttaaccgaaaccgttcgaccgaccctcttgtccggtctctactaaaaacccacaaaaaggccaaaataggtgcgaaaataggtattaaaaattggaaaaatcaagtatatttatgcaaaaaatcttatttaagtcccattcgttattcatttcgcccttacaattgcaagttatcaagaacaaaaattttggaaacgaatttttggggaaaattttcatttcttaggggaatattttctgaaattttggtcaatttttagggtatattttttgaaattttttagatcgattcttggggtgcatttttcgtttttattgcatgtttgctatgaaatttctggaaaaaggccaaaataggtgctaaaactcgaaaaatgccaaaataggtgctattgaccgaaaatccagttttaggtaattttaggtgctaaaaagtcgctctaaatcgaaaattgttcggagaaaatgctatttttgggcttctctcatcataacaaagccgcaaaaaaaataggtaaaaaacctaaaaatcccagctctataaataacccattgaatgtaaaaaaagcaatttttattaaataaatttaacattttcaatttatgttaaatttctgctagataatatagtttttccgggcttggaaaatataaatatatttattttgttcatcttactttgttaatatattttaattggtggaaaagatcaaaaaatatgtaatgaggagtgtcaattactaatgaaccttgttacgtaacaggtggttaacaactaattaagaacaagcaaaaaataaacaaaaccaaagcatttaatataaatgatattaattagttattaagttcgctcagcagcagataattattactaatcgttgcactaagaatgttgattaacatttaacattagtaattataaaacgaccgcgaacaggtgatcaagaaatgattgaatagagaatattttgcatataaaagaccctcaaatttgtctgtaaaaccattcagtttcaaatcgtattttaattccaaaaatcaacaaattcacctcccatttttacaaaatgtcccccctccgtttcttcgtcgccctttttctgatcactttggcaattttggccgggacccacggcactgttgagaactcagtggatggtgggccaaacatggcatcgccgattatccgtgaacgccgtaagttttattttattttattttaattgttgaatttaattaaaggttggggccatggcggcggaggccattggggctgaagaaaatggtgggagagataatggaaaatggagaacggaagaagcgataaacgatgaaaacaagaaaaaataatttgtggtagaagaaaaaatgctgaactcttaggtcgaataaagtttcaatgaatttcttattttttactcaaaatcgtcaaaaatttgggctttgcaaaaaacgcaattttaaaattaaatagcaaaaaatgttcttagatacgacctaaaaagctttggtcctttttaagtcggctttttaagtcgctgatttctaataaatccggaaaaattcgaaaattataaaaatatctatccccttattatcaatcattatgatcatcatttttagacaaaagttgttgaatcaaaaggaaattagttcgttaatgagtgtttcaatcattctgatcattactgacagatgcttaaaaggaaatgattcattgaaaataatgagacactctgtgagcaggatcccaattttaataagcagatggatgatcaccagcagaagtaatgtaatgagtcttgagcggtgctatgacgttagtcaaaaaccatcaaatgctgaactcttagttcgaataaagattcactctaattatccaattcaaattgattagtttatttattaaaataattgaattaaattttgtcacaaaagggaataataaaatattattttagttgttatttttcattaaaagtaatttttttttgcgaggtttactaaaaattataaatacaataaaagtatatttttatgatgtgtaataatttaataattattttttcaataattatttattttttggatcaatagcaatcatttactttaatttacaaattattgttttttaaagagcaatttgtagaatatttttgacgaaatttttttgcaaaaattacccacccaaaattgaacggcaattagtaagtgaatgggtgggcaaacaagactaggaatttattaattggtctgtacttatttaaatttcttaatgattgttacgatcatagggtgacgagaaagaatcccattaatttcaattaaaaaatcatattaataaaatagatcggagaattcgaaatgataagcaactctgatcattaccaatcaaatgctaagaaggaaatatgattcattaaacaagatgagatcattttaagagcatgattcctaactcgaaaaaagcagatggatgaccgctagcagcagcagtaatgagccttgagtatgatcataatgataattactctaattagtattatgagaaaccggccaaaacctcgtggtcaatgcttttcactattaaaagatttgcatataaaagctccgctcaatttttcatgtaaagcatatttcaaatcttaaacaaattgatcgaaagactcattaacgaactgtaataagtacagaccaattacttaattaatctcttgtcctttcgcccacccactcacttatt

SEQ ID NO: 8190 - DNA, 1111 bp, Heterodera glycines
ttattcccttttgtgacaaaatttaattcaattattttaataaataaactaatcaatttgaattggataattagagtgaatctttattcgaactaagagttcagcatttgatggtttttgactaacgtcatagcaccgctcaagactcattacattacttctgctggtgatcatccatctgcttattaaaattgggatcctgctcacagagtgtctcattattttcaatgaatcatttccttttaagcatctgtcagtaatgatcagaatgattgaaacactcattaacgaactaatttccttttgattcaacaacttttgtctaaaaatgatgatcataatgattgataataaggggatagatatttttataattttcgaatttttccggatttattagaaatcagcgacttaaaaaggaccaaagctttttaggtcgtatctaagaacattttttgctatttaattttaaaattgcgttttttgcaaagcccaaatttttgacgattttgagtaaaaaataagaaattcattgaaactttattcgacctaagagttcagcattttttcttctaccacaaattattttttcttgtttttcatcgtttatcgcttcttccgttctccattttccattatctctcccaccattttcttcagccccaatggcctccgccgccatggccccaacctttaattaaattaattaaattcaacaattaaaataaaataaaataaaacttacggcgttcacggataatcggcgatgccatgtttggcccaccatccactgagttctcaacagtgccgtgggtcccggccaaaattgccaaagtgatcagaaaaagggcgacgaagaaacggaggggggacattttgtaaaaatgggaggtgaatttgttgatttttggaattaaaatacgatttgaaactgaatggttttacagacaaatttgagggtcttttatatgcaaaatattctctattcaatcatttcttgatcacctgttcgcggtcgttttataattactaatgttaaatgttaatcaacattcttagtgcaacgattagtaataattatctgctgctgagcgaacttaataactaatta

SEQ ID NO: 8191 - DNA, 1089 bp, Heterodera glycines
tatgatgagagaagccaaaaaatagcatttctccgaacaattttcgatttagagcgactttttagcacctaaaattacctaaaactggattttcggtcaaaaattaatagatttcaaaatataatcattttaaaattatttaataaaaaattaaatcattttattttcaatgttaaatataatttttaataaaaaatttaattcgggttctaaattgttcaatttaaattttttaatcttgaaaaaatcataataatttaataaattattttaaattatttaattaattagccgttgcataaatggaatttttataaaaaatttccaacgataaaatttttcaatatttttttctatttttagcacacttcgctttcctgtctactgcgcatgtaataagccgattttgaccgcttcaagagcaacgcttcaccgtttgtttggcaaaaaatggctaactcaatcatccgcttcaaccgtgaccacaacacttggcggtggaacgcataaatcgcctcctggaatgccaaaaacagttgcgctggcggcggttgagaatggcacgcatccgcaacgattgaagcgtggcgacaacaaatcaacgcggcgcggttcaaaacaattatcgcctcaggcaattttcaacaatgactttcttatacgattcgaaaatcaaaactgtgctgactgacatttatgggaaattaagttagattcaaaaaacgggacgtgaattcagttatgccaaacatttttgatcccggtgtcgcaaatagccgtgccgtggaaaaattaaaattttttttgcccattttggcgaaaaagtgttatccccagaattgttaatttatagtttttttggagacggtgaaaaactttttgactcttcaaataaaatctagaaattttcctaaaaaatcgaaatgaatttttctgctagcacaacgatttggctaaaaccatgatcataattaatgattgatgatcggtgataaaaatattttacattatcgaattttttacatatttattagaaatcagcgacttaaatactatttaaattttaaattgcgtcaaagcccaaatttt

SEQ ID NO: 8192 - DNA, 3985 bp, Heterodera glycines
ataaactgagaaatgcgctcaatgttgagaattgtttgccgttaccagcaaattgtggttggcgttgccgatcacaaccaaaacgggaatccgctaaacgtattgaaaatggaacaggaaaattttcactcaaaattccaaactccaaaaaaaagaaatacccctttcacataattattttaaattcactaatatttactattgaatttattttgatggcctttccctcgcccaaccaaattcggtgtgattaaacctctgaaacacataccaatcatatttttacgaagttgacgtaaggcctgcattcgaacattgtgtgcatcttcgccaacaacaaaaagagttgatgggtaagtcaaacaaatttggtcgtcgactgactgaaacaaatcatttgcatcggtggaagattcaaatgaaatgaccaacccccctggagccgcaaggactctctgtgggaaaggcaaagtccaaaatgccggaaacgttggaaactttgctcacggcctgaaagttagaaaaaattgtcgtcaatagcatcaaaagcatcactttgtggttgagccaacaggttgtgccccatcccgcaagaaaaatgtgatcgttttgccgccttttcgctatttctttgaccctctgccgaatcatccgaatgcacatccaagcgcactcctccacactgatgggccggtcgacgttcaagttaagctcaaccttctcgacacagcaaacagcaagcggcaagagattcctgaaagcatttgacccatcggacgattagcttttgcaaagggaaagcgacgaaagagcagtgacctaaatagggtctcgtgggcacggattgtatgttgactcatcttggcattgatttgcggatagacgagcaccaaactcacgtttttgatcggatcgcacttaattacaggtttattttttgaaacagatttttgtttgaacgaatccgagaattaacttcgataaatttggaagacgaactcaacggaggttcgtacagtttttgcgcaatgaattccgaaatggttttgttcgccttttcgagttcggcttcagcggttggagaagaggcaatgtaatcgctgagattgctgccctttaatttgtagttttgtctttgctttttaaaactaaacaaaccgcgtttttaaggaagcgtaacagatttaagtacgaagtcagtcgagtttgactcaaatgctttaacagccaaaaatgaacttgcacaagaagcgcttggccggactgaaatttaacaaaataaaatgtgcactttcatctctgatgaaccaaagcaccctccctctccatcccatcatggacacatcctctcccctgatatgcaaaaacttactttacaataaagccgtaaagactctcgcagacagttggcgtttttcatcgtcaaactgtgaaacattgacgcaccaccagtgactccttgggttgccaagtcaacgagacgctggtcatcgatgaatttgaggaaactgccaagaaattcgcgggcttcaacaccaaggtttttgaaactgaaacatttaaaaatttaatttctcacccctcacgaaaaaccagtttaatacgcccacctttcttctgaataagtccctccatcctcttccttgttgttcaaagccttctttcttccacaaatcattttgcttatcgaaatggcactattttcggctgggtttgtgacgaataattcatcaaaacctccgggggcactaacactgacacaatcgacctccgcttcaccattgttggcatttgaatctgatcgactgaaaacgcattcagataagtgtcagcggagcgataattacccgactaaaatttcgcggtagaaatagtcgccttcgtagaggaaaggcccacgcgatggggaagccaacggattcaaatggcgcagttcggtcattcgtcgaataaattcgagtctttgcatttgtttttcgttccgctccctctccctcttctcttttgccaccgctttcttctctttgatctttttgatcagattgagcctttgcagttgcatttcgttcagttcttttggctttgtttccttttttgctaccactgtttccgctgtttttttggtcatttcaaccccttggaattctttttccttcatttcctttggcttttctctcatttcctttggtttttcgctcctttccctttgcttttccttcacttccttcggtttttcgctcctttcctttggtttcttcttttttttcgcgaccaaagtttcctcctctctctttaccacaacgttttcctccatctttctgactgtcagtcgcacttttttcagcggagtgtaaacaaagtcatccgcgttcattgtcgggcgtcttcgcctttttatatcagccgaatctatcgccagagatggtcgttgcgttttctcaatttgttgccgttgtttttgctgatgtgcgcccggtagcaaattttcgttctgaattttctaaaaagtcctcttaaatgctgaactgtgattgccttacgaatacctcagcaacaggacgatgcgatgccggaacagactttgtctgcccgggtttggatataaccggaattcgatccaaaatttcaatttcattgccactcaatttgatggaataatctcaaaaaagcaccttcaatattactgctttttgtcaacttaacggaccaaatgaatgtgagggagtgtccatttcgtcggggatttccaccaacattggcgattccataagtttgatttcctcctgctcatccgaaaaattgtcaaagtaatggtagtcatcaggaaaatcagcagccgacagaaaatcgttgttctcctcttcgaaagcatcagttgtgaattttatgtgcgcaggaagaaagaaatcctccgtttgcatttgtgaaatttgttcccgtaaaagaacttgcgaaatttcatcaacttcatcttcatccgattcgaaatcccccaagaaaaattccatttctaaaattcaaccaacaaaaactgataaattgtaagaaatgataaaaagatttgcgcggaatcaaaaatattgaagagaaaaacaaatcttcgaatcactccgaaaaataagcaaaaatcgaatatttattataggaatttttaattcataatgtgatgaaaacaacgctaattgtaagagacataaacatatgtatccgatatcaaagtgacttttccttacaactgacaatgagtaagtgagatcaacaggagaataatgcacaatcgttatttttgtcaatgagaatggacgaataaatgtcattttttaggttcgactcgaatgagtcggggaatgcgggaccctgaaggagtattgacataatcgaatgcgtattttgagcggaagggagtgaggcaagacggagcagcaaaagtacgagtactcaacgaattttccttggcacagaaagcatcggtgacggaggcattgcttttaccacgagagaaggacagagcagtacgaacacctttttcataaccgatttgttgagtgccccactcaattcgctgattggaggacaaagtgccagacagaaaagcagtgtcatgggcaccggcccaattctgaaattatgggaaaattgctattatttaatcaatgccccggccattaaaaataaatcccggaaaaccgaatctgataacaaattgcataactattatacttgtggacaaataaaaaaatatataaatttccggagattttggagataatgagaacaggatacttttccattatgcggccacaccccaaaattttaaagcgccagttttgtgcaaaaaaattatttaggaggcataaaagccgcaattttagctaaaatgtcatcgaatgtatcgtcatcgtcctttaaagcaccgcaaaaaatatttaggaggcataaaagcgggaatttgagctaaaatgtcatcgaatggatcgtcgtcgcc

SEQ ID NO: 8193 - DNA, 2203 bp, Heterodera glycines
gcagcaaaagtacgagtactcaacgaattttcctggcacagaaaagcatcggtgacggaggcattgctttaccacgagaaaaggacagagcagtacgaacacctttttcataaccgatttgttgagtgccgcactcaattcgctgattggaggacaaagtgccagacagaaaagcagtgtcatgggcaccggcccaattctgaaattatgggaaaattactattatttaatcaaaatgccccggccattaaaaataaatcccggaggttttgggggaggaggaaaccgaatgaccgaatctgataacaaattgcataactattatacttgtggcaaaaaacaccaaatttacaatgcttttttggacaaaaaatattcttattttagccaatacttcggccattctaaaaaaatatataaatttccggagattttggagataatgagaacagaattaacaaaactaatataaatttcaaaaacaattttttaaattgtagacaaaatcataaatgacgcgtacaaagtttatttaccgatgtttgatcagcatccttttttgttgcaattggatcatccggagttgagttgaatgttaggttatgccgagacttgggctcatctcgcttttttgccgagtcagcaaagagtcgtgaagagggattcgcattggcaaggagctcaatccgatcctgaatagaattttgaaaactttaacgatgaaaaacacttttttggcgaaaacaataaattcggtgcatttggaaagtcagccattgccttctcacggttttcagcaatctgcaaataacaaaattatttgaaaaagaaacattaaacgaccttggccattttgttcgtgtctttggccaattcaggcgaaatgaaacagcctaaggccttttctccagtgcatttcataatggcacccaatgcagcaaaggatgagtccctcacttcggaatcggcatcaaagccatgctaaaaggccgaaaattaggctaaaaagtttgaaaaaatgtgactttgctcagaattgccaccaaatccttgagcaaacccttgggaatttcgttggccggaagggtacggaaaacgcggtaaatgaacaaatccgtctgtgatttctgactcggattctgtttggaggacagagcctcgagcacggccttgcataggtggtcgaaactctataaaaaacaaattattttttaaacattcatttcgattggattatccatttttacggtatatgttgcgatgccatcgatgcactcgacgagcgcatctctgagcaactgtttcttctccttgaacttggtgaagatcaccgggacaaccaacgacacgtaaggagtgaatttggaacgcaatcccttggcgaaaaacatcacgcatttggtggcacttgcggcgacaatgatatttgcatcatttgccataatctaaaatacaaaatgtggtaattttagaaatcttttccaagtttcccatttcatatcactttgttttgtaaatttcttcaagtgataattttcgctaattggtttacaaaaataatcttttccagcggggtctaactaacaaaagattaagttcaagcgaaaaaccgatcgctcatccttacaataagatgatgagatatatgattagagatttttttgaaaaattttcataaaaaattttcgagtcttaaggataatgcattaaatgcgttttattagtagcttattgtacaaaaatcaaattaaaataagtatccaaatatttttattttaactgataaacggtgttattttcgtttattttcaatttcgttgatttttacaaaaacaaaacaccgcgaagaacaaaaaaaaattgtcacaaaaattcattttttaaatctacgcgttacccaataacaaaaatttttgcggcagaagtttcggcagcaacctttttaaaaactttgcaattttaatgcattttgttaagaaaaagtgaataaaatttttaaaaattgccagatttttctagaaaatttaaattttcttggggggggggggtcccaccaaggatgggccaaattggaaaataaaatgcgaaacgcgaatttgcaaaataaaaaatgcgaaatgaaaataatgcgaaacccaaaattttctacattttttttaatagcaaaaatctaaagcaaaaatccttttttttgaaaattttt

SEQ ID NO: 8194 - DNA, 3909 bp, Heterodera glycines
  unsure (1)..(3909): unsure at all n locations
taaaagctaattaatannttttactttttatttaggtacatttttcaatttttaaattgcaataaatgtgcaatttttacttttgttatcttgaaattatatttatttactattaacaataatctcaaaaaatcaaaaatagtgggcctttttaaatggagttttttaaaatccaaaaattaaaggaaaattaaatgactttataacgtaaaaatattcaaatagaaagttataaatgctaaaatctttataagaaataatttataaatggatatatataaaagtgatcagaattgggttggatttccccaatttcagtcaaaatcccgataattgataaattaaaagcatcatttaatcttgatgaaaatgaatttatttctccgatttaatggccgctccgatgaattccgccaaaaacagctgaccatttgtgttgtttacattgttcacgtattcggtgttgctgctttcttcgttcaaatggtcccatttttcgttcacttcgtcacattttttgccgagtttaaagcgtcgcgaaactttcgcctcccatttcgcattcctttagaaagcaaattcaaattttgcccaaacattttgccaagaaaattgaataaaaaaaaccaacagattgcaaatttgccaggcaaaacactgcaatgtgcttccaattttgacaacttcagcagtaatactgggatggattgaagaagtctgaacaattttttgttagaaatttattatgaaaaatgaaattcagccccaaatttttgaaaggattcaataaaacttataattttatctctttttaataaacccacaacaaaaatcaaaaagaaaatcaaaaaagaaaaactaagaaaatcatatttatattttaaaatttattcctaaaagggaaattttttaataaactcataaagaataacaaatacgtttatttttattaaaaccttattttattatttatattaaaaaattttactgcaatttttttgagcccatcttttgggatttcatatatccatttaaattataacccctcttaatggtgtaacgctatgttcatcgaaacaataaaaccacatgtaaaatttaaaaaacatcctctattcattagaataacattttttaatatataatttttccatgtattattaataaccttttaccatagtctttggctttgacgctaccgtattcgttgttgctgtggtgctggtgctggtggggatcactttctttggctcgggacgcaaatttttgttcccaaattcgacattcatctggccaaaactgcagctgcaaataacatccggcatgctggtattctttcgaacttgggcactaattgcagaacattcagtttcattagcctctttagcacatccccacacgattcgtataagattatctcataaaaataacgtttaaattaattatcttattttttatcttaaaattggaacaggttttgagaaggatcaaaagttaaaaagattttcccggcggtacaaatcggcaccgccgtatctccccagttcactaaatgtttttgaaacgcggaaaaaattttccaatttgatagaattaacaaatttcattaaaaaaaagttttagtgctgagcctggaaattcctttagtagagtgcctcaggcatgaatgaaattatttttgaataaaaattctcaattcccaaaattatttggggcctcggaaaaattgattcctgatacaaaagatcattagccgcttaattacatacacgcaaaacttaactttcacacagaccgccttatagcaaaattcataaccatcaaaacagtactgaacagatgtttttccatttcttttctcatcgagcgatcctccaacgcatttcagtcctgatttatgaattaatttaaataaaaatatactttcttatcacacgttttacgtatctaattatcatatcactactctttttgtatgacatttagccataagcttagagctttcaaattgtagctaatccgccaaaaatatttaaaaaatatattttctcgacccaaaaattgtcaaaataaataactcgaaaatattaattttgaatattttggaattttgtaaaagtaaattatgaattgaatgaaataattatataagtaataatattaataatttcactttttccgctttgaggaggaagagcaattttcgaatttgaccagtcgactcccgtctcaccacgaaagcattcacatgaaacattggcagacccaacgaccgtttgcattacgtttgcccttaggatacattcatcgctccaaaccgattgagcacagccccaataaaggaacacatttcccggctgatcccctgtaaaatggaaaaaatttccaaaataaaaactgtattttaaatgtatctacaacgaaatgttgaaaaaagattattcgggctcggtattttgggtctcgggttttcagtctctgtctcgagtctcgggaaatttttggtctcgaacagttgggtacctcagaaatgtgcttatgatcccgagagcgagataaaaatgaaaaaaataattaattaaccaattattgccaaaagtgattgatttatagaatatcacagcaaaggaaaaatgcaataaatttaattttaataataattaaattttgtcattgtacatgctgagcaggtggccgcaaaacacagctccttatcaggtaagcattttccatttttcacaatagtgtattcctggtttggcaaactttctgctcttccttgtttgcagaacaatcctttttattgaaaacacatcaaaatttaattaattatagcaattaaaaattaccgaaacaaaactgcaaaagcccgaataaaaagaagaaaaaaacgaacactgtatttgccttcatttggttttcaatttcaattgaatgccaagattggcagtctaaaaaggttttgtaaagcaaccagaaaattgaaaagtttttttcattaaaagggatttaacggacgattcatttttaaattctcattaatcaccctttactaaaatttggattggtgtggtgtgattagaaccaaaaatttgataaaaattattatttttctttgttattttagttctaattcataaaagcgaccaaatgagattactaatgaatgctagtcaacatcagtgaaatatttttctggacataaaatgatcaatggtgactgtttgttcactttgtgtgttcattaacataaattcatctgatttttccaatgggtgaaataaaaaggcaaaaaaaaaaatatatatatattatatatatttatttttaatacaagtataattgaattgaattgaatgaataaatgaatgaataagtggcaaaaaaaaaattttcgagtcttgaattccggagaacaaaaacaaatctctctttactcattaaactctttttttactcattgctagggttggttttttgcgcatatgctacttagactaaaaaaaaaaatttggtttggttaagatttttggtccatatattgaaaaaaatgaaaaaaaaagaagcgaaaaaacacccctaaggatcggtctggaaatttttaaaaaatacactccccaaaaaaacacaaaaatttgcgtgttttcgttatttggctttatcgatttttttttttgaaatttttggcaaatttggagacatgttgttcccaaaatgctcatagcttcaaaatcgtattcggtttaaaattcttanaattcataacttacttcattgtggatcaattataaatgcgaaagctataaaagagaaaatatacagaattatactttttantaggttntctatatttaaaaagaaantagaaaattcaatttttttatgtttataacngnncttagaaaaaaa

SEQ ID NO: 8195 - DNA, 3048 bp, Heterodera glycines
ttcgatatgtattttgtcaaatatgccaagattggtcttccatgtgagtatttaaatttaaaaaaaacaatttgtcaccatgaaaataattaaagaagaaaacgtcaaacggtatcgaactcacgacagaaagtaatgtcaatgtgatgcactaacctctacaccacattacaaatgtcaaaaattgagcaaattttctttatttaataaaaatttggcaaatggttaaaaaattcaaatttcgtctaacttttttgcattttctcccacgaaaatgccattcttaggggtgtatatttaaccccgaccccgatcggggttaagggtcggggttcggggttgtcggggtatgaagcgtcgggggtcggggttttttccccgaaaatggccaaaaatgtcggggttcgggggcggggtcggggacgcaaccctaaccataaggacagctccaattttcaataaagattcagtcctcccgtttgacgttggaccaactgcttgaaaagaatgtcggaatgccaacttctgccgcagtttcgtcccttcaaaacaatgcctcctcttcctccgctccgtccccccgcgtgtccaatggcactaccggtgagtgtttctttatgaattgttcgaccctttgcaaatcctaaaacttttaaattacccgacaattcgtttttatgtgtttttcgttcgcttcgcaacaatagccaaccgcagcactgttcacaatcagtggcacaaaatgtgaagaattggaaaggaatgccacggcatggccagcaaatgaacgggcaacaaaacgaagcgcacttagtggccacggaacaattggccgacctcgcaaagaaaagtgcgtattttcagggggagtgactcttttaagggcattgtcttagatttataacaattaggcatttcatagcggaggcttctgtttatctgatgaatccatgccataaatatgcaaggagtgtttctattctcttccccatagtgtaaaagaagtctaattgtaagcttgttaactttttaaaaatttcacgcggtgccttttccaactgccggtccattttcaacaattttgcaaattatctcgaaaaaaaatatcaaacgaaggcgtaatgttttacgaaatacggataccctttctttgccacccaaacatttactcttcttttcagcgctcatcctttttcgggatgccaacgaatcgttcagcgaccaaaatgccgtctccgattggctccgccgttccttcgatttgcctgctaattcgatttgcgaactctcctccccctcattggtcactaactcccaagtctttttcattgttttcgacgaaattgggacagccgaaaggattttggaaatgagcaaatccgaggagagggctcagaaaagtgagacaaagcgcaacgcaaaaaggggcatggaaaaaacgcaaaaaaaaaataaaataaaaaataaccgaaaatttctaaatgaattttcaacaattccattctttcagttttttaattttaaaatgttacttaaaagaatacttaaaaaattatttttgaactttaaattcggttaattaaaaataaaatccttacaattaggtgtcccaacctctaatgtgttttctcttttcagcttttctgacttcagccaccgaatttttgcagtcgaattcccctggcaaatttacggacgccgccttttccgatgaaaatgcctggcgaaatttggcagcggcggtgggtgaaaacgaataaaaaacgaatgcatttgagaacttttctcaaattctgaccatttttatgagatggacaaagagccccggggtgcccaaagcaaaatctaatggaaaagagaattgaaacatcgaaaaatgaaccgacccaccccaagccgaaacaatcattcgccaaccgaaatttccccgggacatttcgcctggtgaatttcgatgcatctgaatttcgagttaatcctccgaatgccttttttgttggtttcccttccctctgatgccccgccctccctcagatggtccccgcctacaataatttgatggccgctgcttcctctcaacttcatcaccaaatacccaattccaatttaacagtcgccgcagtgagaaacaaagcgaaaacggaagggaattccgaagcggaccaaacggcaattcagacgataatgagccaaattgacaagataatccgacagggcaacactctttaattgtttattttcgttttgcttttcattttcggcgtataaaatttcacgaaaaataatatttgaattcaacaaaagtgaacgttatttgttgaaaatgtccaattttgacgttttattaaatttgaaaaaatcagggagattgtggtccggcggtgccaatgcgaccgcctgagagaattttcgcaaattgggcggaattggttaagaaagttgtcctaaatgtttcataaattacccgattctcacaaaaggtgtatctatctcacccgcaattcccccccccctcccttttgtcccctttccccccataaaatcaaattaaacaaagttcgagtgattgtcgccaattgatcgattcaatggcgaatatgcgatgttttcgttcatccgttgaccagttttcttctcgtctttaaactttttcatttcatcataggttttttgtcattagtaatcattcgttaattgcatattcaaataataataataactaacaaaacgccgcaaattcaaaaataaaaattcggcgatgaaaatgcaatatcagacttcgtgctttggcaattccagcgtttggcctgtaaacagcaaagaggtaaactcaaaatttatcggatctgttaaagcttcagatcctattttaaatcctttaattaagcatatttaaaccgccaattttttcaaaatttttctcacaccataaaaatgaatctttcagcacccgttttcccatttggcgagacctcccccgtcctctctcccccgccctctctcctctctcccccgctctctctcccctctttctctctctctttcaga

SEQ ID NO: 8196 - DNA, 1024 bp, Heterodera glycines
gattcctcaaattgtatggaattgcaaagccctttcaatacaaagaaatggtcacgatggaaaggtaatttgtaggaaatggcaattagcaactttaattaccaattagttgccaagttataccaattaattgccataaatgaccaattgccgtctcctcccctccacaggtgcgtcatgttcatcaaattgaggttgccccccctctccctctctctttgccattcccccctctcctctccctcctccaagttgggtgtgcttcgcactaattatgctggccacgatgggtttcactttcctcgtcaaaattgagtttctggccaattggacgggctgtaaggttgagaattgcctttcctggatgtatcgagtgcgcaacattttcacaattcttctctatttctcaactctcttttgctttgttgttacgggtgagaagggaactacgcattttgaagtgcttttggaataaatgttcacatttggcacagttgtgctgataaagaaagccaagcaaaggtcgggcacacttcgggcggggacactcaattcggagcagcagcagcggtgcttcagaagacgctaccaatttcccctggtcaaagtgagcagaacgaaaatggaaaaacagtccgaagggggggggggagaagggcacgaaatgccgaaaacaaaacgaaaagttcagtgcatgtctaagccaaaattcagggaccgaccgaccattgctcccaaaatccaaacacaatccaaacaaaaattcttttacaatcaaaagtccaaacagcgaagaaaattcacaaacattttaaaaattgaccaaaacgagcgaatatcaaatctgccaagcgaagtgaccagaggaagaaaagtcggcagcggaaaacaatcgataatgaaaaaggcgggagattcaaaattgagaacgaaaggacaaaaataaatgagagagaatacaattaaataattaattaattaagtcaaaaattggaaataaaacaatttaacaatcttatcacat

SEQ ID NO: 8197 - DNA, 1937 bp, Heterodera glycines
attgagtcccaagattaagtaacgaagaattttttgagattgagtcccgtgattggaatgccggagaagaattgagtcccagtgattgggatgcatatgaattaggtcacagtgattggaatgtcgtataattgagtacaggtgattggactgccggagaattgagtcccagattaaatacagggaatgagtcccagttattagaatgctggagaattgagtccctgtgatttgtgccgtaaaattgcagaaattgagtcccaagattaagtgttgaagaatttttgagattgagtcccaagattaagtaacgaagaattttttgagattgagtcccgtgattggaatgccggagaagaattgagtcccagtgattgggatgcatatgaattaggtcacagtgattggaatgtcgtataattgagtacaggtgattggactgccggagaattgagtcccagattaaatacagggaatgagtcccagttattagaatgctggagaattgagtccttgtgatttgtgccgtaaaattgcagaaattgagtcccaagattaagtgttgaagaatttttgagattgagtcccgtgattggaatgccggaaaagaatttagttccagtgactgggataccgaagaatccgtgagatgagtcccacgatggaagggataattgagtcccaataattgggattccgaagaagtggggagaatgagtcccagttattagaatgccgaagaattgagtccctgtgattttgtgccgtaaattgccgaaattgagtcccaagattaagtgcgaaggtttttagaatgagtcccagtcattgggatgccggaaaagaattgagtcccaatgataactaaattccaataagtaattttaggaaataactatagtaatgatagagcacaaattcaatatcgttcaaaaaattcagagtcgtctctaaaggtttaaaatcgatgagaaaactacgtttaggttaggcgcatgcttgcaatttttaataagcaagtccttttctaatttcaacagggactgaatagtccgataaaaatttaaaaatgcatttttttgggacaatttctttcaattctgaatgtctaaaacgattttgagttttggaccaattattaatgtttcattaggtttttctttgttacctattgtgccacaaataggctgctttatctatttttctttttaaatttagacaatatggtttctgcaaaagttgtaaatattcactgtaacaaatcggtaatgctttcggagataaattctatcgggtttgacatggattacaccctggcgggtgaaacatttaaaaccagttttttccgaggaaaatcaaaaattaattttccacttattcaggctatttatcaccaaacacggaagaactcatcttcaaattatgcattgactatctgctgaaacataaagggttttggattgaagcaatatttttgtgtaatttttttttaggtatccgcaaaaaattgattctttggtgtacaatagcaagtttgctattcgcggcctttggtacgacaaaaaaagagcgaatggtgttgaaggtgcaaaacagtggcaacattctcagagcaacgcatggcggaaaattcttgacttggttttttgtttatttgagaatgaatttgtgcaaccaaaacttcttttaggaaaaaaattgctcaattgtatcccagaaacattgtcaaattgaaccgagaagtgaaagtgatgaacactttctacgacttgcccgaaaccgatctgttgtcccaacttgttcatctcttcgacaaagactttggagtgtaagtaattgaaacattgtgccgacaaattttactattatttatataaaaataaaaaatcactttaaattggatgaatttttggacttaggttttcatttctaagtaa

SEQ ID NO: 8198 - DNA, 4155 bp, Heterodera glycines
  unsure (1)..(4155): unsure at all n locations
taatctgttcttttttaggacgttcaagctgccatgaaacatgtgcactgtggtgatggagcaatgaaggctcaaattttgctcaatccgaaccaatacgtggaaaaggagactcgaattggcactttgttggaacgaattcgacgttcagggaaaaagtgttttttgctgaccaacagtgcgtacgcgtatacgaaggttcgttgagggataggatcaatttctgcattttctgtcgggtacgccccattcacctcccaatattttaatccacgagaaaaccaaaaaataaaaaaaagacaaaaattttctaataataaatgaaaatttttggccaaattcgtattacgacaattttctgtacataaactttcggaattggaaaaggaaactgggcgacagcacggtttttttaattaaaacttcttttatagtgtctgaatgtaataaatttgaaacgatttaactaactctgatttgttctttactagcttgcaaaattaaacaattggttctaaacagttaagcgaataaaacacttaaaacctgatttttttgtattacaaatctcatagtgctagcgaatgatgataaattgtttcatttggacaaattgaaaggagttttacacaaaaaaccgggttgtcgctcagttggccatcgctcagttgttcacccacagtgtggaaccgatcctgttcaaaatattatgttgacttatccaacccaatttaagggaattatgcgatttttactgggcaatgactggtcatcgttcttcgaccttgtgattgttgacgcggaaaaacctttgtggtttactggtgatgctgacttcaggacggtagtacgaaaacaatggttccatggtttataaccatctcattttttaggttaacacgcaaacgggcgaaactgaaacggtcccggacaatatttattcaggaggttcgttttgcaatgaatggtctccacttcctgggctgaaaattgccaaaaatagaaattgggtgaaattatttgattactatcaacgcacacaagttaagcgacaaaatcgcgtttcatttgaactgaaattttgaattctgttcaatgtctccaaaatgcacaagaaaccgatttttataacctttaaaatttaaaagaatttctaaaaggtggagtaccatcggtatatttacaaaatttccaacaattctttgtataatcaatgaattgcaaccataataggggcttggaaaattttaaaaattaacttcttttccatattccaacaggttcctgcggaggattacgcggtttgctttttgatgctcagtcggaaaatacgaagaatgttctctacattggggaccacatttacggcgatattttgcgttcgaaggtctggggaggggaagaggagggagtggtgtactccatttcttccacgccgttttccatttcctaccccccagtcagtcgtttaccccgaaaaaattcttaatttttctaaaaaattgtaatttttacaagaaaaattcaaaaaaaggcattgaacattatttaatgataatttttattgaaaaaattgtaattcagattataccttgtaaaatagtgaaatttttcaaaaaatttttttaactatttttttaaaatttttgttctttagaaaacaaaagggtggcatacatttttggtggttccggagctcaaccacgaaggggctgtgtggactcgaaacaaaaaactgctcttggaaaagaaacgattggagaacgccttggagaatttgtacaggtttggaattgggagcatttccccgccactctctgaaattaataaattatgcaatggcatagtttttctttttgatttttactttctagaattgggcaggcttgaagttcaaaaaaataaataaaaataaacaatttttgtagagggttcagttcctcctgggtcattacttttcgaattttttaacattgtaacgaaattttcaaaaatttgaatttttaataagaaaatttcgcggataaaaatttgacaatttttcagcgtttttttaaattttatgaaagataaagggaggggggggcgttaggcaggcacggtccaagaatttcggcttatgcggggtaccccccccccccctcggacgacgatctttttttgatttatcaattactattttttcaaaaacaaatttgggtatggaggggtcttgagagtggttgtgacaggacctgctcagatcccggagtggaggggaaactaggacgacttatcaattttttttgttcatgatgtatatttgcatctctgtcagaaacgccgaagaagatgtggtgccgcccggtgttcaggctctgtgtgatcaaatacaggcaagtgctgttggtgttttattgtaaaaatgtttcaccagtggcaccctttcgataccgcctgaatttaatatataaccttttaaaaagttgattttcctttttgattgaattttaacatttttttgcaggatgtttcgaaagcaatggaccaggcctatggcaattacggctcacttttccgaaccggcacgcgtaaaacctttttttcataccaggtgtgtgttattgtggcatttacattttttgttgctctttgtgcaaataatatttattttgcgaaaatttctcattttcgcagggcgacttaaaagaaatttgaaaatacaatatattttaaattccaattcatttgcagcttgaaaattatgccgacttgtatggaagttcgtgctttcatcttctcgactaccacccctcatatcatttccgcgccaaattcaaattgatgccgcacgagtcgccggtggaccaaagcgaagcggacaatcagcagggccaagtggaggatcagcatggccaagcggcggacggtcagtcaacactctcgaaaaatcatataaaaaaaattgtctcaaccgcaaagcttttgtactttattcccagcctcggaagaccctacctagcccctcctttcgtcaaaattttttttgacccagcgaaatttttttttgaaattttgcggccgaattatgcttgctaaccagggaagggcgcgaactgtaagtcgagaaatgcagttgtgttatataccattggatagggaatggtcgacttatattgtagatttcttaatttatacctccatatgaagaaatcaaaagttatgtggccacagaaatgaaacattttagtgcctgaggcatttccggttttattgattttttattaattccccatccttgtacttgatttaacctaggacctccaaaattcaaatttgaccagcttagccacgaattttgctcattttcttcacttgtgcaccagtggtggggggatgatcctccgctttctccttggttatttttgcggaaaacaatattagggttttcatgtgcgctggtctcgaaatttcgttcaatttatagctccgccgaaactccctaaaatttgtattttttcacaaaataatggagtcccattctacacgagttcctgaatttttttgaaatttcttaaaccattttttttctttcaggtcctccatttgaagtgccgaatgttagtcccaatcagagtagtagtgaggacgaggaggagcagaatacggataattgatcttttaaaatcaatactctttccatgttaattgatctccaaaaatttattatttcattacaaatttattggattttgggattgaagcattagaaaataaaggccattcattaaatacattcacttaaattggaaattcaccatacgacccccataagttttgttgaagattttcaaaaactattgttaaatgagaactcttttttaatcttttaaacgaacctcaaaaaccaatatttatttttaataaaagaaaaattatctcgacgaatatggtaccaatcgatagctctcgatgagacagatcgctctaggggtgggggaagttgatccgacaagtataaaccggtttttgaaccgattcaaaacacaaaaagtgaagaaaattcggcagttttaattaattaatttattttttaatggacatttcagtaccaacgaaaaaggataaactaaattaggtaaattttcgcaaanagggacatacgaagacggagca

SEQ ID NO: 8199 - DNA, 1406 bp, Heterodera glycines
tgagaatgtcgtaaattttcttgttcatcttaatgtgctttaacttttttattttagggttccaagggtcgcttcgacgtcattccgccgcacggaccttcggcccaatatcggaagatcacgaaagctggcccaatctcatcaacggagaatcgctcattgtcagtgctaaactctgaaaaaagtttcgaaggcctttccccatcagttgacaaaaaatctaatacataattcgttaatttcacttagtttttatcattaattatgtatatacagtcctctaatactactcaaaaatttattatttattaggttcgttttcttcttaaaagtttttggctcttatgcagtttaatcctcataaaaattggtcgaaatgggtgccgaaaacgtgatcagcgactcagaaaaccaccataacttcattttcactttttaaaacaaaaaaaaattctaaaaaatttatgggtgttaaactgcataagagtcgagttttttttattattcactaaaattacatcgagatgctttgaaaccatcgcataaaaatcgagaaatcctttggttcattcgtcttcctccccaaacgaaagaagtcgtctgttctgctccttctgctgctgtcccggtttctcttctcttttggctcgtttctccttctcctcctcctctttgcttccttctttcccacttccattttccgtcttccttttctcgggcttccgaaacataatttttccttccattattttgcgctctgaaaatattgtaattttcgaaatttttcgaatccaacgataaatcctcaattagcacccacccctctaattaaacccctcccccttctctcactgtcttcctcctcgtttcccttctcaatctctttctgcagttcttccgccgacagatccgttctcgggtccaacaccaccacttggggtctttcctcttctcgcatctttcggatgtcatccgtcggattgtccgccccctcctcctcctcctcgtcatcacttttggcaaacttcaatcacgttttaattttaaaatacatttttagaagaccttatcctcgacggtccattctttgtatccgagtttgtttttgaattgtgccaaaaacggagggtcactgccctgctggtacgaaatggccttcctttctttataagacgaagtctttttgttttttcccttgccattcatttcgcactgaaaaagcggacgaaatgaaagagaaaattggaaaaggaagcgaaaaaaaagagaaacaaacaaaaagtgaattaattaatttagtaatttttggcataatgtttggagttgacccaattttagttttttaaaattgaaaactccgtttccttaaattatgtacaacctccttaaacaaagaccccctttga

SEQ ID NO: 8200 - DNA, 991 bp, Heterodera glycines
ccttttcagcggtctttgagtcataaaattctctgagcatttcgtacaatgcgtccatcaaagcaatctgataaaaaatcactgagcttaaaaaccataattttttgcatcgattaacttttcaactcaccaaacgattgtcgcccaaaagtcgcaccattccccgcttggacaatttggacaacactttccgctgcactcgcatcgccagagaggacgaagcattggccgttgttttctgtccgctcgccgtggcgccgcacttcgaattctgagggaatgcgaacgaagaagcttcagaatcggacgaagccatttgatttaattaacctaaaagcataaaaaaagaaaataaatgcaaaggaaagaaaaaggagggaattgcgaagaaaggctgggccaaaatgagttgcgaaatgcaaatgaactggtaaaatgggatggtcattggtcattttggtcgtccatccgtccgtccgttaccattcattcattcgttcgcatttcgttcggttcatttccatccttccccccccccccccctccatcgatcggacgaaggggggagggattctcatcatacataaaacccttctttccatcagcagcagcagcaacagatgattctaattttgatcgacacgacaacttttgcattttcattttgcactgcgccaattgaccaattaatggagaaggaatgtgacggagagagagagagagagaaaagggcaaagaaaaaggggaaaagtggacggaggcgccaaatgtgtgaccactgttcacattcactcactcatctttgtcattgtccttttttagcattgagaacaaaagtggcggtgacagttgccgctgttggcggaggaaaagggaaggaaagcgaatgaatgaaaaattgaattcaaattaaaaaacaattaatattatttggcactgtgtgcagatttgaattcatttaaaaatgtaatgcgaatttgcttcgcccctt

SEQ ID NO: 8201 - DNA, 2857 bp, Heterodera glycines
gaatttgcttcgccccttttgaacggacaaaatctttcattttaaaggatcccccccccccccccctccccgagatgctgggtaatgaacgccttcgtcgggaatggaatttcggtcgggagtaaacaaaaattttgagtaattaaaatggattaatttttggttttttatctatgcaaatattatgaattaaatcgcatctttgctcttttattctccgtaaattgtcatttttccatttttctcggccattaattttcgaattcgacttcgctgtagacaaattgttataatgattgaagtcacctttcaaaaaaaaaaaattcttaaaataattaaaatacattaatatcgtttccttaccgtaacggtggctccgaaacttacagcgacaacggcgagcatttcgaagctgccgatgcgttgagagtccaagtgggcattgagcggactgtactcggcccgtttgatggacaacacgcgaacaaaagggtcgtcataaggggggggggggtaattagtgaattagaatttctttttctgcttttggccccctctttttcagtccaatgtccgattcccttttgtcctcgtctttcgcttggtcctgttattcctcgttctccttttacctgttgtccctcctcttccgtgctccatccttgccgtgctttctccgtttccccgactttcgcccatttgcggcccttccgcgtcttcaccttcccttggctttggcacaaccgtcaaatccgcgctcaaatccgtctccattcggcccatcactgctccaaatgcgtcgtcttcttcgatttgcgcgtcccttccggcgcgacttcgatttgtctcagaaagcacttcgaagagcagcaactgatcggcgattcgctcgtcactcgcccccgtcccattggcatttgccagcagaggactgtccttgtagggaggttcacctctcctcaattagcaaaagcaaaataaaattgaaaaattgaaagagggacgcacccaaaaagggaaggatggaatgggccaccgggggacggacgagcggacaaaggcggacgacggcccaacggcgagggagggcccagaggcaattcattactttcggaagatttgcggaaattgcggttgagtccgggcggacgcgggagagggaggcgagaaaagtgttgcgagtgctctttgggcctaaaactggaagaaactcagttccaaaataggacagaaagtccttcccatgccaatgcttttggcatttatccatcggacgacctttgggctggggaagtgttgtgtctgtcgcactgaggcggagagattccttcgcaaccgccgtcttcgcggaagcacaactgaacggtgcaggtgaagaacagttggacacgatcggcgtaacggaactgaagggacggagcggaaatggacgagggacggaatgaaaagggacggaagagtaccacgtgggcatgcgaatgggcggcaaatgccttttcgtcgtactgaatgtcggccagcaaagattggtcggtgacgcagctgaacaaggacaacgggacgagaacatggacggaccgacggagaccctcccaagagagaatcggccgagtcagtcccgaattcttgagacaagccaaaccacggggtcccaacgattttcaactccccctccccagcagaagtgcgctttcctcccactgctgtcacagaccctttgtcatccaccaaatcgaagcgattgccacgtccgtcgtccacaaagcacgagtgaatgagcactccgtacaaccatccggccaccgggtcgcactgccaaacatgcgtcaccggctcgccaattgacgcgtacttcagaaagggtccgtcgatgccgtgtcgtaaatggtaattgcactggggaagggcgaactgacgctccaccaccgaagttgaaagggggctaaaggagggacaaacggaatagaaacaggggaaaagcaacgcaattggcaaatgctttccctcacctaacgtccattgaagcatcaattgcacggactgcttctgtgaaaaagcagcgaatgttgaaggcacggtcaatgccagtcaaaaagacgggatggaaggagatgaccaaagtgaaggagtaggagacgccgcgggggttaagctgaatgatgggggagaacggagccaaattggccgtggcaaatggcaaaaatgccatccacgcaccgatcgctgcctgcgcatgttgcactgtccaaatcggagactgaattcagcgcctccgcctccgcccaaatcgccggccgcgcctccctccgccccgttggcgtagctgcgcacacattccggatgctccgactcgtcctccacgtaaagccgacctcgaaatggcttttccgtacgggtccaaaccttaaacagaaagacaatccttggccaaattgcacctgtgcgatcaccgacactgatcgattccacgccgcagtccacccgaggctcggccaaaacgctatttgccaatggaggcggtggaaagtcaccacaaatggccaacccgaaaaaggcgaacaaaaaaaggacgaaggacggagagggaacgaacagaaggaaaaggcacattggcaagcaaatggtgacggaggacgacaacagccatttatatcggagaagcgaaggcacgcagagggaggaataagccaaaagagcggacggaggaggaaaagccaagggaagggggggggggaattgccggagaaaagcagctgagggaagggactgtaaaatactcccccagtgtggatcagcagtcagaggagggctaacaccattgtccacccatcacaaccccaacggcaatgccattaac

SEQ ID NO: 8202 - DNA, 1859 bp, Heterodera glycines
  unsure (1)..(1859): unsure at all n locations
ccccccccccccccccccccccctttttacggggaaaaaaatcccatccggccgggttttccccccccccccccccccccgatcggctgttgatcactttatgtttgtttgctgctgctttccctttcctaactggaaatgaactactgactgcttcagcccccccccaaatgaaattactttttattggcaaataattgagggatttgtggttgagtgtccaccaaccaaaatagttgcccaaacgatgcgaaagatattaaagtctttttattcaaacaaaataattaataaaaacgaaatttacaaaaattagtggcatttaatcaaaaatcatagagcaattattgttcttattttaactttcacacattggccacctcttcagaagagtcacttttgctgctcaaaaaagtgttggttggcttgcgctgaaagtgcagcaaatgggggaatttcgtgcttaagagttggtgcaaaatgccagtgccattttcgctgagttcgtagactttttcgcataaaggcagcacctgcagcggcaagaataagacaaaacgaatggtgaagaaataattagaaaaggccaaagtgaggaaagagcaaagaatggcacaaaagaaaagagtgcctgggaaacgatgaatcgacttgtgcagtggtgcaccaccgatttgtgcatgccggcagtgagatgtgccaattgttccgtccaaattgaatgcatcagcgaatcggacaattggtggaggtggggagaagtgttcagaagggcgaggtcacggcctgtccaaagtgagcattttaaagtgccaagaagaagcgaaacgcactgagttggagggcggtgcgggcaaaaagacagccactttgggccaaattcaacgcgcatcggtaggcaccgggagagaggggggaagcagacgaggagggggaagagggacgacaaatggcctaaaggtggaaaatggctcaaagggaggaccaatgagcaaataagggacaaatagacatggtgctaccaataagcagaggtgattaattaatagcaaaagaacaattggaacgcacccactcaatttgcagacctatgtcggacatttcttcgaggaatcttatcagattttgatcagttccgagtgaaaagggcgtccaacgttcttcctgcattatttgacaacaaaatgtgaattaatttcgatgtctctccgaccgaatttctgagtcgaattgagtcgagaatattgccgaaattagcttccaaggcatttttgagtgagggcgccgccaatctattgacttcgaagctcaagtccaggccgatcgggacgagttgggcacatttgctcatcaaaatacgccaagtgtgcctaatgaagtgacaaatgatggcatttgtcgcaaagggtcgcgggggtaatacgtgagaacggccattgtgggagcaacttcgatgacatggcgacggatgagcgagaggaggacactcaactcacgcgaactccaagtcagcacttggcaaagttggtcgcggtgcggagaaagctcctggcaaacctaaataagaggagaagcggcaaaataaaaagcgacggtggcggagaatgcctccaaaatgtcgttgacaaaaaggccggacacttggcgaacgtacgacaacggctcctcactgatggtcaactctcgagcagccgccctcagcgcgacacttcggcaccgcaaataaagttcaaccgcgtaaacggtgcggccaagcgcaatgagttgttggatgggttgggagagagtacggggggagctcaaaagatgagccgggccctntttgatgtcctcagtaagcccagttcagactcnntaga

SEQ ID NO: 8203 - DNA, 3452 bp, Heterodera glycines
  unsure (1)..(3452): unsure at all n locations
atcactttttgccattttcaccattattatttntctgtaactaaaaattcacgccctgatcttagccaaaagcaaatagtgtaaattttcttcctcctcatcacactgccatttttcttgccatttatcagtcaatgattatttttatgccctctcccctctctcgagtctttcgtttaccattaattagttaatcactattacatcactcacaaatcagtgatgacgtaaaatcatttttatttattatatttttgtctacaacttgatattccatggcttcttttagtgttgatcaattagtgaatgagtactcatcaatcctatctttcatgtttaatagtggcgacatttttatgggtcatgttttaattttttataaatttgacaatcttctaatatgtaataaagtgcttctctaatgagtcatcattatgttcaaaacattcgattaatttgtaaattctctgatttactttaatgatgaccattttacaatttgagtcttttttgtttttgtttttttgctcttttcgaccgaccattttccattttcgcttatgaacaatttataataaaattttagccatttaaatatttttcttttaatttattttcttaattggttttagcattcgccgtccgctgaattcggcggcttagtggcacacgaaaatggcaaaaacagcagaattctatgatgataatgataacagcaaatctagcaaaggcaatgcccaattgaagagtgatcatcccacgcaacaagcaaatgggacaatggcagcaacaaagggcacggagtcaaaaggtgccgatgagaaaggtgggcaaatacggcactgatcaaatactggcacgggaaaataagtctcagcttgtcatattttatatgtttatagtacctaactcaaaaaggtcatgtggtgaattagctacgaagatttaagtctgatcagctctcttttattgagctatggatttattcaaaagcatcccgcccctctccttcctgaaacccgaaaaaaatttttttgaaattttcaaattttttatattctttaaaattcaattttcccccacggagccagtcggcactgccccggcttttcttttcgtctaaaaatatcataaaaaatttcgtatcgtcgacaagcaaaaaaggtcatcaacagggcgcggcgaaagtggctctcttgccgaaacgttgagagtctggctcggccatctgatcaatttaatcatttttattattttttccaaatctgttaatttatgttttgatatatttaagcagtgaattattttttatttttttttgttccaaattcctattttatttctccatcccatcgccctctttagctccgcttcatcccaactcatccgacgactctaatgcctccccttccgttggtgggtcgtccatttccgactttgtcgcgcagcttccgcccgcccctccgcttctcgtgcacattgcggtcccttttttgctaattgccgctacgtttgtcggtctgttcaactgcgctgtcgcgttcggcctgtactttgttttccgagctgttgcttcggactttggacgaagtgcattgtatacattacccagggatttcaagtgggtgctattgctgggcaaagagtcgagaatgaagcaaattagttcccggggataattattaatcactttcaagtagtctttgacctttccaagaaaattagatcaacacaaaatacgggtccagggaggcgagttggtcaattctttatggcaaaatttgatagctgtaaattgaatgattgaatcatttcttgtgcttgacatgatcgaggtttactgatcggaaagctttaaagtggcctttcgctcagcaaatattatcaatttgtacattttttaaatttaatgaaactttttcgacccgtctgccaataggcgataattttgcaatttttaaacgaaattataagaacattgatatattgtcaatttaatttttttcattccctgcttacgttttgcatttgcttttgatcatccatcctcagagtgttttcacttttcattttcaaattaattttttctgttattggcaacccttgctgtgtcaaactgaccactttttctctccaacaggggcacctttctgttcttccaactcaaatggctgttgtggcgcgcattccgcagcggtgcaccaatccatgcccactttttgcgcacagtgcgccgtcacccgaacaaacagtgcgtggtcgaggtggagagcggtcgatcgctgacatttgcccaattcaacgcgcatgccaacgcgtacgcgcatctcttcagcaaagtgagaagaacgcgtggggtgggaaataatggcacgaaaaataataaggaaatctgataagctaatgataagaaaaagcatgagagagaaatagcattacaaattaatttgcttaattggcacaaaactttttaattccattattcttaaactatacaaaacatgtaaaaaaatataagaatttctagaagttccgcatagcttttttattttttgattgcccttataaaatggaatttcacttataaaagccgttggtatttgttattttaacggatcgcgattctttgtaaaaaaacttctggaaaatagcgttcccaaaaaataactgcgaaaaaatgggcagtgagaaaattttctgggcaacttttctttacaaaacttttcgtttggaataactttatttaatttatttttctttttcagtctctcaattttggtgagggtgatgtgttggcattgtacatggagaatggcatcaacttcttcgctgcatggcttggactgagcaaattgggcatcgtcacggcatggatcaacaacaatttgaagggcgacccgttaggccattcaatccgggtggagaatttttttttcaattttattttatttttttggataattttaattacaggtagctgattgcaaggctgttttgacaacgcccattttgcttccaggcaaattttcatttaattttaaattaattatttgtattttttgaacttcctttttattgtcaccaacaacagatcttactatacatagtccaacactcttttttatttctattaataatcagatcattcctaatctttctacatctatacactctattagtcatattttaacatctactaaacttatttttaattcgattctataaatatgaattgctataaaatatccccggattcaggatcagtcactcagcaaaccccataaaatagtgtttttatgactttaaataacaaaaaaatttcgaaaaaagggggtggacaaactgaactattacctaatcgcctcctcccaattcgtttaatgtacatatgtataaaggtatgatatgatatgtagtacacaactcattgttcgcacttttacaattcatag

SEQ ID NO: 8204 - DNA, 2323 bp, Heterodera glycines
ttaccatcttcttttactgctgtttttcacatggtcgtcgttatttggccaggtcaaatgaccatggtaaatgacctggtcaaataaccaccttctttgactacggcccctgattgtgagctgccgattcggcaccgtctgcccttaacttttctttaaatttcgccctaaatttaagccatatttttttggcttttagcatagaaaatccagatctggttaatttgtcaggtgaaaaaatagtcttgaattctcctcgttcattctgtaaatcctcagccttacttccccttttatcaggcattctttgctacatttacaccagcggaacaaccgggtaaattttttccttctttttttttgtaaaatctgtaaattttgatttctttttaagtgcaccaaaggcggcaattatacggcactatcgctattatttgatgtccattggctgtggcaatgcctttggcattgttccgtcggatagagtaagtaccctttgagttttaattaaatttaattattttgcttacagctttatttgacactgccaatgtaccatacggcgggcggcattcttggcacatcacaagttgtcttcaaaggttagctaatgctaattgattttgattatatggaatttatttattcatttaattatgctatggatgcataagtataaataaatctttattatcctttaaggttgtacggcatgtattcgtacaaaattttctgcaagcaatttctggaagggtaatttgttctactctttttgttaaacgaaaatataaaataaaaaccgaattgttttaaaattaaacgataaaataaaatgaaaaatcgaattctttttataataaatttatataataattattatttatattttttctcttaaataaatttctttactccccccccccctcagattgtattcgctttgaatgcacagtgagccaatacattggcgaaatttgtcgatatttgttggctcaaccgccgtctccaatcgatcggaaacatcccatccgggtgagttataaaatttattaataaaaatgaaatttcattaaaaaaataatgattgtaacgaaaaattattatttttttttgttttgacacaaaatctcataagaatttcattcgtcaattaataaaacctttttgtcattttggcttctcaccggcaatggccttcgtccacaaatttggcgtgcttttgtgcaacgttttggcattgcaaaaattggcgaattttatggtatttataaacaatctatttgtttcatttgtggttcggttggttgtctctttgtttcttttaaaatgatttttgcaagttcaattccttttgatgcaacggcaatgaagtaaaaataaccctattttgtgaattgctaatcaatgtgcagtaaatcgattagtctttctgagccgaagcaattttttatttttaatctaaaaaattttcttgcaattttttccaggaattgcttttactttaaataaaaaattatttttgccaaataaatgtttcattaaaaacaaaaatatttcatcagagtaaattaataattttttctaaaggcagcaccgaaggcaattccaaccttttgaatcttgacaatcggccgggctcgtgcggcttcatccccatttacaactcattgcacggcttcttcccgctgctcttgctcaaggtggacccgaagacgggccaactgatgcgcgacaagcgcggcttctgcatcaaatccgtgccgggcgaaaccggcgaattggtgccaatattattattaaacattttcatttatacatacataaatttctgatataatctgcgcttcattaagataaatcccccatgcatccttatgcagttagaaaaaaaaattttctgcgctttttgaaaaatttcatactatgaaatttaaaaatattttttcagtgggaaatgatgcgaggagaaatgattcgggtacgggggggggggggggacggggacggggacgggaacctagtgtaccctcttttttaaaattgtatgattgattttcccaacacaaaaaaaaacaaaattaatatttaattaagttgttgagggagtaaaagttttttttgttttttatataattaactctttaacaattcgcctcaggtcggtgccatccgcaacgacccattgctccgttttgaaggctatgtgaacgagggcgacacgcagaagaaactaattaggaattgtcaatctgctggtgaccaagtgttctccaccggcgatgtgctccactgggaccacctcggatacctttactttaaggct

SEQ ID NO: 8205 - DNA, 2106 bp, Heterodera glycines
atttttggtcaatgcccaaatgaatgaatgatttattctcccaaggtttgttggattttccttggctttgttccgccattttctgctcatttctcaacacattttgggtttttctccgccctctgacccaaccgaagaaccaaaattatatatttaattgcttccttttacatttgaaggtccgccgggggaggaaaaaagagaatttgtccaatgccaatgccaatgcctttcttttttctttttttcctccgttcgttcggccaatgcaatggcccagcgggacactttttggcagttgcgaaaagcgaaacattcgaattgaaactcgcgcgggcttaaaatttaaattctcatttaaatagcgaaaatcggaaaatgtcgtaaaaaaaatgtgagttcaatcatcgccataattcaccataatcatcaccatcctcatcatcgtctcatcctcactttcttcctctttttggccatttccttttggcgttccgttgcgccgatttcctcccaatattttcggcaccgccgatttgtgcctcccccccccctccgccaccggcgccgcccatttaatgcgggccaaacaaaagtgggggaggagggtattttatatttatttgtttgttcccatacaaagttgtggtggaaattggcccttctcaagctcatcgtcgtccgctcgaaagtgcctctcggccctttcggcttcacgatgaccctcgaagggttctttcatcggcgccgccgcgagctcatccctttggcttgccccccccccccctttttcccggagagttccccccccccctcgggggacccttcgccaccccaattcgccattttcaaataccgaaattcaatatttgccgacaaattacctactccccccttttttttttgtttttggcacaacgcaatttggcaaatgactgtgcggcaaattcgtttaaaaatggtgcacaaagtccaaattaattgattattcattagctgcttttcattcggttattattgtcaaattaaattttgtgccataaaaatcaaacactttgcctttccgtggatggatttccgcatttcggcactgtttttgtttcaacagcgttaattaatgccattttggcctttttgcttaattaatgcaattattcctcccttttttgtccctttccttcgcttttgcacttatgtgcgcctttctcttctcttttccattggctgtgctgtgcctttcctcgcaaattgttgaagacaaacagacagaaatttcatcgatggcaaaattgacgaattttgcgaggttaaggcatctgagaaaaaacgacgacaatacaatgccaagaatttcgtccgtttcaccgccgggttcccagctgagcacaggcggttcgccgccggaggagaaaatgatgcggaaacgcttctattatgagctgttaatggaagcggaggaggatgaagaagaagctgcgcaattgagcgcgcatttgaggagaaaacggcgacggacgactcaggcccaccccggcgggcacttgggcatggacagcggcagcttccggtcagtgccaattctgggcaattaaatgtgcgagagagagacgcgttacggtgcgatgatcggaaggattattgggttcaacattggaacatttatcccaacactaattgggaatggcattttcccgaggcgtcaattctttgcttttgaagttcccttcggcgcaaagaaatgccggtgacgtaccgactgcacgacgatttgttgcgatattatcggaagggcacgcggccggtgacccatcccagcaaaatcatttccgtgtccatgtccgtgttcctctaccaaatcatcaagctggacgcggtcaaaaacaccatctcattgtcgggcagtttcgaattggtgggccttttcactttttgtccatcggtgcacaaaaagaagggcgggacaaattttgacggagggggaggggacaacgtctttcatctcactctaatcgtctgatctctcgcttttctacaccctctctctgtccctctctctttttctctcattgactcgcccgggttgattttataaatggtaatttgttt

SEQ ID NO: 8206 - DNA, 2098 bp, Heterodera glycines
cgccggtttcaccgtcagaaagcccacttcgttgtgctcttcccatccgtccaaagtgcgtgccgtcacacttcaaccacaaaaattgatcggatgagttggagcagttcgactcgacctgatgttcagcggtggtcggtcgaaagaaggcacttcggccaattggacgtccaaaatctgagcagagcgagccaatttgatctgcattgcttccggagcaggacaaaactccgccgccgaaactccgccaaaaaaaaaattttaaaaaattttcaatttagaaaaatctcttagaaaaatttttcttagaaaatcgaagaaaaaatgttcaaaaaaatttcaagcgattttttcaaaatttaatataaattactaagttttttcaaaaatttaaaaaaaaccgctggaaatttttttgaaagtatttttttcttcgaattctctaagaaaaaaattttcaagatttctaatgaaaattttttgctctggcggagttatgtctcggcggaatttgggcggtggagtcttagggtgcaccgcattgcttcactgtttgtgccattcttacctcaatgtacggcccgcgcgacagcggtgccgggaatcggtccgagtgccgtccaattgtttgggtctgccaccgtccgacaaaccaggccaacggctccaacattggcgggagcggaaccggaaggccttggcaaatcgtttagccaaatttgaatcaaaatttgacttttttgtcccgctgctctctgacagattccgcaagtgaacggacaattgtccaagaagaaagcggagaagggacgcgtccaaacgcagcggccctcctgaagccatcggtcgcacgaattataaatgtcctttttaaggggttaaggggggggaagagagtgagagggacgacgccggagggtaaagacgaaagaagcgaacctggcaaggccctgaaagggattcagaatcagataatcatgggatcataagcaaaaagtaatccggcaactctcgaaactaattaaaaggatccgccccccgctggtgccattcgctttataatgataattgcccgtcccaatggatcgcccttctcaggtcaagaatgtgccagaattgaatgtaggcgacactcactttggcactctgtgcccatccgtccgcttgcgcattggcaccgcgcaccgtgcggaaacggcacgcatttccccgccgggccgcagccgacgctgcttttgtcggcattgcattggtcaatcccttcagggaatcggaatttaaatggcaaaaaatgaaaaagtgcacgtgttttggagcggaggaactgagtggcggaaacgaatgacaacaaaagggaaaagagaaaggccaaccgaaaagtgccaataaaagggcggcaaaacggggggaaaggcgggggacaccgccgcaacatttttgggtccgtttgagctgacaaataaatgggcaaaattctgtggtggtgtaatttttggggggagaaacgacgaaactgagaagggagggaggaagaaccccttaacttaactccttcttcttcctcttcttcgtttccacttttttttttcactttcgatgggtcggaggagcgaaaagaaaaaaaaggaagaaaaggccctggggcgaagaaacgaaaggaaaatacggagaaaaaaggcgtaaaaggcaattgggcccaattaattaaatgcgtcggagaaaaacggacggagaaaaacaaaagccaaattggaaaaagtaataattaattaattgatcaagcaaaagggcgtgcgttggccttccttcaactgctttggtcaccaaattctgtcattttcagtattggcaagacgaatttctccagtgggacccggacacttacgacggcgccaccgaaattttcttgggtttgtttttgtcgagagtgactctcggcctttgactaattgccttttttgaccttagggccaatttttccttttcagcctcaactgacatttggatccccgaattttcgttgtattattctgtaaattttaacgacgcggtcaaatagcagtcgaacaatgatgtccgagtcaattacaccggtgag

SEQ ID NO: 8207 - DNA, 2912 bp, Heterodera glycines
  unsure (1)..(2912): unsure at all n locations
ctttgaatgtgagttgttgatgtgacaatggcacatcaaatgaatgaaaaaatttaagatatttgaaatggaaaggtttgaccaggaaaagtcaaataaaagcgactgatcagttcacttctctgatcagacatccgatcagtgatcgatcactcataaaattgtaattgctaagactctgaaaacaccctcccacttaccactgatcactgatcgctccttcgccgccctttcccttggccaatttcccgtccttttcagccaacgctgcactcttttgcttggctcctgggcccattcaaatgactctatcaaatactcactgttttccaagaatctgtccttgatagacttctacgacaaccaagaatggcaacttgacctggtccgtccaacgcaatttggcattttgtctcttttaaatttggacattggccaagccattttaattgggccattgcttttttatttatttttcctttggcactctctcccctccttttgcttaaggctcaaagtcacatcacttcggatggctttctgtacgactatttagaccccccgctgttctgggaaatggtcgtcattgacttggtggtgggacggcaaagcttttactatgtgagttaatagcagtgccacgacatggctaattagttaattaattgtttgattaattaattaattggtttgttgttttaccacttaaggtgttcaacttggtcattcccagtgccatcataagtcagttttgtttttttgcttgccagcaccgtaccccaacccccatcaaatatacggtattggccccttttcagcgcttgtcgccgtcatcggtttccacacgccgagcacaagtggaaaaatgaggttgagagggcaaaagccgacctttaacggtcctttttgttaagagacgccaaattccgacttggcataatgacactgatgaggcgagtgaatgccacggcacccaattcaaacgaattgtcaaatgtttagcatgtccatgattttgttggccatcgtcgaagacatgcccaagttcagcatctccagcagtcgcaaggggcgtggctcattttccggcattcccctgatcggtcagtcgttttgattactcgtccatctgattctacaatcttttctctcacttttcctctgtcttcccatcaatctgtatctctcatacgctgttttctctcttcattctcctgtctgatcactcattttcctgttcaccgactgtattttccctaccgatcgttcctgaagatcagtcacctttgttgtcttcccctttctccgatatctcgcatttctatcccctcctcctccctctgagcactcattctgttctgctgatcagagtcctctattgcctccgctgatcagactctttccctcccccttttttgtacaggcctttactactttatgctgttggccatcgtcggcatgtccaccgtcacaacgtgtgacttttttctccccgccctctttctctgatcattcatttcccttttcagttcggtatgttcccaattcggtcgttccgtggtcatttcccctgtcagatgttcgtctacgtggaacggaatgtgcgcattcaccaccacgtgcccttttatttgcgttggatgattgcaattgagcggcgcaaacggaggataaggcgggcgataattggacaattaagccaggggattaatggaaattagagcaaattaatggcaaataccattgacattgcttaccgtttacatcgctttagcatggggtacagcttccgcttctccaaagccaaacggaccagagaaacacagcgccaacagaagcacaacggaggggaggacggagcaggcgaaatggtcagtaagtgggcttctcaaattcagtgcttctcctctttcctttcattggacaaaaactttccttttttttgccattctttttctcttttcccctcttttttggctatgcttttccccccttttctccccatttccctgcttttcctgcccattttccacttaggacactttgctgacttcgacccccgcgacaacggcgtgcggtcggcgtgccagccgaatgggcagcgcattgtgcggccatttgaacggatttgcgggcatcggaggctctgacagcaatttgttgcgctgcgtttcgccaacgccgtccgagcggcagcgaaacgccgaagccgaaaaaacgacggcgacgacaacgaaagtggtggcgaaaagtttgttgaggctaatgccacgaaggagtggggacggacggaaacggacgagcggaagtgcaaaaagcacgcgggagcaaaaggaggtcgaagaggtcggcgcagaggggggggggggtaattaagtaattaagggctaattgaaagggcaatgccctaattaggtaatgcataataatcatcgaaaaggcaaaaacgaaaccccaaaaatagaaactttctccgcctaatagcagcactattgtgccagtattttgtgtgccaaatattagcagaataaataaaaatttgaaaattgtcaatcaattggaaattgctttcccaatatctgctggatttgggttgtcatttggggtgcaccccaaaatctcgccgcctaaagttaaaagaagcattccgctaaaaaatcgctttgttcgcttcctagtccttttcgattgagtcaatggcaactcgtaaaacgcaactcgtttcaataaaaatttaaaaaaataaagcctaagcctaggcccaagtaagcctatgattaggcctaagcctaaagcttcatcctaagcttatgtacgaattgcctttttacgagttgccgggttatggattttttgggagagattttgggcggcagagattttgtcccatccncctgccattcgtcattcgt

SEQ ID NO: 8208 - DNA, 3770 bp, Heterodera glycines
tgaaatgtacaagtgaaatacgcgttaagaactttgtggtggaattagttggagctaaattctgccggcgtttatgtgccggtggcagtcaaagggacggacgacggcactttggcgagttgcggcaccggcggagtatacaggtgcaacattttgaggcttatttccatttgaatttgcagacttcggcacggtcaacaacgtcgaattcgcctgcacttgaaaagcacgggacaatcggccgacttcgcccagggcactttgcccattcgcttttcagaaattcattcggtcggttgcctaatttagtattttttaatttttaattgctatttttaataggtttcaattggttcgccaattgttgtggacgaacgcgaggcacttactttggacagttaccaagaaacggacttggcacgaattcggggccaatggaacgaattgctgcagcgaagggccaattatctgcaggggcaaatccaatcggtggagagaaacgaaacaattttaattggtcattcattcatttattaattacccttttttgagttgtcttccaaaacgaaaagtgaattcgaaggcgaatgtgaagaacattctctgcttcaaattggatggaattggtgagaaacaataaaacaaagtcaattagagagtccttattttaataacttttcaggtggaggaaagaaatgccattttcctcccttcgcccggcattcccggcgcacccatcgaatggcacgcgtaattcgaacgttcgaaaatttttactaaatggggggcaaaacataggtcgacaagcgaagaaaacgcttcatctgctgttggcttcgaaaggcattgtccgctcatttttctgcagggtaattaaaaggaaataattaatattgagtaatgagtaattaggtgaagaatcggacgaaaattgcaaccaaaatgtgatcgcaggactggcaaatgttctgccaatggaacggattgatgattgccaattggaaatgcctttattggagaagcgaatcgaagaggtggcgaggagcgggagggatgggcactgatcaatgatcatcgatcgattgatcaattgtgattggaaagtctatcgattttgactggaccgaatatctctctaaaattgagattctttagaatttcttggagtgcagctgtccatgggacaggtaagaatattaaacccatttgaccgaataagaggttcactctctcttatttcctctttttcgtctctccctttctctctctctccttcccctcccctcctccttcctccttatccctgcccctttttttcctctgtccctttctctctctccctccttctccttccccttcccctcccctcctccttcctccttatctctgcccctttttttcctctctccctttctctctttctcttcccctctctctctctctcttatctcctctttttcctttctctctctcttatttcctctttttcctctctctctctctctctctctttctcttcccctctctcctcttttctcattctctctcttcagttctttgctcgactgtccggcactgaacagaaactcacggccaactgaatgcgtttttctgattttaaaggtgttttttctgaaaatgttttttcttttttattatattttttagtttttattttccatttctcaccctttccacgctgaaattgtccttcgcaaacgcatttgcttgtgcattggcgaaacaaactcaaatttcgcagttggttcctcaatttggccatgggccaaaaaacaggtaaaaacaaatgttttcgatttattttaatggaaaatgatgactttaggaaatattaacaggcacgggtctttttgtggatatcgtcgcgtgcattcccaaagtacaaaaacaaatttaaaactatcaaatttctcccaattttcagtgttccgttggctttgagcgtcgcgaagagttggccaaattggctgttcaggttaatgccattgatgttatacgaattgatcaaatattcgcattcttagcatgccaccaacagcagtgatcagatggaagacggcgatttgtctttggtttcgttcggttcgtcggctttgcccggggcgctggccgattattcgccacgggacgaagccaaaagcaattacctaagcgaatacgtctccaaaacgatcagtgcggtggaatggctgatcaaagtgagtcgcccaatgatcgtccaattaatgccaattctttgcccattttattctcaaattttcatttttcagctcgaccgactcaggtgggaaaagctgtgcaaagtgccaaaattggtcggatttgcgatttgtttaggcaggaggaggcgatcagaagggcgatggccaaactaagcgcggaaagggcaccaaaggcggaaattgagggatgccgggcatcggacgggcgaatgacacgaacgatttcgctgccgacatcggtgggtgtgcaatgtttgttggttgtgccattgttggcatgccaaatgcattggccctttaaccctcgacaacattcagtttctgccacccctccatttgtccaacttcaatctgatctcttctaagcaaatttcgcctgaccatgttcagcaaggcgatggccaaaaatcaatcggtgccattcgccccttggcttacggcatttcgccaacagcaaaaccaatcgccacccctggcgatggccccctcacaaatggtcaaaagcagtcaaagtcatacggatgggttctgccagttgctccaccatcagtcacgtcccccgtgcgcttcgtccagcagttcggcttcatcttcgggctacgcgtccatgggtttgtgagaaagaatgccaatgcgaaaacattctgattttgaaatttctctcacttcctccgctcgatttggccccaatatttcctctttttaccccccccccccccttctccgccattgtcccccttttctctttaaccactctaattactctaattgtcctcaattcccattaacgctcttctcctctccgtccatgccatgtcattcgctctttctccccatttctctctctctccctcttacagtctctcctcccaccgccgtttcttctgccaatcgctccttttccgactttcgccaaattcgtccgaattcactgaatttgacaacaccacaaaaaatgatacgaccacaaaaaatgatacgaaagacaatttcgatgtcatttgtttcaccaacggacactttcgctgaacaaattgaatatgcgcagagcgaaattgccaccaccaccgccaattctccggcggcgacggcaccgcacaattcgagtcggtcatttgtcggtccatttgatcactttcggtcatttgtcagtcccccatttgatcagttcttttattttactttaatattatcaattgctcaccccctttatattttttgttttgttttgtgtttttttctatttttgtgtcatttattttcattgatttcaatgccatttcggtgtttttttattgcgtgccattcaaataaatattcgtccccctccctcccttttttgttcattttttatttttccattttttcttttcaaaatttctcttttccctccgcatagaattccttttctgtttgcacattttccttttcttcttcctccagggttttttgtcctgtgatttttgtttgtctgtttgttttagaaagtgtaatttccccttttgatgttttatttaaatattttta

SEQ ID NO: 8209 - DNA, 971 bp, Heterodera glycines
tcgaataaaaatcgatattttgaatttttcaattatgattttttgttcaaatttagattaggaaatcggaattgatcaaaataattgaaggattcgtgatcgggggccccaaaaaccccagagaataaatttttatgactatcacaaaaaaaattttgcaaaacaaaagggtccccccttttgaaaaaattttcaaaaacggccacttttacagtagcgccaaaatttttctttcaaaatccatcggttattttggcaaagaattcaccgtattctcttcggattattttatgactctccgcgacagtaccttccgttttgagttaatcaacagattgccaagagtaatttgcatattttgccatggttcactgtttccatttgcattgccatgggctgccgtatttattaaagtgcctttggcttttgttgtgccgtgccttccccgcccccggggcggatggctttcattttggatggattttgagacattcgctgtgattgaattttgaatgagtcgagtgactgactaacagctgtaaacttacagccgaccaaaatgccatagtcgacggccattggtcacacggcactttcgccgactcttgaaattttacagcgaattaaaacgagttattaccttttcataaaaataatttgctgataaaagcgacagcgaattgcgccgattgactactcaatcaatcaatgtttatttttctattcgatcaatcaatacttttccaatcgatatttacttgcctacccgatcaatcaatatgcgtctttcggtcgttttgtccccatttccgtccctccctttcccatcattaaaattccatttttgtttggttcactcattcaccatttcttttctttttatgctcatttgtcataagagaaagagagagagagagagagtcttaaatgattttttacacatttaggaaatttcgacaaaacggaaatga

SEQ ID NO: 8210 - DNA, 779 bp, Heterodera glycines
gggggcggggggggggaccgacgttccggctcgtcgtcccccctttttttttgcaggatttctcttccattttcagcaacattttctctctttccctccctcttcacttctcttcttcctttctttactctctcctcttcctctctcttccttcttcctttcttctcttcttgtagtgattagagatttgaggaagtgacgaaaacagagacaaaattcacacgcgaattgaaataattttttggtcagtaatgacgtcataaaattggccatgaattggcccaaataaaaagcgatggattggcaaagacaattaattggtcgatcgatagggcgcttttcgcttcgcgtcacaacgccaaaatggcgtaacaaaatttgaaaaagcgcatgatcaaacatcgatagggaatacattcgtagaaaagtcatactcaaagtgatacaataaagggaccgacccattggcacaaaggggcgaatggggggagggaaaggcatcattagcagtggaaactaatcaattaggcttaattaggtcctctcttttggatgagacccaaaagcggctcaatttcggtgtttggtccaacttcattttgaggggacgaaattgactttgttgctaagggcaaattggccacaaaattgaaataccatcaaaatggtgctgcacatgtgctgttgtgtcagtcgggtcgctttagcggattggcgaagcgaaaagttttaacaaatcgccaatttattgccaatttagcagggctatggaagatcaa

SEQ ID NO: 8211 - DNA, 930 bp, Heterodera glycines
  unsure (1)..(930): unsure at all n locations
tcgtttcgatctanttttgtctaacactggggtttgacccatagtgtaaccggtccgcccaaagtcccctaccccccttattccgctattctcaccttttcagtcgctccttcaataaagctaattacctaattaagctttttctttttgctttagttctgtacacaattcaattccgaaagttctttaaccatttttgcacctcaattctgcgaaaacactttttgatgacgcagaatgcttcagctggaattgcttcggaattggttttgaatagaaatgcttcaagatttatttcggtagcgcagcgaacactcctttctctttactaacgtctcttttcatctgtttcagtcactgctcaaaattccaaccgttaaaatccgcgacacaaaatcagtcgagcacaaagttgctgaaatttcaaggacaggttacgacaaactcattgtgagtcttacaattagtcagcttttctttgtaacgagctaaatttaggtaatctcagattttgactacactttgagtcgctatcacagaaatggcgaacattgcaagacaacgcatggaatatttagtggagtttgcgttaacgaaaagaatttggagttttatgagaaggcgcatgttttggaaacaaagtaaataaaaatgaaaattttatatttcttataaaattatgtttttttaaattaaggtataaacccattgagttctgtccaacaatgccaatgtgcgacaaaatgtttgtttatctgcctttttcattctgttaaaattttttgtttacttgtttcaaatgcggaattttcatttagtcctttcatggaattgtggtggaaggaatctcatcgactgattgttcaggttcttgcttttataattttttttttgttgtaatatgtagtaataaaatnttcgggggggggg

SEQ ID NO: 8212 - DNA, 1452 bp, Heterodera glycines
ttcggttcgtaattcgagaattcatcttctttaatttttaattcttattttttgcaaatgttttgttttgagtgaccgttgcattgaattcctcaactttctcgacctccaaagagtccctctgattatgtttagtgctggcattggttgttattttttgccagatttttacattctccaattttaaggtgatatcattgagtttgtgttcgaagcagcggatggtcaaaagccgacaatggccaatgtgcaccttatctccaatatgatgcaatttgatgaaaacgaagtgtgcatcggctttagagaaccgctcatccacactttcaacaagaaccaaactgtgatcaaacaggaggcgcccttcttccacaaattggcggaccgtaacgcagtgctgctattgggagacagtttgggaggtgggtgaacgaatagatgagcaggtcaacgctgggtaatagtgccgatgggaccccccccccccacctttttcgaaaaatgacttttttgattacggattgtattagggattttaagggtcggagaatccaatacaatctttgtaccagagccgcaaataggaatgaatttatagattcgtttattgtacaaaaaatcaatggatatttgtttaataggctgaatctctgataaaattcccttttactagtaaatgtttttcctttttaaattcaagatgttcgaatggatgttggtgttgaaaatgagtcggtggtactcaaaatcggatttgtaagtgctcattcaccgccacaacttttcatcccttttcttcgattagctcaactttgattccgacaatttgctcgaacggtatttggacgactatgacattgtgcttgttgatgaccaaactatggacgttccattattcattttggaacacatcaaacataaatcagcccattgaatttatcaacaaaacaatagccattttgttgttttcacagtctttggttttgactattagcacggattatttgccaaaatttctgtctatagtgaatgtttcttctgtttatcctttttattgtaaaatataaaatacattttatgtccttttgtctctttgcattttgtgttatttccatttgctaatttactcttaaaaatttttatcaaatttttatcgctcgcttttaatcattttgtgtagtaattatttgtaggcctttgcgatgaaagtcatcaacgagtttggctatcgtcaagatgcccgaacacccagccaaatccgcaacattgactatcaaatgggagtttactcacatgcagacggctccgcttacattgagcagggcgagacgaaggtgggcggtcaaaaagttttatttagtttgtatgaattttctgtcgattgaccattttttcatgttttgctttttcctccattcgctacatttcccctctgctgaaggatctttgtgc

SEQ ID NO: 8213 - DNA, 3474 bp, Heterodera glycines
  unsure (1)..(3474): unsure at all n locations
acggattgntattagggattttaagggtcggagaatccaatacaatctttgtaccagagccgcaaatagggatgaatttatagattcgtttattgtacaaaaaatcaatggatatttgtttaataggctgaatctctgataaaattcccttttaaatgtttttcctttttaaattcaagatgttcgaatggatgttggtgttgaaaatgagtcggtggtactcaaaatcggatttgtaagtgctcattcaccgccacaacttttcatcccttttcttcgattagctcaactttgattccgacaatttgctcgaacggtatttggacgactatgacattgtgcttgttgatgaccaaactatggacgttccattattcattttggaacacatcaaacataaatcagcccattgaatttatcaacaaaacaatagccattttgttgttttcacagtctttggttttgactattagcacggattatttgccaaaatttctgtctatagtgaatgtttcttctgtttatcctttttattgtaaaatataaaatacattttatgtccttttgtctctttgcattttgtgttatttccatttgctaatttactcttaaaaatttttatcaaatttttatcgctcgcttttaatcattttgtgtagtaattatttgtaggcctttgcgatgaaagtcatcaacgagtttggctatcgtcaagatgcccgaacacccagccaaatccgcaacattgtctatcaaatgggagtttactcacacgcggacggctccgcttacattgagcaaggcgagacgaaggtgggcggtcaaagttttttttaagtttgtatgaattttctgtcgattggccattttttaatgttttgctttttccttcattcgctacatttcccctctgctgaaggtcctttgtgcggtttacggtccgcacgaatgtcgcttccgatcacgagccaaagaagacgaggccattgtcatttgccagtacagtcaggcaactttttcggttcctgacagaagaaacaggccgcgtggcgatcgtcgaggcaattccttttcccaccttttggagagggctttcgaatcagtcattttcacacatttatatcctcgaagtcaaattgatatattcttcgaactccttgaggcaataatttgctttttacattttgatgctttattttttaattttaggctgacggtgccaatttggccgcctgtgttaatgtcgccagtttggcactggctgatgccggcattcccctgcggggactgctgtccgccgtcgaatgtggtagtgctgatgggttgccttgtgcggatttgagttctcgtgaacatagtgaattggtaccacgcctcacaatggccaccgttggtgagtaaatcaggagactttataatgagaagttggggggggggggacatggcgaggggagggaaaagaggaaaattaagcgaatgactaattgtaagcactgaaatcatgtcatatgtttaggaggtaaagacgaaattgttcttatggacatgaaaaacctactccacaaaaatcatttgccgtctttgttacaaatgggcgtcaatgcgtgtgcccaagtacacatttgtctggagacagctgtttttagagtaaattataagcacatttgagggttgtttatccattttaattgcagcatgtcgaagcatcgcatcggaaaaacacagaaagtggaaaacaaaattcgcttttgaacagaattgttgaaggtcgctaatcacagatttaatttgttggattaataaattcatatttttgcattgaaatatatttgtttttaatcgatttccatttgtcttttatttttccaattcattttatgtattctttcttaaaaagttcatcactagttgatgctgttaattcctcggagtgtgcgttgtttttatggcggtttgttggatgtttcgtcactaaatgtggggaatgccacgcggatggaattgttacgaatgtaatttgctgaagccataaaaattaatttgttttgcttggaaagtacaaagttccttttagcgctttttccacgccattcgccgtttcccattgttttttgtcggtttcgtccgtccgctgccttcaaacatttgaaaagcgtcagcaaagccaaattgagagggaagcgtccgaactttccaaattcattgactccctatgcaatccgaacgcatttaagaggcgtcctgatgcactctttgctcccgtctgcgctttcatatttcttatggtacaatcagttccatttagaaacgcattggaggaatggatgtcgcggctgtcagctttttggattcgttgaatctaaccgaggaaaacatttcgaaggaggccatctcgcgattcagcaaagaggtcgcttttttaaaaaatttctcgactgatttgcagtttttttaaaattttttcattttcttttctcatacgaaattttcaatcatttttaggtttacaaaatgtccgctattcaactttctcagctgttgaaagcgactagcaaccgcaaaattgagcaccccgtgttgatcaaccacatttgcaccgcactgaaagagtaaaaattcatttaaaacattcaaagaaaatcccccactaagtcaagaacgaatctcgtaatattaatatgttcaatgtgcccaattgaatcattttgggattgctactagtacaatataaaatgtgattgtgagagactttggatattgtctcaatgtctttcaaaaatgccctcctaaaatccgttcctccattcagccgtcctttgcctccgtctctccgccacatttgtcaaattgctttttacttgtccaaacattcgttcctcgataagccgcttctcaacagaatcaaagaggattttttggtttatgtccgaaatgaaatcatctcgaaaacatctttttcacacattgtgatcgccttcggtcttcccttttttctttctttttttattttcaaatttcagctttttttcgtctgactgatcgacatttttggcaacaaataatccaaatcatcgaaacactggcgaatcgccctgaatagtgggtttaataattgtttgtttcaatcatcgctttaaaaagaaaaggccaaaattctatctttcatacttttttaatttaataagaatttcgtatgctatgatttggacgatccaatgttttgattgttaggaaagcaaaaaaatatttggtcatttttatttcaaaatctattaagaaaccaaatcaaaatttatccggcggcgcctttctgcaccaccgagcgcatttccaacaaaaatttaaatagttcataaattgcttgtttttacgcttgcgttgccccctcccttcctctgttatgttcttttctttagttcaactgctctgattgaatgcgttaattcgttggctgtggtaaatgttcatccgaaa

SEQ ID NO: 8214 - DNA, 820 bp, Heterodera glycines
  unsure (1)..(820): unsure at all n locations
cccccccccccccccccgctgatttacgcctcgcccccgcccattgtccgaccttgacaaggaatgccctcctctttcagtccttctcgttggtccgtgacattaaacgtggtgagcaaaagcatcacccattgttggaacgctttgaactgatgcttcgcttggtggttccgctcaattcccacagcactccccaggaatggtcagttccgccgatttttatttaaattgaactctatcaaaatttaggcataaaactggcgcttttctggaaggccgttgctttgtggacacggcacaacgccaactcatccctttgagagatgtcaacggaaatgcaaatgtccgtgaagttgcagtgattcttcttatggacagacacttcacccaacgcattggtccctccgagaagggccccgaccgaccgaccggcatcaatcagatgtgggaacatggcggactaagtcgggactggtgactctgtcccgttttcttccaggaacattcgtcatttaaaattggctgggatccatccgattgtattcaccgaacggcacttccgcaaactcggcgacgatgaacgatctcaaataaaatttattcgagagaagatcctttccttatcggaggaatttcacaccaacgaatggacggaagagaataacagttaaagtatgggcttaacttacgaattgtattcttggcaattattgatttgtttgtgtgatttattcccaaaaaataggaattctttttggaaattcattttttaaatgtgctgtctttttccancgggttggtaccgattctcacaanagat

SEQ ID NO: 8215 - DNA, 2107 bp, Heterodera glycines
atatatttttgtcacttactctatgacatttatctgaatagtcgtcagagtaagtggttctcgcccttctgatgacttttttattttttatgaataaacaatacagtaaaatggcacaattaactcaattataaactcattttctggcgactctcttctagcgctaattagtccttagttatatttttagcattaattagtcttaattatacacttttgtctcgagcttccggcccacaattcttcgagagggttaagcccttgaaaaaatttttaatcccccgtaattacgaccttgtttgatttttctcatttcatttttaaaggtatcaataatttcaaaattttccataaactcggttaatttttgtacatttttaggaattagccgttctctttatctaagcccacctacccaattgtttttttttattaattttcgcaaattaatttttaattatataattgatgtcgagaatttaattaacttttcccaaatatgttcacattcacaatccttcctagttcaacaaacacttcacgacttttacttgtttgttctattctctttctctccctgctcttttccttttcattcatatccattttaattgatcaaaccaattaattcattaattattgctaattatccccacccctctccatttttcctcaaatttctcccattacgcattcatttggagatttggaaatgcattttcaaacagaacacacaacatattcattttatgtttttatttcatatgtgtattgactgtgaatttgaatgattaaatacaaaaaaaattgaagtaaaaaaataataaatttgtcggaaattaaaaaaaattaatttgcttgaaaatccattaaattttaaaatcacccatgaattttaatcattaagtatcggatttgaatagaattcatggttatttagcctttttcaaaaattgaatctttaataaattctcaaaaatttgaaactatttttgagaattttaagtccaaataaataacagtcagtaaattcgttccataaaatccaagtttagtgggtggaacaaatatccttgattaaatcactttctgagacccctgatcgaattgttatttcacgagtcagtaaattttaaatgaaaattttgttaaattatggattttaactagataattttcacatttgaaagagttttgaagattttctatggttttaaacggtacttcaactaatttactgtaaaccaaagactaaaaatttaaagaaaaagcaaatgtttgggggctaaacattgctgttgtcaatcatttggctatactgaaaagtgatctataaagcaaattgatcatttgtgcttctcgacaagcaaaaaaaaagtggggaatggggacttcgagactggcagtgactggcggtggtacactctcgacgaacaagcggatttttacagatttgtcagtcagataaagcccaggaggagagagagagattaagcctttttcaaaacattcgaactttctcccaaaaatatggcccatttttcgtttctgaaaagtgagaaatttagctatatgtatgtaattaaattttgtttagatttttgtcaattttattaaaaaatgtttcctggaacttttattaaatttaaccctttctataattaataaaatcgcaccaaattttacaggcaaaatatatttaaaaaaaaaattacttttggtcgatcacttttaatgccgatcaatcgcttttgatttaagttcactgacacacattttttttatctgaccgcttttccttgaacaattttcgatcactaaccaaccattattgattgatcgcatttccactaatcagtcgtcacatttgattaaagttcaatcattcatttattgatcagaccgattctccttgattaaattttcgatcgccaacaaaccaaatattgattgatcgcatttccactaatcagtcgtcacatttgattaaagttcaatcattcatttattgatcagaccgattctccttgattaaattttcgatcgccaacaaaccaaatattgattgatcgcattccactaatcagtcgtcacatttgattaaagt

SEQ ID NO: 8216 - DNA, 2087 bp, Heterodera glycines
gctctctcatctgtttcctctgcttctttgtatcctcctattttctctcatccccctcttttctcttcctttcctcaatatctctctttgtctgttgtctctctcaattcatatgcacatatcaaccgctctttttctcttcttatactggttctttctctttacatatatatatactcatgtctctctctattcgtttatctttttcccttttcttcctgcttctcattatccttttaatctctttacgtctgtctccaactttccctctttcctttcttccttcctctctccactttctttttttctcctttctcactcccctcttttcctctactctttcccacttttctttttttccccaactctctccgtctcactctctctctctctctctccccattttatatcaattaacataaaatatttacagaagcaaaaagctaaccaactataaagctttttctgtctagcagtcaattagttacacatatgtctctatgcctcctcctttcccccactattttgtttcaattaaaaaaacgctctctctctctgccagcgaatgcttttggttgccatttgtgcgaaatgtgcctcgggggatgtcggctaaattttttaaaaattcaattcaaaaatgtttgtttggattccttttcattttcatcccttaatttattcaataattttccattcaattatatttctattaatttttattttaaaacatccaaaattaatggaaaatttttccattttatttttattatttaaaaaaaaatcaatttaaaaaaagaaattcagagggcgaagcggcttggtttgaattttgccctattattaagcggtgatattttcgtctttttgggggggggggggtgggtcagtgccgggtttttgtcctgtttttgcaagtgtcgggttttttttttaaattttttgctgggctgtcccaattttttaaacttaattttaaaattggtaaattttttcagaaattttcaagaaatccgttttttttttgcgtgttgatcaaatttttaaaataaatttaataaaatatttttcaaacaaataattaagcttcctaaacaaaacatttgttttttcttctcccttcaattcaaactcattaaaattgattctttttgctgtcaatcaaatttcattttgtcacccacctaataggttaactttttatcaaattgtttaaattacatttggttcacttaaatttaattgccctcttaattgatgtttccgtttctttaaaattttttcgaaaaaataaaaaataaatttcaattattttttggcagttttcctttattaaatgtattatttgtactgctcgaaatgcctcagccctcagctccaccactgagcgaactgattcagcttcaaacagtcaatcaccacaataaggcagctccaacggcggaagtctgaattatttctgtactaaaacaattttggtttcaattttcaattttaattatatatttttttaattttagatgaagcacaattaccatgatggcacttccaatgcgtacgcgtcatcccctgtgccgacaattagcacatgttcagcaccaccaccaccaccaccaccggcggtgccaatgtcgtacatgaacccgaaacagcataaacattatcaatgttatcagcagcaacaggaaccacttatgggtacaaaaaaaaataaatatttaaaattaaaaatgcactaaaatttttgtgcccaaattgtttcttgcttttcaagacaggctcaaacataagaaatgcccttgttttcaaggatgcccttgaaaaacgtagcattttttggccaaagctcgacacagattttggaaattaaaaaatgatttactgtattaaattaaagatggctacggttatgccgtcccagtggtgccaatgccaaacaatgatcataacaatatgaggagcttttgtgccgcattatgtcgttgccatttgaaaaatgtgagcatgttctgcattgcattcgtggaattttgcatttctggtcagttccagaaagcattcattcattgatcagaagtgaagctgat

SEQ ID NO: 8217 - DNA, 854 bp, Heterodera glycines
  unsure (1)..(854): unsure at all n locations
cagtgaccagtttggttggcattgttgccgcaaaaattggcacaccgacgccatggcacgtggccaatttggtgctttcgttggtctccattttgttgtgcattggttgcgcaataatctcgcacaggtgccagccgggaaaacagctcgttcccccccncccccctccgcccaatctttttaaaatttcaaacagaaatttttcattaaaaaattttagaaaaaaatttaaataaatattttaaaaatttttctggcgattttcaaaaaattttatgatgaaattacttcaaaaaattttaacactgaaaatttttttgtttattttttcttaatttttttttaatcgtcgccaaatatgtacttaattctgcatccttgatccatgtcaagggcgtccttggaaatttgcgtcttacttactctagcatcttaactgcctgtacaccaaataccgatgtcttagacttctcccaacccataatttcaaaaaaatgtgccataatttgcaggaactggcaattgaccggcctttacaaaggcattcataatccaatctcgcgccgtgaccgttactattgcttgattggtgaatatgacatggaccggatgaagcacagtcaaaagcagcacaaagcgtatttcaatgaggcagggtttttattgcgatgttaaaattgaaaaaaagagatttctgatcaaattgtttcaaaatttttctaatcactttgtcagggtttttggggtattaaatttaaaaaagaaacttttgatctaattctttccaaatttttctaatgtctaatcactttagcaggctttttgggaattgaaaataataaaataaagacatt

SEQ ID NO: 8218 - DNA, 3253 bp, Heterodera glycines
aaataaagaagaagaaaaatagaagaaaacaaaccctttttaagtgaaattctatttttcattaaaaaccagaaaaaaaaatttcaagtaatttcattaaaaaagcttttttttattattaaaaaaaaatatttctcaaaattataaagggtagagaaagtgatgaaggttagttgaataattaaatgttcaaaaataaaaatgaaaatttttaatcatttcacaatagaggtaaaaaatcaaatttttaattatacaaataaaaaactctaatgacaaaaaatattcacttttccaatttttattttgcgattttgcacccttttaaaaaattaaaaagtgaattttaaaatgaaaaagaataattaaatattttcatttaaattattatgcaatgaaagaaaatcaaagcaaaattattaacaatgaagcaaatactaaatgtattgaaatttcgacaacatcgcccgaaaaggaaagaaaagaaagagggaagaactggaacatgtaatataatttcaataaacgaaaaataataatttattaaacataattaatgattaattatttagcaagaaaataatattttgtagaacaattaataaacttttataaggaaatcaaattaaatgagatgagaaataaattggatgggcatcagagcatgtaataaaatgcaaatatttaataaattaattacacaaaaaaataaaaattgtaaattaaaaaaaataaaatgcactcactaaaagaggttaccaaaaaaagaagagtggtgtggacaaggaaaagaatgttattatttctataattaaacgaaaaaatgataattttattcaaacttaataatcagcatataaaagttcaactggtcagaaagccatgaaattatgctgtaaaaaagaaataaatattctaacaattaaaaatgtaatttattttcaatttttgtaacaataattaaatgaatattgaatttttgttgagatttatagattcaaatcaaagaattaaaaaaagtatcgtcataaaaattaagagttattggaaatgatgaatttaaaattgaaattttattatttttaattaaattaaaattcagacaaaaaaataataagtgagcaaacattaatttttttaaaagtttttaaattttttgaaaaaatcaactctaaaaactcattataagtgctgttatttttaatttataatattaaattaaaaataattcgcaatagaaatatatttattagaaatatttacgaaaatgtgttcctaaaatgattcactttttgtttttactcaagttcaaaacaaaaaaatttgtaaatgacaaaaaaataacaaaataataactatttctaataatacaaacacaaataaaaaaaattaaatttaaaaatgataaaaagtttaaataaatattaaaaatgcataaatacaaacgaaaaaaaacaataatattaattattcattttgcaaaaaaaatatttcaacaaaaaattaagcttaatcaatgcgcatcagttacaaaaataaaaataaaacttattatattatatgaataataataaaaactaaagcaaatcactacaataatttaagcaaatttaatagccttaaataataaaataaactgaaaaagattcccgtataaaaatatttgattatattacgaaaaaatggattataattactaaaaaatattataaaattaaaaagagaaaaacttttatcaaatttctcgccctttgagaacaaaaacagtgttgcgggggacatgaaacattctcaaataaaagagaaaaaatgcagcgaaaaattgtttatacaaaaatttaaaaacaaaaagttgatttaatggttaattatcataaatagggttataagttgtatgcttttgcatattttttctgcgcatatgctatgaagaaaggggctcaaaaatagcatttctgcgttaaaattttttgatttggtgaaggtttttagtgcatataaaagcatattttgggggtttcgagaataaatgcatatttggccatttttgcgtttttgagagcatatttcggtcatttttggcattttttaaaaagttaaaagccaattttgacagtttttaaggcatattttagtgcatatttgggcatttttagggtttttagggcatatttgggggatttttagtgcatattttatgcgcatattttgcatttttttagtgcatacaacttataaccctaatcataaataataaaataattaggtaatagaataatttttaaatcaaaaagaaatattttactcaattcaaataaaataattatttatatgacctttttaaattaatttgtacataattaaaatattaacatttataaataaaacttattattagtgatgtaaattctatgtaaattcttaattttttttcatggatttccccatggtctaattagtaggaaaaacattttctttttttgttgtagaaaaggtagcactataaagttgaagttgaattagtgctaataaaaacttgctggcgttatgtctttgtcaaataaaaaaacagcaaaaaatgatgattttttcatttatattatttttccattttttcttcaataaacagaattttgcaccttttttgccaccttttaagcctaataattaacaaatagcacgacaatttaaagagttgcaaaatgaccgcctctttgcaacaaattcgagcccaacccggctggacggtttggacttttaacttacaaattctcattgttttcattagggttgcgaccccgacatcggggttggaaaattaggggttcggggtgaaaattccccgactaaatttgttggggttggctggagaaatttaaaaatgtcgggggctttcataaaaagtcggaaataggaaaaagaaaaagttcctgaacacaaaagtcataaaaactcaaaatcgggggcattggaaacgaaaatcataaaatgtttatttataaaaggagtaattatggctaaatgctgcaattttcaggcggacaaatgcaaagagcaaattgaggtggccaagagcgagaatcggacattccaacgccaaacgctgcaggcgcatctggtccatttgctgaacaaagagcacaaattcaacgaggccatccaattgggtacggacggacgtacgaaaaaccgaaatggatgcaaaatcatttttttggggattaaacaatttttcatcgaaattcccatttaa

SEQ ID NO: 8219 - DNA, 2319 bp, Heterodera glycines
tttttcccgccataagagcttagcctttgtacaactaaagtgcaatagaggcaaaaaagtctcttaattttgataagaatgtgttgacaaacgaaaaaaaattcaaaatttttgtctgttttgtaaactcaaaaaccccgtttatttttttttcttaatttgtttattttgtccattttcagctgctcaacttgtgcgcgagctgaagaaggtggacgacaaggatttgctggtcgatgtgcaattggaggagagcattgtgcgtttttgtgcccttccgttggttaatccttcgccctgaaatttagacaatcctaaataaaagttccatttccgagtccaccggtgaagcaccacctgagtaaatttttgaaaaaatttcactaattccaatgaatttggtgttaatgtctccaaatttttaatgatttacccaatttcttgtcccaatgccatggggatgactgtgaaatcgctttctttcaaattcatttatttgttggcttttcagggcttttaccatctgtccaactacacaaaggcacgtgccgagttggtcaggtggacaatgcaattcgttttttttttgcatcacaattttcagcgcacggactatcgccaacaccaaatacactccgcccgccatgcaggtactgaactgactgacaaagggcgaacggagtcaaccgcctgtttttttttgctcaaaatcatattcccaatgaacatttaggggtcaaatttttaaaaataatagtggatttatttcttccgttgttgtctattggctacaacttcaaaaaatgccattttctctgcgcttttaaatttttcattctcacagtgcctaaacaggtcaaccgcaatctcttgacacaataatttcaatgagtaatttaattggtaaattttttccaaagattcatttatgttggtcagacgattgaatgttcgagtccgtaaattgcgggacacaaccccccccccccggtcaaaattaatattttggtcccccttttcatttcgctcgttccttgtcctaatgtttgttccacttcattcgtccttccccccccccctccctctcccattttttgttggtcttttaaattacaattccccaaaaggcccgtctcgacctccaatcgggcattttgcacgcggccgacgaccgcgacttcaagacggcctactcctacttcttcgaggcgttccaggcgttcgactcggtcaatgagtcggcgctcgcgcagcaggcgctgaagtacatgttgctgagcaaggcaagcgaaggcggcagcaaagaaatgattcaaaaagaaattcccaaaaagtttaggttttaaattcacaaatcgattttctttaatcgaataaattcgggcgagcggagagcgaattttcaataataatggggaagggtactacttttttttaaactattttgaattgcaggtgatgttggaccagtcggacgaagtgcactccatcatgacgggcaaaacggcacaaaaatatgccaaaacggagacggaggcaatgcacgccatcgcagaggcggccaaaaagcggtcactggccgagttcaacgaagtgtgcaatggggcgggggaaaaggcaatttagtgggaatttggccaacttttggattcttttctttgtaaacatttctcgaccggcgtttctcatcactcaaaaagggcggacacgaattccacaattttttcttcccaaaattttggtgaaaaaaccatccaatgaaaaaaaatgattcataatgttgctcaaaagtaaccaattttttttaattcttgatatcatttgataaacctaaatgttctctgttggtctgtcaaatttcaaagtttcgtcaattttctactggaaatgtatggcgagaagaactgaaacttaacgaaaattttgtaaatttacaaagctaatagtgagcatttagacttatcgaatttgattgtttttgatttcctaacgccaatttttggctgattgtgagatttgttttttatttgccaaaattttatcttcaaaactttgattttctctcccttttctctacaattgcaaaatgtgtcctttttctttgtccaaggccttcgacaagtacaaggacgtgctgggccaagacccggtggtgaagcagcacttcggcatcattcaggacacaatgttcgagaaggagctgtcccggctcatccagccctactcgtgtgtgcaggtggagtgccacgggggagagaaacggcaccaattgggaggaaatgttggcattttcaggtggaacacatcgccaaatgtgtg

SEQ ID NO: 8220 - DNA, 978 bp, Heterodera glycines
atcatgacgggcaaaacggcacaaaaatatgccaaacggagacggaggcaatgcacgccatcgcagaggcgccaagaagcggtcactggccgagttcaacgaagtgtgcaatggatgaaatgggaaaagcctctcgttacgctcgaaccaacggactgacacaaaagggggcagctcatttccccccgaaatttttttttactttactaacttagaatttttcaagaaaaatcttattgttagaaagttttttcataaaaaaaattctatgaaaacaaatttcgagaaattttcagcgattttttagaaaattttttcaaaaatcagtaattcaccgtaaaaatttcttgagaatttttttccttagaatttttcttttgaaaaactttctaattgtaggatttttttcttgaaaattttttaataactttgctcaagaataaccaaatttcaaaaatcttgattcgaatttgataatttttgagtaacatcctaacgctaaaaaactttttcgagatgaccgaggggctaatgaaatgcaccgtcgattttgtcttcctcaaattgcacaaatgtgtcctttttctttgtccaaggccttcgacaagtacaaggacgtgctgggccaagacccggtggtgaagcagcacttcggcatcattcaggacacaatgttcgagaaggagctgtcccggctcatccagccctactcgtgtgtgcaggtggagtgccacgggggagagaaacggcaccaattgggaggacattttggcattttcaggtggaacacatcgccaaatgtgtgggcctcgaccgggagagggttgagcgacggctcagccaaatgctgctggacaagaagttctcgggtattcttttcggcgggcacttttacaataattggtgctgggctctagggacggtcccaggatttcggattgggggggttacctccccccgggcgactacctttttttt

SEQ ID NO: 8221 - DNA, 2424 bp, Heterodera glycines
  unsure (1)..(2424): unsure at all n locations
aattacgtttgccaatttcaatgccaaattcccttttccattttattaatgtatatccagcaatgcccaactcttccgcaaattgtttctgttttccatttttggacattcttccaaaaatcatcaattcgttcaataaattcttgctttttctgtttataaaatttattttcataaacaaattcaaattctttgttccatttataaattttcggtcgacaaattcccaatttttcggctattttttgttcaattttattccgaacttttctctctaatttccgtcttttaataattccttcttttattgcatgaaatttatgaataatttcaagtttttgctgatcattgtatttgtcaatctgaacattgcgatttgaatgtgccaaatttaaatcattttgatcatttgggtgacagtttgcattttgctcagtttcccatccttggccaaatatttcagcaaaaatgggcagaagttttccattcttttcacaaaaattattaactgataaagttttgtttaatgaattgattatgaataataacataaaatttaatttataaaattccattttcttaagaatattataattttttctttattattttcttatataaatttgctgaattttctttcaaataattcatcaattttcattcataataaaatcaataaaaaagattttgattaatatttttatgcagatttgataatttttattaatgcaaaaaaataattggtgaagattttaaattttcaataaaaataactacttggagcggaattaattcatcagaaaattatgaaattttatttcctttaaaatttaaacgaaatttttttatggcataaatttttagctcttcgattccaatttcagtaattgcataatattgtttaaataagaggtttggcttaactgtgagaattgcgtcttctcgactcaaatattagaacaaaaagtccaaaatatttcggcaatctttgtcatatttttcaaatttctctcttattttgttgcattgccaattcttcgcataaaacacacaatgcaaaggtatgcctcatatttttccattgaatattcaataattatggtttcatgattccttttcataaatgcaattagcattttgtcgtcaaactaattaaaattcttttttttctagttacgggcctgcccctaaattatcctgcatttttttaattaactcctagaaattggaaatttttgctgcccaattttcgtgcttttttgtcgtttttgtaattttttatgtcttttttcatatttttcgtgcctattttaggtgcttatttgaaacattttcgtgcctaaaagttcgggccctagttcatacttaacaaatctaaagagtgtttgctaggtaaattattcgttttcgcgtccgccaattcaagtccaaattttccgatttgactaataaacgactgattccaaagatcactcaatattacaaaatccctgaattttcgaaaaatatcacttcggcttcctcaaaacacataattatgccaaatgatagcgaacatttaaaatcgaaaaacaaagcaaaaaataaataaaagtcttgtgaaatgttaacgatttctttctcgtccctctaaatcttcacaataacttcttgaatgatttgtgttgcgtcattttgttgaccatcttttgcacatcgtcactttcaaaattgtatctcatgtaattggagtcgttcgttgccgcaacaattttgaaaatggcattcagtttggcaaaatgcgcatcaattctttgctgtgcagttttgctcgctgttatcatttgtttttccaacaaaaatttgtacaacatttgtataaatgcgatgattttaccgtataaacacagtaatttttcatgcaaaaatattaaaattaaataaaaaattattattatattatttatgaatgaatttttgtaacatgtttttcatttactattttaggactaaagcacagtttggcgatgtgcccaataaaataggagtcgaaagatcgccataatacgaatggtaggccggttttcgggatcgggttatggggatggtatgttggcatttggggtccgactaaaaagtcgagggtttcggggtgccaacacttatccaatgcttataaaattgcctctgtttctatattttccaactaacaaataagtttttttggctttgatttatttaattcttagttttttgtttaatatatttattttatagtcaattatttctgtgttcatttacttgtttaacatttctngtccgaacacagctctgagcaaatatttccaattctgaggaaattttggccaattaattgctcaagcaatttataagtgaattagaggtcatttgcattaaaagggcgagtaatttctagcggatttt

SEQ ID NO: 8222 - DNA, 2189 bp, Heterodera glycines
ccaaagatcactcaatattacaaaatccctgaattttcgaaaaatatcacttcggcttcctcaaaacacataattatgccaaatgatagcgaacatttaaaatcgaaaaacaaagcaaaaaataaataaaagtcttgtgaaatgttaacgatttctttctcgtccctctaaatcttcacaataacttcttgaatgatttgtgttgcgtcattttgttgaccatcttttgcacatcgtcactttcaaaattgtatctcatgtaattggagtcgttcgttgccgcaacaattttgaaaatggcattcattttggcaaaatgcgcatcaattctttgctgtgcagttttgctcgctgttatcatttgtttttccaacaaaaatttgtacaacatttgtataaatgcgatgattttaccgtataaacacagtaatttttcatgcaaaaatattaaaattaaataaaaaattattatattatttatgaatgaatttttgtaacatgtttttcatttactattttaggactaaagcacagtttggcgatgtgcccaataaaataggagtcgaaagatcgccataatacgaatggtaggccggttttcgggatcgggttatggggatggtatgttgtcattcggggtccgactaaaaagtcgagggtttcggggtgccaacacttatccaatgcttataaaattgcctctgtttctatattttccaactaacaaataagtttttttggctttgatttatttaattcttagttttttgtttatatatttgttttatagtcaattatttctgtgttcatttacttgtttaacacttctgttccgaacacagctctgagcaaaatatttccaattctgaggaaatttttggccaattaattgctcaaagcaattataaagtgaaattaggaggtcatttgcatcagaagacggagtaatttctagcggattttctgttgtgaaaaaattttgcaaatttttttcaattccgtccaattttccttctaattttgagtcaatttccagcaaaatttcctgtaaatctttgatcaattcattgttcggcgtgtcaatttttgatcaaatttaatttcgtaaatttctaaattgtgaatttatacatttaaaaattattttgtattaatacctttatttgcaccatcaacagatttgaaacaattaaccgaagtaacacttttaagaaaatgaaaaagaaataaaattttataaaaataaatttcatcattttacgaggcgttggataaatttgtattatttttttttcaaaaaggctaaaataataatgaaaaaaatttattatatgaaaaaagtaatagacatcaattattatatttattattttgataatcaattattgatttgggatgaatggagagaaaaataataaaacattcattgattttcacattatacgttattaggactggatttttaggcataaaaaatcgcgaaaaaggaggcagaaaaaaatcgtaaataagcattaaataggcaaaaaaatttttattaacgcttcttaggtagtaaaacacgtaaaaacttaatcaaaacacttaatcttggttatatttcaattgtaaattaaatttttaaatattttatgagtttagttcgaatacggacaaattttaaatcaaaaacttttcaacaaaaaacaataattattatatcgatcaatttttgagaaaattttttaattcttaggggtgtatttttgaattttcgcgggtcatttcttaggggtgtatgttttctttttattgcatttttattattgtttattcaaaaatcctgaaaataggcaaaaatagggattgtaaaagtcatcatagacaccccaaaccaagcggaaatttaatgctgtaaattgaattcagctgtcataaataattctcacggttcattcaaaaaataatgcaaattaattaaagaaaaaggtgaaaattgggaaacccaaaaatattacaaaaatgaaaattaaatagacaaattaagaaactttaagacaatatgcactcttcatcttaactcttcagtttaaactgtagccaatttgtccgattatttgcgccaagatcattctatctttttttctgttttaaatcttaatatttcaaattttcaatcactctaaatttatattttttcatatcaatca

SEQ ID NO: 8223 - DNA, 1356 bp, Heterodera glycines
agttccttaattagcccataattgggtcaattaagggaaattttaaattgtgactctctggaaatgaaatgaaataagaccccaagattttctttttgttgtcaaaagagtagtcattaaattcattcttcaaaaaagtattaccgagttcgcggcattggaacaagattcgccggcatttggagagccggtgacactcgaggagttggtggcattggaagatgggtcggcagcattgggagaagcgacggcacccgaaggagattcggcattttccggcgtcttctgtccattggaatttggggaagagttcggcgtgggagaggttatgttcggtggttcggtctcctgctcaatctgaagtttgaggaaatataaaaaaaatttgattttaaaatttgtttaaacttgccgaggtcaaaacgtcgtaaagatgcagcattaattcgtcccaattgtacagaggaccgtaaaatgtaacaatggcggcgtcccattgctgaaaaaagtttagtgttgttaatgataggaattccattttaagttattagaatagcacagacttacaacttggggtagctgataaaacacaaatccacatccaaagtattgttcaatccgagcagttctttcctgcgtgaaatgaccgcggaccaattcacgctgaaattttgtggttaaaattaaggtggggtttagaaatcctgcgaaaacttgtcacaattccgaagtcccggccccaaaaaatcaaaaattcattttcgaaaaaacataaaccgaaaaattgagaccggtaaaaaaaatttccgggaacgggatcggcgggagttcaaaattttccgggacgggagtcccgtacgggaatccgtaaaaatcccgctcccgttaaaatcccgtccatttttaacgggagtcccgggcgggagcgggagtaattcgaaaatttaattaaaaacacaaaaatatttttaatgcacaaatttgaaggacaattaatttattaattaaaaatatatagaaaaatttagtaaggagaaatttgaaatgaaaaaatcttatttttgggtcgaaaatcagaatttttttttcaaattgcttaaataaattcgacttcctttattatatttaacagattttcgataaaaatcattatttttacaaactcaattcttaccagtgcagtttactccagttttttgggtaaaaatttccgggagcgggatcgggagttcaaaattttccgggacgggagtccctaacgggaatcccgtaaaaatcccgttcaccgaaaaaagcgggagtcgggagcgggactcccgtaaaatcccgcggaagtcctgatcccgccggtctcta

SEQ ID NO: 8224 - DNA, 5161 bp, Heterodera glycines
atcatataattttttgtcatttcgttttaattgcttaaatcccttcaaatttaatccttttttttctgtttgagtgtacggcgcggacggagaacaacagcggcattttcttcccgattttcacccaattcacaaattttgtattgggtcaaatactttttggtgattcctcctaaatccaaattcatccgttaatccgtcgcttttctgaccaaagtccgttttcccaatggttttgcgtgtgatgtacgtgatcgaactgttggagacggaggagggcggcattgagctggtcgacccctcctggtgtaagcgattggcacaaataatggcggggctttcagtcgctgcgctcgccggcgacgacgagcggacgctgtcactgtcgcaggcaccgccgtgcgacgaaacgccgcggcacgggagacgaacgacgcccggcaccggcagtaccacgccgggcaaaacatagccaaacaattcaaaacatttcaaaattaaattgcttttaaatttgaacagcaataatttgccaggtcccgaagagggcccaccgcgcaagaaggtcaaatcgccgccggtcatctcccccaccggctcttccacgagtctttacagtggcggaagttcgtccatcgaatggacaacgaccggcacatcgttggaaatgcaggggacgagggtaaaaggaaggggagaaaagcataggaaaagcaatggcgaaaatgcaaaacaatttatataaaaaaatcctaaaaatttaataatttttaaaaataatattttggataaatgattagttttattttaataatatgttttagtaaattgatttgatttatcttttcatttgatttaattaatgaatttccattcttttatcctttaggtgacgcgcactcagtacggcttccgcactttgcaggagtcttccgccaaaatgtgccttaaagtgaccggctatcccttgcccgacatctcatggtaattaaaaataaattaatataaatatataattaaataagaaattaatgggcacaggtacaaagatgacgtacagctgaagaacgacgagcggcacactttttactcggacgaagaaggctttttcgcgctgaccatcgacccggtgcaggtgtgcagcaggggccaatcacaattacgaacgacaaacgacaaatttggcatttgtctccgaatttgtcattacgacaaaaattatgtcgtttatcgtcactttttttaaggattaatcaacatttctcaggaaaatgcaaaaaaaaaaaatggcaaaatggcaaaagagcctttctaggggtttttgggtatgtagattccgaatttaacagttattttgctctaattctaatcatgaacttaaattcaaaaaacccgaataaatggatgaaaaatcatagataaaaaaaatagaaatgaaaatctgagatcggattcatgatcagcgaactaatttaccactagaaacatgtttttaatattaaataaaaatttttgggtcaaaataatttggtgcatttttgggacacttctcagacgacaaatttgaggggcggtgttgagcgccccccaaatatttggcgtttgtcgttggtttcaatcataattacgaacgacaaacgacaaattttttaattgtgattggagataacgacaaacgacgtatattacgacagatttggcgtttatcgtttatcttttgtcgttcgtaattgtgattggcccgaggggaagagaaaggcacaaattaaacaggaaagaaatgccaaaattggatggcatttcgactgagttggacatcgcttaaatttcgattttcagactgaggacaccggacggtactcatgtgtggccacaaatgagtacggccaagcaagcacttccgctttctttcgagtgctcaaaggtgagcaacggcattttgagcaacgaatgtggagaaaaaatagcggcaattttaattataattgtaaaatttttaagttgaaaaggaatctgccggtccgtcctttgtcaaatcgttggcggaacggcgcaactgcaaagagggcgaagtgatcagcttcgagtgtgaggtgaacgagcaaaaagagaatataaattaataaaataaaatcaatgtgtcattttgacaaagcaatgactcataaaaaatcaataaataataacaaatcgattattgaataattgattgatcaacaatattaattgatcaggtggatggctggcccgagcccgagttggtttggctggtggacgaccagccgttgcgtccatcgcacgacttccgcatccaatacgacgggcaaatcgccaaactggaaattcgcgacgcacaaccggacgacagcggcacgtacacggtgaatatcgactttatcaattagagataattgaatagaattagaatttacagtatcttttcatttaggtgcgtatcaccaacgaatatggtaattcggtgtcgcggaccattcttacggtggcacccgacccagacaaaaattatgtgccgccagaatttcaggcaagtcattgagtgaaaaggccagtcagtcttaatataggaaatatatgcattagcaaagttttcccttaggcggtgatcgaagacgtggactgtaacgagggggatactgtaaagttcaaagctgtgttgactggggacccggtgccggaagtgatttggtacatcaacggagtgccattgaccgaatcggaaaaggtgggccaaccgcagaaaatgtaaaagcatttgaaaatggccccgatcaggttcgcttcatcaacgaggacggtatttgcctgctgaccatcaaagacgtgagccgccatttcgacggcaccgtcacgtgccagggcaaaaaccgtctcggttccggaagttgcgaggcgcggctgcgcgtgcgcgtgccaccgatgccgccgcaattcgacgcccgttggaggaccgcgtaataacggagggcggtgcggtgatgttcgagttggacgtggccggctacccggaggttagagcgaaacagtaaattgaaattaaaatttgtaattacccttcatttttagccgtccgtggaattccgcctgaaagggcgtccgctgacgcacggagcggacggcgtggacatccgcgcagtggacggccattaccgcatgacaattgcgcgctgtctgacggactcatacgacggcgaactgatggcacgcgccaccaacgaagtaacaacagtttaagcgaaatgccattaaaaatggaaactaacaaaacaattccttccactgccattgttccaattcagcacggacaggccgagtcgcgcgcgcgacttacggtggagccggaagaggaggagtcgcgcagtgcgccgacattcatcaaagacatcgaagaccaggcaaggcattttggagagcaaaaggaatttaaaaaccaaaagcataaaaacaattaatattcccacaattttggcatatttaaatttgagtctattggttgaaaatgttttcttttcttgttccatttttctctgatcattcattttatggcattaattaggaactttttccgttttccttccttcgatcactttcctcctatattttcttcttctgatcactttctcacttttaacattccttcaatcacttctcattttcctcttttcttttgtatattttattttgccatttctttggtccaccaccgcttaaagtgaaatgccaataaacttttgcccaaaatatgtccgtccatctgttgtccatccctcgccttttctttttcttttccttttcctttttcttcgctttgctttttattcaccagctaaaaagccgtgccaacagttgtcccccacccgaagaagagatcaaaaaatgagtaaataaaggtggaagataaacataagctgtggggaaaagcggtggccaagccgacgcacggaaaaagcggcggaaacggacaaacgcatggaaacaaacgatcgaatcgatttcattcaacttttattttcagagggccacaaaatcccacttctctgcgggccttttcggcttaagtttaaagatcagttgcatagttaagtgatcagcagatcacaaaatacatgcttcttacgtgttaatctcatttaaaatcccaaattttatttattttttcccttttggcattttccctgcaaaatttaatttcacttccatttttattatttcatcgtttccatttcagacagttaagcaaggccaagaggccacctttgacacggtcgtgcgtggttctccgatgccaagtattagttggtttttgaacggccaaaagttggatgccggcattactcctggcgttgtgtccattttggcggatggtgccgaacacaaaattgtgctcgactcggccaaatgttccggcaccgtattgtgcaggtgacacgaaaaattgagcacaaaaggcaaagcaggaacagaatgagtgtggaaatgacagaacggattcaaaatttagaatattttattttctctttaccaaatttaccgtacccaatgtcacagatacagtaccgtacatcggcataaattttcgggattcattttggaggaaagtcactcaaaaacttcaaaaacttaaaagatatttgaagtttttatcaaattatattttaattgaaattcactaattcattcaatttgttttcgtagagctgaaaatcaaatcggccgtttcgagactaagggccgactcattgttttgccatcggagaagcagaagaaagcgcctattttccgccagccgttgacggacaaaacgcaaatcgaaggggccaccgttgtttttgaagtgaccgtagaagcggagccgcccccgacgttccggtggactctgaacggcacggaactgagagcggacgcggctgggggaagggtaagtgacaaattggcattttgactagcattaattatcccatcagcaggtccgtgtgcgtgagtttgagggcagttccaaattggagttggaccaatgcaatttggcggacggcggagtgatcgaatgcaccgcgtccaacgcggagggcaacgcggtgactaacgcacgtttcaatgtccagcgaaagtcaaagcgcctgtgttagacgtaaagccgcgcaca

SEQ ID NO: 8225 - DNA, 1155 bp, Heterodera glycines
attttcgattgtatacgtcatacttgtatatgcttctttaacaacagtgtcgtcattattcactacattttttctttttattttttggcgtttcgtctccgtctgctaatgcacattggcgttgtgcacaacgttttttccacaattttcgcgcggtctggcaaatctttgcacgggtcgtctgcccgttttcgcgattcctccatcagaaggtcgatctgtgaggaaagtccatggtttaataatgcaaaacagttttgattttgtaaaaaactaagggataaagcaaaaataaagcctcttcttcttattctaagcgcatttaccggtcacgcttattattcattaccgcaatgtttgtgaacagtttgttctcctggacggacaccactttgtatgtgcctttgattgtgttcaggccgtccaacggcattcgcttcaccgccgagtcgagcaaacgttgccggcactcttcgctaaaaataattgcgtcaattatgaatatcaattaaccaaatcactgactttccgattgtgtttgttgtgtcgttgacacctttggccagttcaaggcttgtgtagaagcccaactcaggcgcactcagctctcttttacgctcgtccgggtagccaacactcagaattcttcaattaaataacatataacgaaaatataacgcaacagaacccgcatttaatccgaaatctgtccgggtatccgtctcggaaatccgggtcctgaccctggctttttcaagatttcgagttcgaattattattattattttaaatagccaataaattataaatatgtcttacttatatttaaagataattaagctaccaattaaacataaaggctaaatttgactaatttttaagcccatgtggttttttgactttggaattataaagttgcaaaaattaaaagtgataaaaagcttttgtcattctttgcgaatttacctgttgaacatgtcaacatcttcgtcaccccatccccagaacagattggagtagccgttgacccgctgatattgttccggggtgaagccggacacttcgccaaagttgttgtccggaagaggacttaattaataattataaaatgcaattaattatttcgtttaataagattttggatttgtttttaaa

SEQ ID NO: 8226 - DNA, 5343 bp, Heterodera glycines
  unsure (1)..(5343): unsure at all n locations
tgaattttaaattatttttccaattttcatatttttaggggtaagtttctctattattanaataaatatatgattaataaaataaattacgcgtaattattctcgtcaaaacgtcggaaaaagtngggttggatggtccttgaagcagcggtacaaattgtgatcatgttcaggcaccaaatctacgtcgtgaagaatgatgcagtcccatttgcccgaatttgttatttcgacaaaaccggctaaataatttattgaaattttcaataatttaatagaaaaatttcagcaaaattactatgtttttatttttcggattcttatcaacaaaaaaaaaaaaatattgctgaatctatttaatctctgcgtttaatttcccgagaaaaattataaatcaatccaatttttattttattttttaaataaaataattaatcttttatttatattttatactgttgcacaccgttaatcagtttagctttgttgaacttgtccacccgctttccaacgggaaacgcctgttccaccacaaaaatacggaaatgagcttgctgacgctgtaagaacgggatcagattggccagcagacctcgcaaatgctcggctcgattcctgaaagtatcacataattttaattttttaaatattataccgtgtttcttctattatagcctcctccctcaattaaaccactcctctgggaggcttagaaaagaccccctctggggctctattagaagaaatacggtagcttttttgttttttaattattttttgttttgggatggttttggcgctgacttatatccgaaaaatccgcaaaaaagaaaggttttgtaccggtttgctaattttttcgtctttttccatttgtagcgtttaacgaacatttcatcgtgctgtatgtcgtactgtacctgtacggtatcatgatggccactttttgctgtgcaatgcatgtgcgcggcttccactccccgcctttggccatttcgggatgttcacgttcagtgtcggccagcatttgcatctttttgtcgggcaattggcgcccgattaatgtgggcggaacttcagggcataacggaagaggttcagcgacagaaaatggacaaattaaaagtgccaaaataatgacaaaatggtcaacaaacattctgaaaatgggaattcatttgttgtaagataataaaataaaataaatacaaataaataaatcgaaggaaataaatcattcggagacatctcatcacgggcactactcatcacacaatttgattctttattttaatgatcaaaaattctattaaaattattgctgtttttctaatcacctgggaatttagaataaattaaatttcataataataaaaaaattgaattaggttatcaactattttacattgactactattttacttaaatacttgggaattaatttactacagtttaatattaaaataatgtaaattgcaatgagattttttcgaaccgttcaagggtaattaatcagtttttattttatcagtagcatcgccaacttaccgaaaaaataataattttgctggtgtaatcgtaccaaaaacaaaaccaccatcatgttactaataaaaaattcactatttaatcaagttaataattaaatgataaaaaatttcagtttgttttgacttaacaaaaaaaaaagtttctctctagcaattcgcgaactttcaattaaagataattagtaactcttcttcatgttaatgatgttcaccaaatgaaaattaattagttaactaattaagggaaatctatgtaataaaagtgttcaaaatattatgcaccaataaatggtgaccaccaataatattgtgcttcggaaaatattccaaatggatgattttcacaacgcatacatacatttgtgtgtggtggtgttgtgcagcagtagtggaagaaagtaaagaaggacgaagatgggaattgggaggaagaggagggaatgggcggggggtgattaattaattagctaattactttcactaattaattagaataatgatgattgtggtggtgctggtgatggtatgatgtggtggtatgaaaagcttgattctctctgctttcgctgttctgtccgttcttccgtctcagcagcaacagcatcagcaggtggttgctccccaggcgaaccgcgacggtcggcggacagtgcgcgggcgggggcggttttatgtgcccaaattcagcattgtttctctcccacactgtcataattcgtcgcgtcgtcgtcttgcgcaaaaagtcggtcaaggatgatgaagcaaaatgataaataataaataaaacgtaccacaacacaacccaaaggatgcaggcagagcaattaattaattaattaattagtgaattattattattattacaacgcaaaataagttgtattagtattattattcgtattatttacaatgttatttttagaaatttaaatttgtaagaatataaaataaacaaaaaacctgtccaattcatttgttttttattttgaacatttacataaaaattaaatggataaattggatttattccttttaacgtgcagcttttaaagcagagttcaaacctcaaaactaaacataaaacaataatttgaaattgaattcattttaaaagtaaattcctatgtgattagaaaaacagcaattcaattaaactcaacaaacttataatgtgtaatttatcagaaaaaaaattttataaataaaaattattaaattctttagccggctttgtcgagataacaattctggaaaatgggaattcattattcttcatgacgttgacttggtgccggaacatgaccacaatttgtaccgctgcttcattttcccacgttttgacgaggaaaaaaaaactaaaaatcgaaaaagaattaagaaattttttaaatacaacattaaaattccaaaaaaagattgaataggctccaagtttttcactagcggttggatttttcctggtaaaaaaacttgaaacttcaaaaaaacacagatgaatacatttgaatatcatttaccaaaaaagctgggctctaatgcactttatgagtccaatcgagttttatgagtccaatcagaatatatgagtccaatcaaatatttatgagtcctatgacaatttatgagtccaatgattttttaataaaagtttgagtccaatttttatttttcaaactgtcagcctaaaattgaaatacacaatgtaaagccacaattatagtggatattggtatcgaatttcttccagaatattttggaaaattttttcatttccatggaaccgacggaacatatactgataaagataggttggtaacaaacatgtcagagttagttccgtgcaagcgtcgcaatccatttttgagtgctctccatgtcgcctcaatgccttgagtgtgcactcttgggtcattgggatcaacgaagtacatccgatgatttacccaacgatggtcgtattgctgttgcatgttatttatccctccataagcagcccatccgtcacttattataattgagttagcttcaatgttatcagctattataggcaggagagtgtcggcatctctacgctgtacgttgaagaatctaactttgttagtgcccctttctaatagaccaaaaacccaatcgtaggctctatttatcattctccccctgttatattttgctctaaaaaatttgctttcatcgatttccacaacaaggccttgaccactcagccgctcttctgcttgctgtctttctgcccacacttggcaaagatctctataaaagttataaaaatctatgatcgtatgcattgaatgttagtttcacgcatgacagtttctaggttactactagggtgactagcccagaaatagccaattcgcaaaattttgtggaaagaaagatgagataaagaaaagaaggacccaaaacggacagaaaagcggctggcagtttcactgtcagggtcatccctgcggcatttattacagcgccactaaatttttttattaaattcatttatgcgttaaatttcaattaccgtataccgttattttttggtttttcgaattacggtagtcaaaataagcgatgcaacttccattaagcgtttcaggtgattggtaattattgggagagattacggtaattggtgcgaccaggaaaatgaagaaaaaaagcatttttatttaaatgtaacttttgtcaaaagaaacatgctttaaataagcaaaaactcttcgtattttaatcgcttagtgtaaacaaacgactttattttcttgtcagttccaatttttaaaacattttttaacataacgtgagatcgccaacttcagttttatctaaagaacaaacacaatgtcttctagcgcatgcgcaaacaaagtgaacttttttatttattcatcttattgtggaatgaaaaaatctcctaagttgaataaaattgtaaaatgtactttattcacaaattttagctgacccacaaaatgtccagcccacgaaatgtccaagtctcgaatttgagttttttattattcagatgggcctaaggttaggcaaggggtaatataaagggtatattcgtattcagcgactccgaaaaccctaaaaatcctaaattagactcattttgtttttataaattttgaaaaattttggacatttcgtggcttggacactttgtggtggcgcccaaatttttgatcggactcataaactctgactggacttacaaaaaaatgattggactcataaagggtcattggactcataaatatttgattggactcaaaaactctgattggactcataaaactcgattggactcataaaactcgattggaactcataaagtgcattagagnccgatttttcagagtaccaatcatcaaacatggatcagcgcttgtaccattttaatgactggcattatttacttaattgttggcattttaataatggccaaatcggcaggttagaaattttctaatcacaaaaaacaattcataatttaatgtttttaggtatgccaactgctgatcagaggaatcgccgtgtgttccgatcacttttttggatcatcgccgtgaatattggtggtattgtattcatacaatatgtaccgcactgatcagcccactgatcaaatcaccgatcaccacttggtttttcctatttgcttagaatggcacaaaataatgagaaaaaatacttatatgtaaaaaaaatcgggtactgaagtgtccacttcttttaattaaattttcaagattttttctagagttgagcgggaccg

SEQ ID NO: 8227 - DNA, 5402 bp, Heterodera glycines
aagaccctttcactgaccacccccttgtacaggtatgggttgggatttaaattggtggaggttcgattagcgaaatcgcattttttaaaaaatctaaaatttactaaagtaagaaatttgaaacttaaaagggttttacaatgaaattctgagtttctcatttgctaataaaagcacataaacaaaaaagtaaaagcaaaatttccacctttggttttgttagtctctcatggcaattgtctattttccttagtcattgttcgaatagcccccccccccccccccttaggccgtttccttcaaatggccaccgttttgcggtcgtccgctgaactctccgtcgagtcgattgtcgctttgttcaattgttacgtccattcggtaaatttttcactttgcgtttttcctatcgctcattcctctccattttgtttttctcttcagattttcacatttttttgctcggattttgatgcacagcaacaacagcaaatgttcggcaccaatttcgtcacttttcgcctccgccaatttgtgcaatcaatcgaaaagaaaatgaatggcccgggggcgacagagggtgggcaagacagtgtggaaaatgcggaggtgacagacacacagaaacaaaccaattattacaaatatggcacatgccaacgttttagctttcgttgttttgccgtcggtcgtcgctttgccacgcgttggacagaaacgactcggacaaattgtttttgctcgtcgaaagaattgttggcgttgagtcagtgtatgttttcctttctgttcttttgatttttatgcatcaaaatttggatgctttccgcagtgtttttctcgccaaacaaatggaattgcttcggcctttcctcgaggcgcttttgccaaaaagcggcggaggcagcgacagcaatttgtccttggactccttctatcgtgtttgtttgatttaaacgtttatactagagctcgattggacctggacccactcctgggtttttcctggacctggttttttgctcaagtccaacattgaatccaggtccaggcccattttatgccacaaatttgtttttcccccatatgcattttaccccattttcagtcccttgcggcggtgttcgatttgggcgacgcttcgtttggctgtgtggcggccaaaattatactctttcagtcaattctgaagcaaatttcggcgaccgattggacaaccggggaaatccattcgcaacattcgccttatgtggacacaattgtccaagtgaatggggaaaacagaggggggtgggggtgaatattggcaaaaaagcaaaggaaaaaatggccaaaataacaattgtcagccttttccataaggtgttttactggtgttcctttttaggaatgttcgcaattcaaacaaaagttcgtccgccttttcccctacgttcacatttccgacgaattgtacgccgccatttggtccatgcttttgctgtgcattttccgtattttggtccaggggtacgcggacgcccaatttgtttcagtggcaccattgacaaaaacgtaattttttaggtacgccgacgtaaaaaagtgcagcattgagggaagagcactgcaactgttggatgtcgagcaattatgtggggaattggaggagatcaccggactgaggcaatttcacaatcatccctttattttagtgtaaattcccgaaattaggcctcttccccaccgaccgttcgtcgaaaatttcgtcaaagcattttatttgccgtttggagagcttcaaaattggatggtgaatcatacagtgagtggagaaaaaatagggattttaattgggattcttaacaaattcaaggagtacagcctaagccaaacgagcgcaattttaaatgcagcggctggggcggcggcgaacagctcgtcctccgtcgcgacgaactccagaaaagcgaccatgtcgcgcatcatggccaatctgttggacgcgagcggaattggggaaggcggcaactctcttttccaatgaataattccaatttattgtttaatttcacatcatttcaatccctttcatcttcgcatttaataagtcacgcaaaagaacactcacattttgtaattctaacaaatcccagttttgtttgtatatattgaatgttgttaattgtgataaaaaaaggcttaaatttaaatttgtcgaatggttgtattagtcgaaattgcctcacaaaaacaaacatatattcgaacgaaagaatcaaccaacaattatttatgggataaatgagcatcaaataaattgttacggtcggtccaaataagtttcgttgctttgacccgctttcgccgtccgttcattttcgcttcaaattattattgcgtttcgcctaaaaaacggttcagagaatataagaaaacaaaatatggctaatcaccgtcatgttcagcgccaagcgaccaacggccttgaaaaaggccggcgccaacacattgtgcaacagcgcgtgcacccgtccgtcgatgaacacttgggcatggcggaaatggccgctgtagcgtgaatatgtccaaatgccaagcgcgacaaaaatcagcgtgaggaagagggagaaaatggaggcgatggtgtcgaggccgagcagttggaaaaatagttgacctgaaaaatgggcatttcaccgaattcaggcccaatcagtggaggagtgaatgtaaacttatgggccttcggaataccaattttaaatatttcattaatctacgagaattaattttggacataaacaactgcgcagggaaagcaaaacgaacagcagtaaagggcaatcatcgaagcgacgagcacggcgggcgtacgcacaagatgtacagtttttgagttgtttgcatgctcaaacgattcaaatgcctcctgaaagtcacagaaagcgaattaacaaaaatagcgcaaattttagcagtttaatatttcaatggaaaaatttgaaagcccaccgtgatgtcctgcttcaatttttgtgcgaattgcttcgccaactcgggaccgcccattttcttcgccgttttgaagatgcgcatcgcctgttccttgcaccgctcgtgctctgctcgcagttccgcgccgctcataaagggcgagtcgccaccgcacgactgaatttgtttgagttcgaataagtgggaagggggggggggggagttgtgtgaatttattgcatggaacccatgaacccaatgtcatgtcaaaaataattggctttttcggtatgatttgccctcaacaatcattcaaatgctacaaaaaaactcacttcttccatctccctcatatacaccgcctttgcgctctccacggcctcgtaatgattggtcttagcggtgacctaaaaaaaacaaaagcaattggcagtcataaggagggaaagcattaattagccttttcactaatcactcgggtcaataacaacacaggaatgaatgttctttccacttacatcgtaaatggtttgcggattgggcatttcagccttgctgaacacctcgaaataagcctgaaatttgaacttaaatattttaattgacgcgaaaaagggcacatttatgtagccggcaagctctcggcaagtgatgggctgaccgccaatttgtttgacgaccaaattgttggggtagaacacatagttcgcaagtgaacggagctgtgccttgaagtcggggtcgatttctaaagggaaaaccgaaatgctttgaattcagtggacaaacaaaaagataaaacaataaacaaactgtcaagtttgcctcggtagtgcaggtttgtggcaacttcgcggccggggtgaggcagcaaaaagcagcgaatgttgtcgaaagacgagcgaatgtgaaggcgcagctgctgatgttccgggtgttgacggcgcgtaacctggcaaaaacaaatacatttaacaaatcaatggataagccgagaataaatgggggcacaggaattgattttacgaagaatcctagctaatggaaaatattttaaattttgagatggaatggaagaatataagaaaatcttcaatttatgcatgagattcatgatacattcatctgattgagtaccttcaatcgtttgtcaagaatgcgttggccaccgattgagccgtactccgcgtcatcaggcacactccagtcacggacaaggaacaaaagcgactgaaattgatgagagaaagggtcaaccaacaaaaaagagcattgcctggaacggtttgctgttgttgtcctcgtccagcgccagtcgggcgtactctgtgaacagttgcaagtgctgcagatcgttctcctggatgttcttgttgatgttgaaaatctgggaaccaaatgaatggaaaaacggatggaattccttaaattttattcaaaaattcttttcagtttaaaacctgaacagaggaaaccatcgtggacaacgcgaaaacggtggagcactttttgaccgtcgtatccatgtcgaaaatgccttgtgtgtccatgaggaggacaacaacctgaaaaatcatcataataaagacagaccaatgaatttctagggaattaaattggggcgtgaattgttccgccaaatctaacccctcctgccaaaacctgctctccgttgcggtcttcgagtaggaaaggctctggccaaatcagaattccgttggtgtcccggtcgtcgccgcctcgccaactgaatccccccaacgtcgattccatttccaaccaatctactgttctgtcagcaacaggtgctgagtgccaacgcaaataacgcagaaaaaagtttaaaataaacgattttccggtgcggtaggcgcccgccacgctgactacacacacctaaaaggaaaacatagtaaccacatttatatggcaaaaaaccaaacaaaaacgaatatgacattcatttggcctgttccgaatcccagccaaatttgagattgtatttatcgagttatccgtaaatagatattttcggcatttgttccaagtttaagaagtgaaattcggaatagggctaaaataaatgctatgtttgtgtttagccatatagttttcacctttttaatgattttttgccgaaaaatagagctcatcgacattttaccaaaatttgtaaaaaaaagttgggataaattattaatgaaaaaattccattaagtcagagtcactttaattgaaaaatattttggacctttttgtcagcgtagcgcgggtcgtccaatatgcgcttaatcgcttccgaattgatgacaaattcgttgaccaggagttcctcttctctttgctgattctcatcatctgagcccacaacgtcttcattaggcggaacagtgacagttgccggctcaattatttgaatgggtgca

SEQ ID NO: 8228 - DNA, 1494 bp, Heterodera glycines
aatgcttgtgctcaccgactgtggctgagcagttgcttcttgaaagtggtgatcagctgaacacgttgcgtggggttcagcgagtacacggagaactgaacagaacacaaaaataaaggggatggtagcagttttttttattttggacctcgaaatgccatatgtttatggaaatgaaaagttaaattttgaattcccattgggaggaccttttccaaatgttcaacaagttcgggatgttgttgtgcaaaaatgaacccgtcgtcctcatagcagtgcatttggccgcgcatttggcgccggcactttgtgtagaagccggcggtgagcagcaaaagtcggaccacttcgctcaggtccaaatagtcgcggctcaactcccacacactggcacctgaccttgttttttaagaaataacaacggcaatgtttttagaaatttttcgttttaaaaaacaatttttgagacccaaatcgcttataattttctgatttccaatttcttaagtgcttcacaattatgtatttgatgacaattggttaatataatttgtcgagaaaaaaaaatctgtttggggattttgtgaaaaatttaccaagaaataaaaaactatgctaacaaaccgtgcaatttgaattggcgctggcattcgcgattgatctgccgaatgcgctcgccatgcatcggatggtcaaagtccttcaacgcctcgttgccaacatggtcaggattggtcagatcggctgaaaacattttggtcattcaaaatatttatttattaatccaaatcttgcattaccaaaatattgaacacacacaaaaattagggagtctaaaataaggaatggaataatcacccgcatttccgtcgtcctgtatgatgcactctctcaatgtgttcagcagcgtgtccaacagacggtagaagcgcgaattttcgttgatttggcgtgaaactgtgaaaaaaatgcatattactaacataaatatgtcatgcaatttctgtttctttggcccatctaccggtgaaaaagttcccgaattttaaaaatatgtttggccaactttttgaaaattgaaaaataacgatttaaaaaacacacccaaagcggtcgcaatttggggcacactgaacgcggcagagacgggcatccgctggtcgtccatgatcagcagcggggcgaacgagtggcagaagctggagatggccaggatgtcccagtagtgttcccggggcacccaatcgggccaacacaacgctttgaagtcgggaaaaggctaaaatatgtggaaaaagatccataaaaagcagacgcacaagtcagcccaagggcatagccaggggtgggggggggggttgaaatgggtaaatttcttgaaattttaagcaattcaaaaatcacacccaaatttgtaaaaaatgggtcacaaggcaaaaaaaaagaaggtctttttttggcgaaaacactataacttcctgtaaaccccccccc

SEQ ID NO: 8229 - DNA, 2122 bp, Heterodera glycines
tttttggcgaaaacactataacttcctgtaaacccccccccctaattcggaaattaaaaaaaatacacccataaaaatcaaattttgaattcagcccaacgcccccctcccgaagccaagtgtttgactgcgccgttgagtcagccacatttccagttcggcaacgcttttcaaggtatttaaaagtcaaaatttggcactatttttcggcgtgccccggttggtctccgcctctcccaccccatcgtcttccctcacttttaggtcctcgcacaacaaatcgtcacggggcttccgccactcggccaacgcctcgcgctccctccgctgccgctccaactgccgcttccgttccgtctccttcgccgcttggatggcctcgcgcagtgcgccgatgtgcgcttcatggagcagtcgacgcgactgccgccacctgcggcagaagagcaaaagttaagaaaagagcacaaaacgaattgaaaaaaaactgggaggccctacagtgtaacaagaggctaatagaattaaaaaataagaaaattccaaaatatttttttcgcgggctctgtcatccatatattgcgcaaaaagtcgtcacttaagttctggaccgattttaggacaagcccaaaaattgtattgaaaaattgagcaaaaatggatcaaaaaccaaaaaaaccctaagtttaggcaacttccaagtgggaggccaacgctttggcccacctgtccatctgttcaacgccggccttttccgcttgacgaaacaacggctccaactgttgctgttgctcgtggatttgctaaaaaagattaggcattttttctaaacaattgcactcgaatcaaagttcggaaaaacgggacatttgatcctggaaatatggaagcaattccctgattctgataatcccattattaaaatgcggagggcaaatgccacggtctgacaaataatcgaaaaaagggtggcaatttgcgtcgtccgtctcaccctttttttgcgggccgcctcctccgccgccgccgctttgctggcgccggtcggcgaaagggtcgcctttttgcacttcgccgtctcctcccttttcttccgcctcttctaaacgggggaaaatatttaataaaatacgggtttcatccagactagaaagaggggaccgattttggggtttcaatgcccaaatttggtggctcataatgagcatttgaggtaccatggaaagaatccatcggtttaggacgcaacaaaattaattacccatttaattaaaatgatttgaagcaaaaaaaatcaattgaatttgcttagaaaacagaacctaccaggcaacatggccaagaaaaggtgtaaaatacagaggaatgtaaatttaagcgtaaaaccaacgattgcatcggtttcggactgcaaagcctcgtcatatgtcaggccagtccgtcccgtcactgaacagcgccaacagctcgaattcagctgaatcatccgctcaaaatagtcactgaaattgggaaatgctcaaaaaactaatcgaaatgcaaaaactttcaaccaaatcctcatttttctttgtaccaaaatttcaaaaaattaatttggtgcccaattcccgtaacatcaaagtcaaaatttcattttaataagtaaatctatgccaacaaaaaaaaaggtttgtactcgtagtccaggaacacttcgttggtggaggacagatagaacacttccgtgttcgggagcagtccgtcgggaatgggcctaattcgttggaattctttgttcagcgtggttggcatttgtcagttaaaagttaagccaaacatttgtagagatttgctgaaaatttaattatgaaaaaaggaattaaaattgcaaactaaaagtccaattcaaggcaatcattaagaattggtgtcccgacgaaaaaatttttaaaaatttgtcgggtattttttctaggcttaaaaaaagcgctgatcacgaatctgagctcagattttgaaaatcattgatttttatctaagattttttgtcaactacttgatttttttcgatttttaaagttatttttttaaaagtttagcaatgaatttgggttaaaaaatactctgatcatgaatctaa

SEQ ID NO: 8230 - DNA, 1117 bp, Heterodera glycines
cgaaaaaaccaccacccgtttggtggaaaaactttctttgcacccatctcagttctaactcttgctaattttcttacaaaatttgcgtatggtaaaagtctatatttttgtctcttcgtgagcgggaagtacccctttaatatattataactaatttcaattaataatccaatttgctcactagtagcctctttaaatatttgttgtctctttttaaaagatattgtttttgtccaattcaatatgcacagcttccgatggaaaacgactcgtttaccaagaaagtttgcatgtgtggttaagtggtttttggaagatagtaaagggaaaggggcggaggttcgagtccgcctcattgacattaaatttccaaaaaaaattttgatcctaggaattttgattccctgtacacaccgtttcaaaaaacgagatgtgtgccaataaatagagagtgcagagaaaaaaacatctctcattttggcgtactatttatttatctctgttattagagaaaaacggaatttacttcgccacatataactttttttctactcatacaatttacaccaaattttgcatatcgatagagaaaaagaaaattaacaaaatttcagtgatttggttaagaatttcggcctagaacattgctaaattgttaatttagattttcgaacgctcttatcttttttctaaatcgttaaatcgcttaacatttgcttagaaaaagcttctccccatcaagggctttcgaatgatgtcaagattgtacaatatggttggcaaaaacctttaaaaataattcccaaaattcgtaattttttaatattttggacaaaaataaataaaaatattcatgtagcacatcggactcgaacctccaccccttgtccctttacaatcttacaaaaaccacttcgccacacatgcaaatcttttttttttttttattcagaagaaataaaatatccaacgaaggggtgaccacttacacgttagattttagtaaattaatatcaagtccaaggagctcttttacagactgaatttttgtttaactcaatcaatttatttatacgttatttgaaactgtcaacagatggagcatctgttatatctt

SEQ ID NO: 8231 - DNA, 4905 bp, Heterodera glycines
ttctttcttttttaccatccatgatcggtcttcaatttttaatgaaatccttgagaaagttcaagtgattccttttatataattttcggaaaatttgctcaacaatcatttgaagcattgaacgtgtgtctcatgcttacaataaggccgtccacatacactcgcattcaaattgacaaatgctttcctccgaccgatcacttctttctgtgtgcgttcccccctcttttcacattccctccattctgctgctgctgctgcttctgtctttcctctccctccgccgtttgaaggattgatacgtttaagcatcttccaaaccgtcccttggggggtcgtctaattcgacgcgatgattgatgatgcgattttgcgagtagaaaaagggtgggcttggttctgtccgtcgtactgattgattgtcccgggctgtccgtctgtcagccaattcctttctttagttggaaagggcggtaatgcctttgaggaaaagtaaagggaaaattacggggcaaaagggggggggagtgattgagcaaataaagccattcagagggagtaaacaaatccaaagcaattagcaaaaaaaaggaaacggaagtcgcgccggggaattcaaagaaataaattcaatttccatttgggccattgcgtcgcttcttttgttgtttttttcacttttatttttactaatcaacagcagcttgcacttgtttatttcttattaattggtagatgcatgtaatcattatccggaagctgcgtatttaagcgccgcactctttcttttctttctctccctctctctctctccctctctctcttctctctctctctctcttctctctctctctctcttctctctctctctctgcctccctctctctcttctctctctctctcttctctctctctctcttttctctctctctctctattctctctctctcttttctctctctctctcttttctctctctctctcttatctctctctctctattctctctctctctcttttctctctctctctcttttctctcctctctcttttctctctctctctcttttctctctctctctcttttctctctctctctctctcttttctctcttttctctctctctctcttttctctctctctctcttttctctctctctcttttctctctctctctctcttttctctcttttctctctctcttttctctctctctctctcttttctctcttcccttctcatttcccttttctgcacctgtcatttccaaccatcccaagcaaataaacaaaatgttttttaaaaatgggcctttattttaattttgtttttttccccaattttttcccagacctatcaaaaagtttgtggtgaagtggttttttctgtcacagtgccaaatccgtcactttcaattcgatgccacactcattgcgtgccaaaatgccatcttccaattccaatgccattttcaggggaattgggcaaaagatggaataatccgccgagaattttaccgttaataaactctgagaaaaatgtatgtaaaaacatgttgtgcactttgtgattattcttatttgtccgccgtgggaattttactatgccccgggggttaatttgctgtacattcattttcacagcaaaagtgccatttaatttacagtcgcccagtaaatttgcattctttaggcacatttccagggatgcaattagcatttggtggggtcgtcctttgtccccccgcccccggaggaaagtggagcattagttggcattaaaagtggtcacccaatggaactttccactcatttatcatgccaaatgatggaaaatgatgacgaaatgccatttgaaagcgacgaaatggccaaaaaagggcaataaaagcgaaaatgagtgtattcactgataaggaatgctaattctgaacagtttatggtaatgcaagtgattgagtgactttcttttggtcctttcgattttgcctttggcaatttcccccatttccctcattttggcacttttttcatttttcttaaatattttttattgctaaattgatgtaagccttttcagtcttggccaaagattgctgtgccgaatgtccaaatcatatgccaaagtgtctttggcaaatgcccccccgccctttgagtgtgccaaactcccccccccctttttgctattgttttggtttttcctccgtcgagtgccatcatttggcacacattcggctctctgtagaagatggcgatgcttttccctttcggtcttattttttctttttttgttttgtttaatatccgtccatttcccccgccggggaaaagcgaccgacggaaagggaaaagcgacgcatcccccgggggaattaagcgataaaataataatgataatgagttcataatggtgggatgacagaagagaagagaacgacggacaaatgggcaaaagaaaatggtaggacaaacggtgaaagagcatttcaaaccatttccaaatggtttcaaatcatttaaattgccaatcgctttttcccattgtgaaaattgggcgggaattgaataataatttgaaaataacggaacaataagcaattaattcattccttaatagcaatagttgtccccacctcatgtaaagaattttacacacaaagaatgtttaattgctttaaattgaggaaataaattttcctaggaaatgtcaaaggtaaaaagagagttaatttccttttccaggcttttgtctgtttaattgcccaaattccttttgaattttgcttcctccatctttctttttgtgttcgccctgtgccatttgccccctttcattttattttactccaatttttgtcaatttaagtgccatttttttccgtctttccctccccccaaatttcgtgcaatggcgcgtaaaatctgatcatttttgcgtctcaaattatccaagatggaccttctgctgattctctgctgtttgggcggctcccctttcatcgatttcgaaagtgccacccgaaatcctccgccggcgccgtttgaccaccaatgggaccccaccgattgggtggccaccgatctgtcaggtgaaaaggggcaaagtccgcccaatcggtcggtcactcattcagttgatcagcgattgatttggcatcccgatcaatcaaatttcggctttttattccaacttatgtttttccccacctttcttcccaggctctcttctgaatgcctcgctcagttcctctctgatcacttcctttccccaacttcgtcttctgatccctgccgatttgcctcctcaactttcgctcgagcagtgcgacctttggaatttgacatttgcatcaaaggcggacgaaaatgtgttcagacgaagtcgggggaagctcaagtgcaggtgaagcgaaggacgaaaaacgaacgaaagatggcaaaaggaaaagcatttaaaattaggaaaattagtgccgactttaatgctaatcattaattgaacattttcctctctctccctcttcgtctctctctcactcttttttttctgcttctcccctccgctttgatcttttctttcccatctctccccttcccgcttctcttacgcccgtttgacttggcccacgtctcaacaagagtaagctttcacattctttgccaaatcttgcggctgtcatctgtgctttatccttccttatttctcgcttctctctctctctctcgctttcgctcgctctctttgttttccctttctctcacccgctctctttctgtgcccgtctctcaatgcttggccaatcgcctcgggcattacactcaacgcatttcatcactttatttcccggacttcaacttcgtatgaaaagcattcccaaagagtcgcactttggaatttgttgtcacttttactttgttttgaaccctttacaaattcaatcaaaattaatattttatttttaaatataatttttattgccatttccccctttttccccattttaaatgccaatgccattcctcaatttccttttttttgcttcctcaggtgccctcccggcttttccggctccgtctgtcagtatccgccgctttcctccgacccatttgtctcgcgccttccgtccatggcaccgtccaatgcttccgctgcgtcccccgcggcattgcctttgtttttcaccgccggcgcctccgctgcgatggcattggaatcgcagcagcaacaaaaggcggcggcacattctgtggtcggaatttctcgcaacgaaaactccttcgcgctttacctgctcatttttctgctgctcgccgttgcaatttcctcactttttgcggtaattttaattgccattggcaatgaattaattggtgccgagcctatcgagtcgacaattcccccccccccctcctccccatggtttgttaccgttcttctgctgctgttttctcatacctttttttgccctctgttttttacctttctttttgtcctccgcccccatttcttcaaatttcgctcatttcacccccccccaaagtaccaaaagctctccttccattcaaaattccagttattactactggattgactatccatcactcttccagagtgatttggactaaaatcttctatttgttcatagctgtacatagtataatgtcccgcttatgaacaaaataaccacttacagtcattctatttgtttgacactttgagttatttctggcattataaaaagcctaaagagtgtgtgagattgatgtattgcaatcacattttgtctaataatgtattccttcaagtgcatttaatttcgccaagataattaccataatttgtctatcacacataacagaattgtgctcccgtttaacctctgttacacccagatatgttca

SEQ ID NO: 8232 - DNA, 2391 bp, Heterodera glycines
gaattagatgggaaatgtagtccctttgaccttgtccccgctttttcagcaacaaaattcgtatgcctcggccacctcttcaacggcaccggcaaatggcaccggcggcgccctttggttggactcgcgccgtccgctgatcccttcggtcagcgaatgtgtgcagcaacagcgccgcggcgtccctctgccgccttcgtccgcgcctccccggcagtgctcgccgcccccctcctatcggtcgctgaacaacagtttggaacgcctgtcggagcacaccaaaatgtgatgagcgtcgaacagaaaagtgaaatgtcacgacaattttaattatgccaacgacgatcatttgaaacattgccctgtacatctcatcatttgaagttgtaaaacggaaaagcacaaccaaaattaaagtggaaattcatttcaattgccaaaccgagggattggacattgcgtaacaatgggggcatcgcaattctcagaaatccgatgaaggcaaagtcaattaattaattgcaagcaaatcagctgatttcgctgatttgtcatgcttttccgtgcaattattcttccattttcctgtctctagtcatttcccacttttctcactttttatcattttatttttttgtatatgtaaatttatgtttaatttgttatcgaatttcttattttttaaaatcaattatcccatttttattcatttatttatattaaatttaaaattaaaattctataaatccttgtattttcgattggccaagtaattttaagaaagatttgggcaattaattaacaaatgaggcaatatgacaagaattcaccattaaattttaggatatattcggagaaacaagacgggaattactatcgcagttttgtaactaattttcgcttaataaatcaatttggaccataaaaaataaactcaaaaaatggatttattagtttgttctaatttgagtccgggattgagaattaactgagatggatgttctcatgtacataatgataagtttagcattttgattgaaagcagcagccaaataaaaaaacattacagaaaaggtactgattaatatttttgaatttgcgcacaaattacataacttggcgttatgaatagttatgtttaagcggatccaaagtgattcatcaaagaacattcttggaaataaggatgttttccatctttcaaaagtttatatttcaaggacgagtatgccaaaatatggaggtgattcgtcgagcatttattttcatattttagtttattattttttatcgcgaaaaattgcttggacttaaaaaatggagcaaattatggaacacaacatcgacccgcccgttcaacaggtgttgtgttgttttgtttttgtgtgttccatttctgttattcattgtctctcagatccttcgcactcccttcgccaaattatgcatgaattcggtgttttatccgatgaatttcgcccgcattctcatccaattgggacacgacccgttccctctcagcaggggcaagaaacggattttcttcgggccgccggtgtactttcagccgaacttcttcaaatacagtcagtatttaagaccaattcagttgcttttaccatttttcaatttttagttaaaaatatttggcaatcgcacggatggcccaccgtttacaccggaatcggcgcccatttggcccattccgtcgcgttcgacttgtgctacaaatacactgtgaatgtaagtgcatttcggttttgttataaaattgtttgtcttttttagcaattggacgaattttaccctgaattgggcggcagaatggacgaggaggacaagcagaagatggaaaacccgcgcgagttgggcactcatcagttgattcgggtcagagtccgccaggccatccgcgacacggtttcccattgcatttcgacggccattgtccaaccattttgggtacttttttgctttttctttccatccaattttttctgtcaggtgattatggtccgtcaaattgcgcagcacattggcaacgacaccaaatacgcgccaattgccctcctccaaccgttgcgtctcatcggtgacgaggagggaccctccggccttttctccggcctcattccccaattgattggcgtggtcttcttcgtttggggctctgctgttttgagcattgtcgttgaagaagtcatcaaatactcggtcagaaatgatggaattcgtcgtttgggggagaggaaaaaaccatcggataacgaaaaatcggcggacggtcatcaaaaatggtggcattaggtcaggagaaggaccaggacttggatgaccagcactagtaagggtacttcaccaatctccggtcgctgtccaaaatggtggact

SEQ ID NO: 8233 - DNA, 964 bp, Heterodera glycines
atattaaaataattttttttttaaatgccagttatacctttttaacaaaactttttataattaattgtaatacctaattgttatttatctatatattgacttttttttcttttatatgccatagacatgaaattttgaaatgaagttatttagttttttggatatgcattattataatttaaaataattaattcagaataaattttaatcgttaaattatcatggtgtcagaattctgttagtttggttttaggatattttttttttcatttcaaatattatctgacatatgacttgagctttgttcaaatattattttaattatttttttattatcaagccttagtttttttaaattatacgtctctataaatattccttagactattatttttatactttatttttggttgtttaatcttcttgcttaattatttataaaatgcattttcttatttttcggttttaaaatttgaataaatattatatttatatattttgaaaaatcgcgcgagtaatttattagtgatgctcgagaccaaaaatttcccgagactcgagactcgagaccgagactcgaccccgagaccgagactcgatcccgagactcgagaccgagacccaaaaccccgagaccgagcccaaaaaaacccgagacccgagactttttaaaaaatttttcttacacacttaaaaatcgaaaaaaatcaatcttttgagtttttttctcaaaaatttttgttttttttccttatttaagctaccatacatttttccttttcatatgattgacttttttacaccattttttgtggtgctctttttcaaaaaaatgtttcgggaacaggggtccggcggtgccgataggcgccgccgggaaaattttttaaaattttactgcaacttggtaacggattttgtccaaaaaatgaccaaattttgcgtctttgagctacttttttaa

SEQ ID NO: 8234 - DNA, 2295 bp, Heterodera glycines
ccgccggagaagaattttgaaatttttagtgcactttgttaatagatttagtccaaaaatgacatttttacgattttaattgttaaaattgtgtttgaactcccatcgaaaaaacattaattttgaaaaatgagaagaaaaaataatacttggaggggaactgatccaaagcaaaaatgaagacatgaccaagaacacaacccactgagccacgcacactattcacctttcttttatttgatattttaatatctaaacttttttaattttatgtgctatttttcattaaaagaaattaatacagattaatcattttaatgtttggaaaattagtctaaatatttaaaagtattccattaatttgccataatttgaaaaaatctttgttcacaactttatgatcatattacgcgaattttgtcaatattttattagttttttgcaattttatgtcaaatttcgcgatttttggtacatttttctcttttattttttacacgtttctatggccgataactcagtgcgttcttatcatttctcattgttttttcccaaaactcataataactgtttttttaataattatttagttgtttttcattccaaaaattcgcatgcgattttcatagccttgcgcgcctttatattgataaaataaaatttaacatggacaaaaatgaaaattaagccaatgtacataaattattatgcaatagaaatattagtaaaaaatatttgaataatgaatacaaaatatttttaaaaatatattaagttcagctccaaattttacttttaaaagaaatagaatgttaaaatttttaatttttgtcaaatattatttcatcgtaactgatatattctgttttaaaactagctaatgtaacgccgcttctcgctcaaagcattcttcttaaaacaattgttaaatctaataatgttttttaatttctaatttgaaggtcttaggttttagatttatatttatttattttataaagcttaattgtcagtattcagaatatcagttaaaatttttggttaatatttttctccaattaaaaagtccgcagcattaatatttaataattccccaattgttatataataaataaatgaaaattttaaatttagtcctatttattattaagaagctttaattcattttaaattaaaaaaaattatatacaatttcaatctattaacatgatcatcaagtggtaaataaattaaaaattataaaaaggaacatttatgttattgaattacaatataaaaaaattatttttattgatttcaatattacaatagaatgtgatatgtttttcctctttctgcgcttcttcgctccgggctccatgccgaggacttccgtttcaaagttcagcaaccacttggtgaaggtagccagtgggtcctcgacgaccttgcggcattccacgtccgtgtgccagaactcaaacggagaccaggcataagttcggaatcggccgcagagagcgcaggcccgctccagctcctggtcccaaatgcccttctcaatgcagcgggtgcatgtcacatgggcgaagcagaagttgacctttgtttttttttttaaattgtgtttgaattcaaaaaaataattacctggtgcttgaaccgcatgagttgcgggtcgggcttgaaatccgtagtgcactcaaagtcaaagaagacgaagcgcttctccttcttgactttaggccggtatggtatgtagcagtctcgcggggcatggaagccgagacaaattttgcagaatttttgaccgcaaacatgctctttttgttggtgatgctaaagagaaaattaataaaataaaaaaattttattttataataacccgaatttggtaaatcacgccacagtcgacgcatttcttcgagcttttacaaattgattttcccacaatttcatgttcgttgtcacgcttgaccctgtagtttgtacatttggcatggtgttcatagcattcacgacttttaaatgtctaaacaaaaaaattctttgaaacgaaactcaaataactttactttattgcaccccaagcaggtctcaaaaaagttgtcattgccttggacgcagtttcctcgaaaggcagacccaacacgcaggcagttgtggcatttccatttgcattttgctgtgtgttgcgtttgttgatgaaatggcatctcacactgtaacatatttatttaattacagtataaaatatattattatagatactccaaaacaatagttgcgggcactgaacagttttacaacattttt

SEQ ID NO: 8235 - DNA, 5978 bp, Heterodera glycines
gccggcgttcgcgttcatcattttgtaatgacataataaaatgttggggatattatgtgaacattaatctctatcgcttagcaaacccgtgagagcatttccgatatcccctcactttcctttgatttaataatggctttgttgtacattttacaacaagggctcagtgatcaatcgatcggaatgttcgcgtgttgtgtatttagcagggatggcattccgaggcctaaaaaattttccgggaatcggattccaaatcccctaaattttcggaaatcggaattccgtgccatccctggtatttagcatgaagcttttgcataaatttttttaatggaaaacggagaccagaagagcttttgaaaggagaagtacatagcaattcataacaaaatttaatgcgtgatacaattttttggctctatcgcacttttttaggcttccaatcgaattttaggcatccaatcaatgaccaacctcagtttcttaggccataacttttttctttcttggtcaatgcctacattcttggtttcaaaccaaagcttaaagtcccgaaaacataaatttaaaaaaagaaagcaaaaaatatatttattaggtttcaaaatttttggcaatttttttatgagtaacaaggttaaaggagagggagggggctggggcgtgtttgagtatcgatcaattctttttcgcaatgcgaaaacccaatttttagcccttcttcgtttctctccattttccatctttcaaaagacaaacaattcattaaaagctcttcttcagcagtcgctttggccaaaaaaaagagataaaacaattccatcaatataattaaaatgaatggaatcactgctggggattatggtgcgattggcggcacatatttttggttagagtcagcaagcagcttattttggagcaaattaaaaaagcttaacccgattttctattatttttttttgataaagatttgtttcctaaactttgtctgtgacatgcgaaaacaatttttagaaacaattttttcatcaaataaaaaattcaagaaaccaactttgtattttattaccaaaactctatataaaagccaggaagaaaactgtttgcttgctttggaatggccgaacaaatgacaaattaattaaaatttgcgttttttaattaattgttagtaattactaatcagtagggcgtccaaaaatatggatataaaatcgcgaaatatggccataaaatatggacaacgaatcgcaaaatatggacataaaattgcaatatggacataaatttttccaaatttaggctataatttctcaaaatttcttcaaattcgctaaatgcaaagtaaaacttaaatgcaacaacccaatcttttaaaaattcatggttcactccagcaaaaattatcagcaaaacgtactgcggcacacttgacaacatcgcctctctcaacaattccatcgaaacgacaacagtttcttgacggcgcggcgcaattggacatcacagcactgctaaccagcactgaagtgtcagagccagtccgtgcagtcattctccaactggacgcacttctcaagctcgcggtggacatggttcatgagacgtcgatccaggacactcgcgcggtactggaggaggaccggcgagaacattcggtcgttctgatgggcgttccggaatcggacagtggcctttcctctacacggcgcgcgattgctgaccaacagcaggtgttagacattctggacgtttgcgaaatcgaggcaatgccgaccaaggtttaccggatgggccaaagaaaggaaggaggtccccgacttctcaaagtggaaatgccaacccgaaagattacacaaacatttctccgcaataaaacccgtcttaaaaactccaaatttcaagctgtctccgtccgtccatctctctcccctgaacaactcaaggagcggcataatttgatcaattgttgcaagacagcccgcgcccaatttcctaatctcaatttcattgtttatgctggacatgtcattccccaaaacgatgtctctgtttttcgtgatgaccctggtaattattcctgtttttgccataaatccaattcataaaatcttgcgggaaccacccacactgaaatttcaaaaaattttacaaacgtaaattctggtaccgcaagatttttcaaaagtcctcataaggttaataaatatatacaaggtgctttagttaatataaggtctatctataacaaatgcgaacaattagaaacaatttttgaatccttaaatttagactttatctgttttactgaaacctggggtaaaaatgaaaaccaatttccttttcattcaaattttcttcaaaatcataccatttcttacactaacagattgaataagcgtggaggaggcatagcttttgtcgctaaaaaagatatacagttttttgtaaagttttctgaaacaaaatttgggtgtgaaatactaatattgcaatttcaaaattacaattcactaaatttgattcttatttatcgacctccttctactaatttaaaaaataccaaaaatctttttaaattccttgacctttacatttcggaaaactgttgtatacttggggattttaaccttggaactaaagatttaactataaaaaataaaaaacctttccctttaagtaattttggtaatttattttgtgatttctttaataaatataatttgacatcctgcattaatgaacccactagggagcaatcctttctagatttaatcctttcaacaaaaactgacttaataaatgcggtagaagtaaaaggtggacttttagatacaaatcatctaacaattctttttgatttttgtgttttaaagcaaaatgcaaacaagaaacaaattgttcttaggaaatacactaaaactaatacctttctattcgatgcatatttatcctcatttctccctcaactactacaaaaattttatacagttgaggataaatatgctattttctttagttctgttcgaagaaatcttgaaattaatattcctgaaactattttatctgttaagtccgccaaaaacttttacccaccgcatttattggcttcaattagggaaaaagcacgtctatataagctaatgaaagaaaatagaggaaaatatgaacctttatataaaagtatctccttacatattaagactcaaataagaaatattcaatcccgtaaagaaaataaaatactatccggtgataagaatagattattttcgtatcttagaaaatactttaaaccagtagaggatccaccagttattcagtataatactttgtttgtttcagactcaacttctaaagcggaaatttttgcaaaaattttttctgaaaactactgtaaataattattctcttgattttgatacttctttttcttctccaacaataaacgacgttgaatttaatattatttctgttggtaaagttcttaaaactttacctaacagaaataacacatcaccggacggtattacctttagactgttaaaaaattgttctctttcgtttactccttttgttactgaaattttcagactctcccttgatacaggaaagcttcccactatatggaaacaatcgattattatccccttgcataaacaaggggaaaaaagtaaccctatgaactataggcctattgccttaacttgttctttatgcaaaattatggaaaaatttattgtttggactatttccgattttcttttaaagaacaatttattctctgaacatcaatttggatttataaagggcagatcaaccacgacacaactaatttcaacccttgaaaattggtatgatggtatttataaaaataagaatatcgattgtgtctatatagattttaggaaagcatttgatgttatcccccataatttacttttatataaggttcatagaatcggtattaggggtaaaatcttaaactggatatctgactttctttcaaaccgtacctttagggttcgggttgataatactctctcttctgagtataaaatgagctctggcgttccccagggttctgttcttgggcctcttttgtttctgatatatattaatgatttacctgaattaattcctaaacctaaaattatatgcggatgatgtcaaattatattccgtacataaaacaaaaaatgatagaattgctatgcaccatgctttaaatattctctctgattggtctaagaaatggtatattaaaatttccatcaataaaacttttattatttactttggaaagaataaccccagggaacaatataaaattaatgataatgcaatttgtgaagttgaaactattcgtgacttagggattcttattgacaataaatttactttttccgaacacataagcaaaattacccgtaacgcctactaccgtatgcgtttacttttccgtgttattaaatcaaagaaaatttcagtttggaaaaatatttatgttagttatattcgtccacttctagaatattcccctgaatcttggaatccacaactaaaatcgcatattatcaaaattgaaaaatgtcaaaaatattttactcgaatcgctttcagaaaatgttgtcttccatatattccctatgaccaacggctccaattttttaaattagctactcttgaaaaacgaagaaaaatttttgacctcctaactacttataaaattctacatggttttacacatttggacccaaattctctgtttaaaagaactaacctaaatactcgaaataagtcatttttccggttaaatgttaaattacaatctaaaaaatcttccaaatcttttgttaacagatcagtcaaggcctggaatgcccttgataaaacgttaatgtctagctctttaaacacctttaaaaaattattagaattgactcttgattctgaaagcaccaatgtataaagaattattaacttttgaggcattttattgactttgacctcgattttattttcatataaatttttcgttattgtttatcttaacctgtgatctcacttgatatttattcacttactctgtgactattttactgtgatcagtcatcagagtaagtggttcccgcccttctgatggcaattttttctttatcgataaataagtaaaattttaacgcatttttgagttgtaaaattttattgttatacatagaatagaagaatttgtttttttagttttgtctttggattcttagttcttacaatttgagaaatgtctgcgagaccaaaggtttttttcgatgttatggttggcggaaaatcgacaggttataaactcggacaacaaatcgccctcattctctgttcaaaataggtttaggtcgaattgtgatggaattgtttagtgacatcgttccgaagactgccgaaaattttagggctctgtgtactggcgagaaagggatgggcaaaagtggtaattaaaaagtcttgaccgtgaccgttatggattttactttaggcaaaccgttgcactacaaagggtcgaagttccaccgcgtcattccgagtttcatgcttcaggtataaagttgtggcacttccgcgaaaaggaatccattaacggactccgttttcacattttagggtggcgattttactcgaggcaatgggaccggcggcgagtcgatctatggcaattgtttccccgacgagaatttcaaagagaagcataccgtcccgggactattggtaacgtttctggcaatttaaggaatggaacactcgtagcccatgggccaaaaaagcgtcatttttcaacttatttttaaattcagtcgatggccaatgtcggacccaacactcacggctcgcagtttttcatcagcacagtgaaaacagaggatgtacgacaggcgtatttagccattttcgagattcatgattaacacaaattaatctagcga

SEQ ID NO: 8236 - DNA, 2530 bp, Heterodera glycines
atacctttaatagaaaaacagaagatgcatttaaatactcctaagtgcatttcaaaataaaataaataattgtttaaacttttaattattttcattttaaagtttttaaatttcttctccattgttttttttaccaatgcaccgcaactccgtcaatggtctgttcaccgcctggtgttccgtaaaactgaaaaataaaattttttttaattaatttaattattttcaaattgcataaacaaaaaagtaattttttatttatttttattgtataaattgagaaaaacaaataattaatattaattaattttttcaggcaaaattgagcaaaaataatatttttttatcgaattttgttaataaaatagcgattgaaaaataaaaaatatttttaatttttattattttttaaattaaaatgcatataacaaatttaaaaattaatttttattaaaagtacataaattaaaaacattttacaattttaattcaattatttttttaaagaaattgagcaaaaaaataatctttttatcgaaatatttttaaaaatttcgagtgaaaaattttattaaaatatttttaattaatttaattattatttttaattaaaattgcataaaatccaatttttaatttattattattattttatttatttattattatttgaatttgtgccctcctctcaccgtttccgcctgctcataaacattgctccgctggtcgtcgtgtgccattattttcacattttttgaggccaccgattttttcagctcgggcccgagaagggtggcggcgaattgacttcaaatttgacaatttaatttaatttcacaaggcaattaatttcaaaaaaattgttgaatttctttttcatgcaaagattttttaattttaattaataattcatgaaaatttaattttacaatttagctaataatttttaatgaatttaatgcttatgttttattaaaaagtttttttaatttaaaaaagttatttaatttttaatttaatttattttaattttgtattttttctacttaagtaagtttttgtaataacattatatttaaaatattagtgttgattataaatatgctcatatccttcattaaaactatttttttaattatcattagaaattaaatgatttttaaattaatttattatttttttttattttatttattctccattttcgccaccgttgtgttgttgcagacaaatacatcgcttgccaactccaaaagggcaaaagtccggcacctaaaattagaattaattaattaattatttagcaatttaaatttttgaattttttgcccaccgggctcattttcaattgtcagtgcccaaaaggtgagattttgtttcgcatattcttcaaaaaatctgcaaatttatttggttatataccaacaaaataaaataattaattaatttttaagtggcaaattaacgaattaattattgcctaattaactaattaattagtaaccgtcgaaaatattgggcataagtggcataatatggcccattgacggggcccttcatccatccccagccaaccattctgcccgtgtttttcatccatgccggcgccgacctgtccaatttggggagggaggggagggaagggctgaagggtttaatttttcaaaaattcttaaattttagggcgaaggggagggttaggttttcaaaaattgcaaatttcaagcattttttgtccttatttgtcgaagggttcggaattagcagtgcatttaaaaaatatataatttgaaaatggggggagggtggagagtttttttattgtaaattttttttgaaaattttttttttcgtttttttcgctaccatggcgacgcaaacagttgaagctcatcatttccaaccaactttttggctttcaaaatgtgtggtatctgaaaaattattttgagagtgaggaggtccatttttttcatttttttgaaattttccgttttttttaattttccgaatttttttgccttaagttcaaagtcctccttggccagcgcaaaagtagtcaaattaaaatcgtctgttttgtccaagtaagaataagcatgggtggaaaaatcacagctcgcaattggcacacggccaactgtgtaacggatgcctgaaagtggggaaaaagcgattggaaattgcgccaaatttgggatttgaccgaaaaattgggttgatcggatcaggaggagctcatattcactgatcagacaactgggactgaaatgagtatgaccaaaaatgggactgagctggccgggatcagcaaggcaaaattaattcctcgtcgtgatcagctaacaaataatgatcggaacgccccactattacatgggcaggccaattgaaatggccaagagcagtcatagagaaacttgccgactcgagaccgagaatttatcgcccgagacttctcagctcgagaatcaagattctacactcactgatcaagatcaattcgcggattggttggagactgatccga

SEQ ID NO: 8237 - DNA, 1157 bp, Heterodera glycines
tctctcactctctccccctctcactcactctctctctccctctctctctccctctttcactcactctcgctctctctctctctcactctctcacgcactctctctctctctcactctctctctccctctctctctctctctaaccctctctctctctccccctctcactcactctctctctctccctctctctctccctctctcactcactctcgctctctctctctctcactcactctcgctctctctctctctgtctctctctcttctctctgtctctctcttctctctctctctcactttctctctccctctctaaccctctctctctctcattctctctcactcactcgctctctctgtctctctctccctctcactctctctctccctctctctctccctctctcactcactcgctctctctgtctctctcttctctctctctctcactctctctctccctctctatcactctctcactcactcgctctctctctcactcactcgctctctctgtctctctctccctctcactgtctctctctctccctctctctctcaccaatgtccttgtcaaagtacgctttgagcagtgcgtcgcgcgtccgctcgtccaacgcgttcaggctgatgccggtcgagtcggtgaacgcgccgccaaagccgaaaatgcgctgacgcttctccgccgcgttgacactgacctcaagcaaaccggcgcaagaattggcggcatctttttagaattggcaaaagaaatggacaaagtgacaaaggcattcgacaaattatccaatggatggacaaaatgtcgactaattcttcaatgtgacaaactgctcaaaatagtggacaaaatgtgcaatgaatgtggataaaatacatatttgactaatcctcaaagggatagttaagtgtcgacattctggtgaatttcggccgtcaacccgaatattatgccaatgtttttgtttaccgtccggcgccaattcaaatcgtgccaaacgcttctccgccaaatcgctgacaaaatacaccaatttgtcctcggcatcgccaaaagtgcccaaaggttcgggcgaatcacaataatcggatgtgcaaacacagacaaaagaatcatgatcaaatctgagagagattttgtaatagaa

SEQ ID NO: 8238 - DNA, 1333 bp, Heterodera glycines
atttaaattaaattaaaattaaatttgtgaaattttactgtagtaaaaattttataataaaataaataattattgaatgatttggaaaatggatggaaaattgcccaatattaattataaggcacgttgtgatcattcaaacttttttgatttttgggaccatttgacgatttgacggtcaccagatagggaaagggggcgggaaggtaattaattagttaatgaggataattaacaattagcaaattttctgtccaaaaataaatgacaggcacaatagtaatattgaaaggtggataaccgaaaaatctttggtgtttttacttgttttctttttttgttttaaaaattctaagaattttttgggaaaaaattaatttaaaaaaatggtttttcaaaatttaaatatacacattcatttttagcgcttaatataaaaatcactctgttcttattgtacaaaattttgtagctttaaatggatgacaaaaaatgaataattatgaatgaatcaatgacaaaaattttggacgccgaaaaggcggcggcgtaccaaaaaaaagcgaattcaaaaaatgtaatcaatcgctgatttttaaagcaaaaaaaaaaaaacatttatttttactggttgtaaaaataattgtcatatttgataaaggcataatgaaagtgaagccaaaaatttaaaaattaatgcgattttttcacattttagaaaagaattttaaatcaattcaattttaaatttttcaacaacatttgataggtgagaaggccggataatccattaagcactttaaaatttggtgcttaaaattgaataaacaaaagtgcggcgatgggagagagagagaagcaaagagagggaagggaaaccttaaaatatttttaatgagttccattcatttgaattttaaatgatgtcattaattaaaattagagcccggaattttgagaaattcagggcccggacttcccagatggacccgggattaggattcccgggctaaaagccagtttgaacgggatccctgatccagtttgaatcttttaagaccccgtaccatgggttccgattcccatattttacccggaacccgggtctccaagatggaccccggaaaggattattaccggactaaaagcccagttttaaccggattccaagggtctgctcgacttttcaagacccggaccctggtttccgattgcaaatttttcgcggagcggctttctgagatgggccccggacaggatcccggactaaaagtattatactttgacatagcaccgtaaaaaaaatttgaattaaaatttttaataaaatctt

SEQ ID NO: 8239 - DNA, 935 bp, Heterodera glycines
caaacggaaaagtaaaacaccgaatggctcactttttcagttttaagaggtaaatgccataaaagcagggtagccagattaaaattttcaaaagcctcattttgggtcgaaaagcctcatttttacaaaatttattctaaacacgtttaaaatgttcaaatgttatatttttgattgtccatgatcaatttgagcatttttttgttagaaataagcattttttgggattctgaaattttcaatgcgatttgttaacagattttgtccgaaaaatgaccacattttgcgattttgagcaaatttttgcttgtaaattaaggatttttacggtccggcggtgccgataggcgccgccgggggaaaaattaagaatttttagcatatttttagcatattttcattaagaaattctttattttgcggtttttctcaaaaaaccacaaaaagcctcattttgaaaatttagcctcattgacctatcaaaaaaccacaaaacgaggctaaagcctcagatctggctaccctgcataaaagccggatttttatttttaagcttcccacaacaaacacggaacagaataatgaaacaaatttataaaattggccaaaacaattcagaaattttttatcacatgcaataaaaatgattaatttttattcaaatggtttgtattttacgccggcatgtattttttcaatatattttttttgtttccgctgattattttcctcattttttttttacattttcacaacccttttcccaaaaaacttttggcgaccaaggggggtccggtgccgggaaaatttttttgggatttttaatggattttcggaaaattttgaatatttttttctaatgccgatttccaaggacctccttggaaaaaggacaccttcaattttccaagaccagaaggccaaatccaaggacg

SEQ ID NO: 8240 - DNA, 4153 bp, Heterodera glycines
  unsure (1)..(4153): unsure at all n locations
aaaaagatgcaaaaattaaattgaaaatgccaaagaatcgcaaaatgtttttccttttcccatgcatntactgtaattaaaaaacattattgtattttaacaaaacaatgttctgttgtgaattcaatttgcatccaaaaaaaagaaacctcgcaaagcgcggattaaaatgctcgatttgctgtactttttacgctgaggaaaatcgaaacttaaaaaaagaaaaacgaagaattaacgacggaattcgaaaagatctaaaaagcaccttaacagactctcacaatttgttttggtgatttcatttggcacgagcattttattagttgtaaagagcaattggattatcacaaaaaagggctgaaattgttgagaattaacagataaataaaacatgaaatagaataatctgcaaaatattttcataaaatggacacttttcgttttccggagggtcctgaccctgtccgagtactttttttcgtttgaaaaatgtataaatgtatccggaccgattaggggtccgggaacatttttttctgtaaaccggaaacccaatatgtgacttaatttcaatactgatcataacgctcaaaagacaataagtgtgtgaaaatgaactattgcatatttaatgcttttctgattttaaactttataaaggagcatgatatgtattccagtaacattttgagatatgattaggtcttattccaccatgtgtgaaaaattataaatcatatgaaattgctttttaattaatttattcttgcaattaataatccaatgtttaaaaaacaacaaaataaataaatgcaataacttaacaaaataaattaaggagtggcaaaacaataaaatcttaaggtaaacaaccgcgcaataaaaagaaaaaggaaaatatcgccaaaggaataacaaagtaaaaataggtaattgttggtaagtttgatgagccctgctgatcagaaaatcagaattttgggtaaattaaattttccaaaatttagtggagagagaaataggagaaaaaaagtttggttgcggctttatttgcgtgcaaaagccaagtccatttcagaggtatcacctgcgatttgacggtttgagaactctggaaaaactaataattaattattggttttactcattaacgtttcttacattaaacataggtattacagtactactaattgacctctatggttttgttttgaaaatagccaatcaaaatgaaagccctttaaacattttttaacccatttttgcgaccggtaaatgcggacgatccaatgttcgctggtgtacgcctcttccaaatggagcaaattgaagtttttgttgccaatttctgcatgccggacgcgatcgtaaccggtggcacggcccttttaagtaattaagagaaccaatttttagttgcttaaattctaatgctttactaagcttaaattctaatgctttactaaaagttgtcaataaatcaaaaaaccccaaatattcctaaaaattaaaacaaaaactataaatattgcatttttcgtagcatactttttagttataaaaaatatacggctcagttaattaagtattattgaaggctgtaaagaacgtacatgttcagtgtacacagtgccgaagcgatgatagcacaatttgtacattaaacagttgagcattgtagaggaactattaaaaaggtcgccttaattcataagttttagcattggctaacccctccttgtcaatgcgaaactctccattctttgtgtagtaatcattttcgtgaatgtgtcgcccctccggcgtcgaaccgccgattcggaccatccacaggaatttgttgatgtcgaaaaaggggggatttgtgattatatataaaagcagggaaacaaatcccaaatactaatttgcgggattccgcgtggaatcgttcccgcgtcgatctctaatatgtacttgtacgctcactaaccgtcagatgaatagccggtgactcctccaaaaatgaccagcacatagtcgacgtccaattcgtgcattatttcgtatgcatgcgattcattcgatgccatcgcttgtcctacacgcgaaatgtgtgtgttgttccacgtattgttgtccacgattgtctgattgtgaaaacaacaagcaattaaacagctgatgagcatcactaaaccgttcggttggccattgccgaaatttggtagccataatcccaccaggacatcactttcgcatcctgagcaaataaacggtggcgcttttaaggtaaaagaaatatttggttgtcttacatcgggcgtgtttttacgtaaccagtaataagcctcgcggaaatcgtcgaaaattatgcgtccgccatcgcccgaacgcgcggaaaggacaatggaaggactgctgtacgcctcagaagtgacctaaaaaggggacaaaaattgcagaaacaggcaaatttgcaacccaagtgctgtggtacacaaaactgatcagacaaattgacatggccagcgtaaccgccaatgaaatctaatgtaaaaaaaagcatcggctgagtctttgttccctccgcttcacctcctgtttgtaggggtaattctcatccccccgatggtaccgtgccgccccgctcccgccgcttttccctcctccgcccgcttttcctcctttctccgccgcattttcagtgcctgccgacttcccctttgacttttcagcgccgaacaaatcgacattcacaacgtaattcccaagtgttgaagagacagcgatgccgccgagaatacacctgaaaaaagacaaacttgtggagtattaaattatccgacatgacagttaaagctcacatgattggagcgagaacgagcatcaaacggaccataaccccagcaaaataaatggaagtcaatccatagagaatgatgaaaatattttgatctgtgagttttttgaagcaaaaataaaggccagctgaaaagggaattaaaatggaaactgctgggaaaataagtactaatattgtaccaggaaaagtgaagaccaaaaattgaaggtcaaaataaaaggaactccacgcggtgggctgatgctccgagacggaagcaatgatcggaatgttattcttggcataggatgggtccaaaagggaatagaaacggcccgtccatggcgcaatctctggaagaatggacaaatgaaagcacatggaaaagacatggaaattcactgtgaagaaacgtcgccaaaatgagtgctaaaaaggcggcaccgccaaaaacgagcagaacggagcggaggagcagctgaaaacggtcggcagtcattttggaacgcatccattgggcaagtgcgacgatttggcaaagtccaaacacaccaaaggcctacaaatccaagcaaatttgatggaaatggaaaagaatgaatgcccaaaccaacccccatgtgttcagaagttgagacgggttgaaagccgacaaacggaatttgcatggacaaaattgtgcccaaagagtaaaccttgcaaattgaaaaaacattttggaacatttttaattttttataccgtcgaataagcgacgtaaattcgatgagagaagcgcccggtgcaaattaaagtcaaaaaaagaaagggttaaaagggaaaaatcaaataattaaaagcaattaccaacacatggagagggatcagattgatcagaaagacgtagccaccccaactgagtaagaaaatgaaaaatattggttgttgtttgtgagtcattttatggtttggacctggacaccatgtaaaaataagagagcgcacaaagcacagaattgaaaatggagcccgatttgacggatttgatccaaaaataataggtgagcagcatgcaaaagatggcaatgccctgaaatagaatagaaaatcaaacaaaacttgccgtaatgtttaaatcccgaaaaaaaaacaacttcgttgtcgtatgaaccggcgacagaacgcgaaatgtaaccggggacaattgctgaaaagagaaaggccaaacagtgcaaagggtagtgaaacaactgaccaattaaagcagcagcgataagaccggccccttcgctctaaaggaaaaaataatgttgaaaagggcaaacacatcatattttgatattttcg

SEQ ID NO: 8241 - DNA, 1990 bp, Heterodera glycines
  unsure (1)..(1990): unsure at all n locations
aattgctgactccctggcgaatacctggattggttttgctcgttataatttttttcaaaaaaacgactatctcttttttcggggtaatacgaaataatgccaaaataaatggacgtccttggaaaaaataattgctgactccctaacgaatacctggattggttttgctcgttataattttttttcaaaaaacgactatctcttttttcggggtaatacgaaataatgccaaaataaatggacgtccttggaaaaaataattgctgactccctaacgaatacctggattggttttgctcgttataattttttttcaaaaaacgactaactcttttttcggggtaatacgaaataatgccaaaataaatggacgtccttggaaaaaataattgctgactccctacgccgaaaaaacgcacaaaaacggtgaaggaactgaagaggggagccaaaaagacgcaaacttcgcgaatatcgacggtgacattgagcaggttgaggaagcgatggatgaacatgctggtcagcataagccctaacaaaaagtaagaaaaaaattcaagaaagaaaaaccgggataaattgtgccgccaatgatacgacccaaaggataccacgcaaatgctaaatttccaatgttaatttggcgaccattaactttgaatggtgcgttaccgtcgaaccaattgtggaagttgtagtagccctcttcagtaaggtatttggtggttcggtagttaaaatacgggtcgaattcatgctgaaaacgaggaaagagaccgtttgtttaatttctattaaaaaaaactgtcaaaagtacttactatgacagattcaaagcgaatgacggcaaaaagtctgacgagaaaagaaacaatggccgaaagcgaaaggacaaccaatttcagaagggtttccttctgtttgtgagagagagccaaaaaatcgaagagagggacggcggagacggacgacgaagacgatattacggtcatatcagggaaacgatttgcagaaattcaatacaaaaaaaaataaaattcctttaatattttttgaaaaatcaccaatttttaaacaactggttttttcaattgaattaggagtcactttctcaacttttgtttgcttattattagggcgtgtaattatatggaaatccatatttttttcctggactattggaggcctgaaacgcacgaaaaacatgtttttagcttggtttgaagcttctaggatgtatttctatatccattttttccatattttgcgatttatgtccatatttccatattttggcatttttatccatattttatgtccatattttagcatttttttaaaaaacctctattagaacggcccctatcagctaaattgggatttttgacccgaaagaccggaaaatttttcagaaaaaactttttttgtcaaaattttatcgaaactataccaaaattttgagatataccctaaatttggaaaaatttatgtccatattttgcaattttatgtccatattttgagattttagcaattttatgtccatattttgcgatttgttgtccatattttatggccatatttcgtgattttatatccatataattacacgccctacttattatgtatcttggattgaaataagaattttaaacaaatttagtgtctaggaacaaatgtcaggaaaaaccacggattgacattaaggtaacatggataaaaaaggtaatcgccgcgttcgcctgttcaaacccctcccgccaggacagcccttcccagcagagcatcacccccagcacgtccaaattacacggtgttcataaagcttttgcatgtcaatatgaatgaaatatattaaaagtaatcgggtattactattatatagaactttccaaatattcaataataatggagtgctaaaatattaagacccaaattgaaaatttacaattaatgaattccaatgantatattgtatcttcaaaga

SEQ ID NO: 8242 - DNA, 2182 bp, Heterodera glycines
tcatttgaagggaatcaaatgtttaattctcgggattggtgtgggaaataatcacagaatgggcaggcacagacgtccaattaattggagttggtcgccttcatacaaaagggtgtcctgttttggccaagggagtcaaaggacgaccagtcggacaacagaagaggaggaagtgggggaggggggggagtatttgttgcaatgtttgcaaagcatttgctgtgatcggagatggtgtttaagaaagacgccattgtcaatgatcaccaatcactcagccaacaaaatcataagttaattagcgattaaatgattctttttaatgaatgaccagttttttccggggtttcgatgtatatacgtataatttttataaacaaattgtgttcagaaatgggtctttgagtaatcttttacacatttctgatgctctgatcagttcaaaatgccgcaccaattcgaaacactactgacacaaaaaattctgctgctgctcacatttgcactctttgctgagctccgtttgcattttttccgcccatttcgcaatttcattttctgctgatggatcgtcgtaaaaatttggcaattctttagtccatagtaaatgcttttcgtcatctttttcgactttatttccccgcgattcaatgatcagttccatcagtcgcaaaagttttgttcgattcatttttaagtcggacaataataacaactgaataaagtgaaaaaagagagcttttggcaatttgaaaccatcggccttatttctcacttcgcattgcttctcgaattcgtcctccgtcatcagttcgcgcacatccgaaatctccgcacggacttccgtcaggcgatgctccagcagtgggaccaaatggcggagattgaacgcgttgatcacgttgtggttgatcgaaatgctttcttcctgaaatcggcattaaatgcaattggcaattttctgttgttcgccgttatctgaccaaattgtgcacttgatgccaccagccggaaggcacgaaaacaatttggcccggttcctgcacaaattggaacagttcgtcgtgctgaaattgccccaaacactgccgaatgtcctcagggtacgcgccgttcgcttggcgcacgcggcgttcggcgcccggccgtagcaaataccacaacttccgaccgcaaacattggcagaccaagagaaggaattgagcacgtccgagtggaaaggcgtcctcaaaaaggaaaagccaaaatgtgaaatgaaaatgtaatcatcggcagacagcaccaactccctttggtgccgaaataaacaaaacggtaatcgcccccgaatggattctgctgctgatcagtgactgtccatcgttcgtaattggcccaatcgaatcgtaaaaaggcgggcaattcgtacaaatccgactcttcgggatgagaactgaaaattgcattgttcaattggcattttggagtattctaacttttggaagtgccaatctttaagataggccactttgttctttgtttcattgtcagttggagaaaaaccgaaatattcgtcaataaatgagctaaaaggcatttgagttggacaaatgtccgtgccgatcagaatgggcacagattctgtgcctgaaaaaacaacggccaattatttgcaaaatccatcctttttctttagtaaattccccttcactcagttcgaacgcctttaacaattaaaagtaattaagaccaaccgaatttcgatttgagaaattcgaagtttggtcggcccgtctttcggtcgacccattggcgaagagcacgccaatgagcagaaaaattggagcagagaatgcaggggacatttgcaaggagatgacaaaaaggaaaacaaagctattatgcactaatacaaataccgaacttactgaattagtaccccctctggattaaaaccactattttcgaaataaaaccaccggaggtactaattcagtaagtacggtacacagcaggagaggagtgttaattaattcccccacatttagatccaatgagttattttttaattttagtccgtgacaattacatgagaactttttaacaggttttcacaatgtttcaattaccgaaaaatgaaatcctaatttgatatttggtcgagcggagacaaggacacgcaagacataaaatgaataacaa

SEQ ID NO: 8243 - DNA, 2467 bp, Heterodera glycines
tcgcccgtcgtaaatatcataagaaaatcgcctctttcacccaatggaaaagcacattgccatggtgaagcgaaaactgtgctttgatgccactgcgcccttcactcgacggctcctcaaaatggaaaagttcacggttaaaaatattcaatattttgcacttttaagcaaatcggtgtggagagaataaatgcggaagatttggcactgaaagtgtccctttggaggtcgagtcgcggcgtccgtccgtcgcctccctcttcgtcctcctcctccgcttcattggcagcgcattcgctgggagcaaaagaggaagtgccaatttcaaaccacaaaagaatgccatcgcaacgacccgcgtaatgactgacgaagtgcacctcctgcttcattttggtcagttggccaagcgcggaattggcctcaaacatttggaagaaaaattattatggaggccaaataaaaatacaaaaaatatgtaaatataacaaaggaaagcgcacatctgtgccaaattccattctaagcagttccactgggtcagataacgaatcataaggcaaagtccgactctccaactcttgaaaatgtgtgacgcggtagtcgcccatcggagagagatccgccccacaatatgtgtgccgccgttcctctgccgacgggagaagtgtacttcgcgcgtgaagagtatccgaactaaccaaacaaccctgaggggaaaggggcgctttagggaaatgcaatttaagcaatgcaaaaatgaaagagtcgtataaaaatgaaaagcaaataaccgcagtgaatttttcaactttaaattgctgtaaaacacaccttcaacaaaattagagaggggattagcaatgcgccaggcgaacggaggcgtaactcaatgatagaggcgaaatagtcatctcttagggcaccgatggaagaaaagggccaaaaaagaatggcaccgccaggggggcaaattgctgatgaaaaagcattgaaaggattcgttcggctgctcacctttgtccagcgtggtcgccgtcccccgacaaacgtagcgaattgtcgcatgagcggacgcaacgaacggaaagtcaccgggacaatcgtccacggtcaaaagcaaatcggtgcagtccaaaacggatgagtgaggacggagagagcggagggcacgcgagaagaaagtggcgatggaagggtcattcatggccaaaaggtcgagcgaagaaggcgcacgcaaaagttcacgcggaggggagggccaaagggagctgaaaaagcaaaagagtgaattcaaaatgagtgaaaaaaataattaaaatcatggcgtaattgaatgccaattaataaacgagtgacccaccatttgctgctgtgtttgggctgaacatgcaaagtgtggtccctgacaaacacttcgaaatgaagcgaatcgccggcattgacgtaaaggggcggataaaaggggaaaagcgcctgttgccagcaaaaccctacagaaaaagaagaaaacattaatgggaaaagaaaggaaaaggcaacaaaaaaccaccattttaaaaacaacgaaccttctgctggcgaagtgcaaatttcaaagccatcgaaaaggtcgagtctgaaagaattttgatctcattattagatatttctattgaaggtcaatgggaatacctaaaccaaacgcaaacactcgaggccaacccagtggaattggccgtgagaatcacttcggtcaccaaattgtcttaaacattggattcgccaacgtaaacattcaaatgtaattaagagttttcgatacatacttgatacgatttgtttgagttgatggacattcgaaaaatcaactaaaagtccctcgattggctcagaaagcaaccgataggcttcggactccgccgattgttcgggcgctgtaagagacggaagttcgttcaaaaacgcgcaaaggtacggagacggcggcaaaataagcgaatgtttctaaaggaaaatagcagattaatttcacaggattatgccatataatgaatgatctaagattagaaaattaacttctctagtaattaattatgtggtaccaaaatatgggggagaaacgtaaggggtaacaaattgtaataagaatgacaggctaacatcatgtttcgctttgtttcttgtgattcggttaaattttggtttttaaaattgacaataaccttcgagcttcaccaaatgatgttctaacatcaaaaaagggtcatttgaacttcttaaatttgacgggaccccttcgacaaatccagtacaaaacctcctttgttttgcaggtttacaatcatactcagtgtcagtttttagtggagggaatgggtgagggtgaacctccttcttcggcattcgtttgtttggtccggaatttctctccccttcaaaattcacttctcgctgctgctgctcctcgcggatgtaacaggaattg

SEQ ID NO: 8244 - DNA, 2021 bp, Heterodera glycines
tcatcacgagcgaattcaatagcacggctgaataattcgacagagcgcaaaagtttacctcaagcaaccattaattagttgataaaaagtgtaaaggttgggggtgggggagatttacggattttgtattaaaattttgagaattttagagttgtgggtaattttcctgaacctcgatcaaagaagcattcggcaatggtgctccaaagggacgactcattgggataaattgtttgggcgagttgaattaccttaaaaggaaaaagatataaaccattccaaaaagtaattttccgtttttacctgatcaactcgagaatcatcgtattcattgcgcaaatatgcacgtaacgcacccaaaaattcgtctttaaatttgcgccttccgatgccactttcggcgggagagggaacaaccggaatcattttcaagaccttcaaaaattgactaattttaggaattaaaattgaaagaaaacacaccgcaacataattgagcacagcctcagcaaattcgcgctttttaaagtgatacctataaaaacaaaaatttttttcaccaatgtttaaatctgccaaatgctaattataagcattttcttgggacttaacgtaacaaaaacattttcaaatgaaatttctacgctgttagaattttaatctttctcgcctagcattcgaaatggagaattgcaatgtgaccgaagttgtcagtgcaccaccgccaactcgacgaacaaagccttgctggggttgcaactcgcgaaaatttgcatccaatgccgcaacaacagcagcagggactcgcaaattattattgttgtcttcattaacattttcgaattgaggttcattgtttggaagcatttgaaggaatttaatgctataagtatgaagaaaagattaattcattgaattgttaagcgatgttttggtaatactgccgatggttgccccattttttgaagtttttattattttcaaatcatgaaaatatgcttccaagcgttttaatggtcgctgctcaagaattcggcatccatttcggtctatttcgaaccctgtgcccgaatttgaacaaaaagtcgaattcaaaaatctcaaaattcacatgttcgaatttgtgcagaatgaaaaacattatgaagtaaattagatatgtatgttttctctgttaatagagaaaaataaatagtacgataaaatgagagatgttttttttcttcactctctatttgttggttctctctcattttatgagaaggcgtgtcaattcaagtgccctttgtatattattaactttaacttctctttcttctcattagttggtacaggatttatttcgtaatacataatacgtgatcaaatgtattccttatgtcatttcattaattcagacaatttatctttagttcgtttttcccataaagaaattcagacagaaaattatttaacttattccttaaaccaaaaaagcatggttcgtcgtggtggtcgttcttcttcaccaaaagctagcgctccggttcgaagtgtgaaaagcacttctcctgctcgttcggccgttccgtctcgtcctgctggtactcaaccaacttccggtgcaacggcaccgcagcagaaagggcctgggctgctcggacaaatggctgcaactgctggaggagtggcgattggttcggcaatggtaaaagaataggtctaatttgatatatccacttattttagggtcatgccatcggtaatatgttctctgggggtaatgctcaagaagtcgctgctcagcaagatgttcctgccaattcggacaactttgaaaccaccaagcagtactcacagccctgtgagattgagtggcgccagtttcttgagtggtaatacttgtacatggatctattttatggatttcacattatttttcagttctcagaaccagagcgaaggtagcatctcccagggattcaacgacctcttcaattgtggagaagctcgctttggccgttagaccttgaaggaaggaa

SEQ ID NO: 8245 - DNA, 926 bp, Heterodera glycines
  unsure (1)..(926): unsure at all n locations
aaaaaaaanttgatccaaaaaaaaactaaataatattttccccattatttctccctcaattaaaattaagttggcatggtgaaatcaatagaaaacagcctgagattaaaatcaaagaataatattttaaagactattcgtcgatttgaacatttagaaaaaaatacataaaaaataactcgtttcttcatccaaacttttctttggttcatgttctgaggtataattttgactgcttagtttaaagaaaaatttcactgtctacaattattggactttattaaaatctctaagatattctgccattcatgcttgacggaatgtccgaagaccttgattttaaacactcgaatgggcaactgccaatattacactctgttaaaaaattataagttcaagtttttaagtacttcttatgatccatttaagtggaggtctaagcctctaccaaactgagcggacttggcacatttttaaatgggcacatcgtttttattcggtaaaattggaaacaaagaaaaaaacctaggtgatttcaagagaaaaaaaatctgtagaaaattaatatgggagatagtaacgcagtatttgctagaaaacccttttggatcattgcttgaggcaagtctctgttaagtgtatggggccttttgacggaatgcccaaaggctacaattttgaatgtccatttcagaaatcggcatagctacattttgaattataaaaaatttttttcgtattatactcatcattattggaactcatatttttaaaatcatgactggatcctccatagatcgattgagagacgaaaattcttgaaatacaaaatttctttcgacgaattttacccgtaaaaaaattatttggcctagcactattatgactttacttcaaaaacttcagcatttaaaaatatcttgaaa

SEQ ID NO: 8246 - DNA, 4506 bp, Heterodera glycines
  unsure (1)..(4506): unsure at all n locations
atgccaacccgaataataatgatcaaataatacttatacattcgaaccaattctcagagaaaatgctacagcatactctacgggattttttttaaagtattgaatcaaaatgaagccatccgattaatccattcatttgttaaaaaattatcatggcagtttcaagtaagggatgaccaacttttcctctattaataattctgggccaaaatctttttggcatgtaaaatattatgtaattcatacattttaaaaaaaaattgatccaaaaaactaaataatattttccccattatttctccctcaattaaaattaagttggcatggtgaaatcaatagaaaacagcctgagattaaaatcaaagaataatattttaaagactattcgtcgatttgaacatttagaaaaaaaaatacagaaaaaaaagaactccaaaattcataaaatacgagactttgggaaacaaaattcggagatatcattttgactgcttagtttaaagaaaaatttcactgtctacaattattggactttattaaaatctctaagatattctgccattcatgcttgacggaatgtccgaagaccttgattttaaacacttgaatgggcaactgccaatattacactctgttaaaaaattataagttcaagtttttaagtacttctcatgatccatttaaggggaggtctaagcctctaactgtatcaaaatgcgaaaaaaaacaacttaagcaataccaaaataatccgttgaaaaaaaaaattttgtttttatttgactaaacccggaaactttgccaaactgagcggacttggcacatttttaaatgggcacatcgtttttattcggtaaaattggaaacaaaggaaaaaaacctaggtgatttcaagagaaaaaaaaatctgtagaaaattaatatgagatagtaacgcagtatttgctagaaaacccttttggatcattgctctgaggcaagtctctgttaagtgtatgaactgggcccatttaaaaaatatattgaaaattttagatgcttttaaaatatgaattaatcagcaaggtttatatttttgtgttaattcgaacagtgaaattgtttcaattaattaaaattattccaatattagtttgttttatccaaattcttcaatcggtttaaattccgttctttgcttcaaaaaacatgacggaatgcccaaaggccacaataaaatattggttttctaatgattgttacttcggcaatgttcggttaaaatgagtgatcactaatcagaaacagtgaaggaaattttgttgccgcaagaacgttcacatataatagataaaagctgcttgtctttagatggatgtaatggatttccggtactcggagaatgcactgtgagagaaaaaaaaactttggccgattaagcaatttaaagtgtaaagattaaagtttgtcagcataaaataaaacaacaaaataaatttaattaaaaatcaacaaaatgatactcagcaattaggtaattaaagcatatcgaagatttttatttgatctgacggattatcttggattgatttacaaattttaattttggcctcttacttgacggtactcccaaaggagttcaatattaaacttttttttttgctgacaaaaaaaggaatacagaaaattcttatttcttagcaaatattcgaagagagcgagcagaataaataaatttcttataaaatggtcacggcgaatggggcagagcaaatagaaacgaattttggcgcaataaaaaagactcctgcttttgggcgcaacattagacttgccgtttggcgcaaaatatgtaaattggcctattatttttagcgcaaaatgaatttgacaatttttttaataaaattcagtcttcccattttgggagcaataagaatgtgatgatcttcccattttggggcaaaataatagaattgtcgttttggcgcggcgcttgacttgcctttctggcgcaattagttctggcgcaaaaataattttttttttttttttgtaattaaaaatagacttcccatttttggggcaaaaatatcttcaaattggttcgaaattggccatttaattttttttgatccgaacatgactgatctcccgaaggagcggtgcacctcattccattctcgttccccaacacgcgcaaatcccactcgtcctcctggggatggattgccggcggcgtgccagcaaccatccggtgctaccagtgaaggtgctgatgtccagcccagaatatgaggaagggaacgagtgagaacgaggattggatttggggggaaaaaggaataagccaaaatccgggccctggataaatggcctccccaaattggtaatcccttgggcgcccactagatcgaatacgcgtgcggggatgggcgaggagtaaaatataagataaatattggccaatcacataaaataataattccgccgcgctttgctctcggctctcgctcgccgattaactgctcacccaactgactccttatcgagagaatgctcccgattaaatagttggacttatggaacggaaaatggaatggaagagagcgtggatatgtgcttgggaaagagataaaacggatgtgattaattgcgctttacactatttaaatgaatttcaaacttagccccgtatttacaattgttagaagaagcataaaagcagacagtttcttggcaagttgaaaggttgctggaaaaacgcacaaatgtgggattattccggccaaatgtaaaccaaagaaaatggcagccattaaattttgcgaagaatccgttggttggtcacatttgtcagaagattgatccattatttagactgttttgaaaatgggattttatctgagagtaattgttcaaatagttacaagactaagattaacaaatgcttcttaattaaccacaaaagtttttgtaatttattaaacaccgaaaaattgttcatttatcttttattgactaatgcttttgataatgataccaataataaaggattttgctcgattattaacagggattctttttttatgtaagaaaaatcgcgaaatatgtataaaaaatgctaaaatatatatgaaatatgtactaaaacctccaaatatgtactaaaatatgtaaataaaaatttttaaatggtgatttttttggaaaaaaattctttataagggtgaaataggcacaaaatgccataaaaataggattagaatcactttttagtattttaaattaatttttaatatctcattttttgaaaaaatcgattttttagaattttttagtttttcgcaaaaaaattctataaattctcaaaaatcctcaaaatatttaaaaaaagaaaatatgaacaaaaaattgcgaaatatgtatgaaaattccaaaatatgtataaaaatatgtacatatgtaatatgtagaaaaatccgaaaatatgtaaaaatatgtaaataaaagtcccaacttttgttcgcaaacacaaaaaagaaagtgtttttcctactaattttacattaaaaaaatgatccctggtaattacagtaaataaatagggtgccttttcgtttcttgttttggtcagaatttctgatgatcgaaataattgtatttttaattaaaaaattttagttagaaattatttttattttcttgatctcattgataacactaagtgttttctactagcctacaaagttttaaacttagattaactattctaaattttttgaggatttttgaggcttttggggaaacatcgtcagaatctgttaaattttatgattaattttgataaattggcataatgtttgacaatcatttaataatttgggtttttaaagagcgtcaaaatgaattctcacccaaaaaattttgtttaatttttcatgaaaaccagaaaataaccaatttttccgaaaattcacaaaattaagaatttttgcaatgaaaatcagcttaaaatatagtcaaaattcttaatttttccccggcggcgcctagcaaaaatgcgaaatgaaaaaaagcgaaatgcgaaacgccaaaaaatgcgaaattttttcaaaaattttacaaataatcaaaatcatagatttactctgaacaaaggaataattgcagaaattggcgttcaaatatgagcatgccaaaataataataaactgaagcattcgttttaaaaatttagttttttaaatatattcattcattcttaggtgtggaactttcgcatttcgcgccaaaaagcgaaatgcgaaatgcgaaacgccaaaaaatgcgaataatgcgaaaggcgaaatgcgaaaagcgaaacctcggcccatccctgctgcctatcggcggcaccgccggaccccttattccccaaaagttttttggaaaaagcgccgcnaaaaaatcaacttcgatttttcaggctcagaattttcacaaatgcttatttcaaacaaaaaatgctcaaattgatcatggaca

SEQ ID NO: 8247 - DNA, 3294 bp, Heterodera glycines
  unsure (1)..(3294): unsure at all n locations
tattgaataaattatgaatttaaatcaggagattatcctctcttattatggaagagataaataaaagggcaggatatgatagtcgagttaatatacaattaacgggcaaaaggaaaaatactattaaaaaatgagaagcatgcttaatttttagtcttcaaaatttgatggcttcctagagacgatgattagtaaaaaataaaagaaaccatactattttaaataatatggtctcaatttaatcattaaataagaaaaacgttatcatatacaaaaacataatgcaaatgcataataaatgaaaaaacgacggcaaaactctccaactcaaaatgatgaagacgagattctcgttcgtctagaacgactcgaaaaattgctccaggggtctgggaatcctacccttatcccaatcatcgaacggcttgaaaaattggaaaaattggtggaacggctcgtagagggtgagaatcgatatggacatcgatttggtgacccccaccacacccctacttcggcccccacccctaagaacggcaatgttcaatggggtcaaccgccgcctttctctggcacgggcgccgtttctcagatgatcaccgaggcgatcatcaactccgaacagctgaaggaaaagtccactcgggcagtcatcgaaaaaatgccggaggcgatggacggacgggcattggtggaacaaattgcagaagaatgcggcatcaaagacaaactttcgccggacattcaccgccacccaaggacaccacctgagagcggggcaaaaagggaccgaattttgaaggtgccgtttttggataaatatcacgtgacaaattcctttacaattttcgtaatgcactgaaaaaatttcctaattttccacaattcatcaaagttcgcagggatatgacccaaagcgaactcaaaattttgtactccctgcggcaacaagcctatcaggccaatattgccgcaggtgagtacaaatattttgtggcagatttggagatcaaatctttgaaaaacccccgcccgctcagaactcgctagggatacgcgagcaaaccaaacaaaaaaattaggaataagggagaaaaaaatccctgtgtttcctgcctattaataaatgcccgatcaatttcaaataaaatatctgatttagaacatatagcacaaaagtatgatccatcaatattcatcatcaatgagacctggttaaaccccagaaatacaattgaaaatgaactatctataaatggtagatatagagtaatgcttgcgaaccgaaatgagaaaaagggcggtggatcagcaattctaactaaaacaaatattccttatcagacactattctctgggacaaaattccaaagcgaaattttacacattaaattactttttaaaaaaccaatccaaatcataaatatatatcgtccaccgaattgtacagttcagaatactaaaaagctactcaaatttatttcggaccaaagcgattctgaaaatatcatatattgtggggattttaacatcccaaatattttatgggatgaaaataaggtaattcaaagaaatgaccctgtgtcaaatttattgattgagtttattgaccaaaaacaattgaaacaacatgtaaaggaaccgacaagagaaaagctattttagatttagtaattactagtgaatcagaaataattaatgatttaatagtacttgaaaatttttcaacttccgatcacaaaatggtcggattcaaaataaagggaaaatttagtcgtaataatcacagagtttatagaagagattttaaaaatattaattttgcaaaattaaatctagcgatacttgaaaatcgaattgatttagcaataaactcagtatacaccgttgaacaaaaatatcaagaattcttaaataaagtaatgaaattatatgatacgtttatacccaacagatctctaaaatcgataataaaacaatcatatcctcaaaaaataaaagatttattttcagagaaattacggttacataagcttgtaaaaaagtttcccgataaaagtgagattattttaaattacaaaataatttcaagggaaatgaaaaaacaattgaaccaatttagaaatgaaaaagagtcaaaaattatttcccaagggcaaaactcagttaacaaatttattcgaaataaattatcaaaaaattatgaaattcctactttaattgatagtgctggaaatatgtattccagtaatgagcaaaaatgcaaagtattagcagaaacatttcaaaaatcatttttagaaaattcaattgttaatggtccacaaactcagtcaacacagaataagaccaagctttttgacattgaattgaacgctggcataatttggaacatattaagaagacttccccggcgtaattccacttcacctgataatatcccttatattttattaaaaaattgcgcagatccaatcacaaaaatattagcagatatatttaggctaattttggattccggtcaaattccggaaatatggcgaacatcattagttgtaccaattttcaaaaaggcgaaaaaactgatccattaaattacaggccggtgtcattaaccagcactatctgcagagttttcgaacgaattttgagtatcaaaattttagaatttctgaatagtatagaattttttgataaagaacaatttgggtttctaaaaaataggtcgactacaacccaaatattaaaaacaatggacgatatatataattctttacaaaaaaatcaacaaattgacattatttatattgattttgtcaaggcgtttaattctgtttccgttgatttattacttataaaaatcaaaaagataggaattgaaggaaaaatttataattttttaaataattttttaaaaaatcgaagttttaaagttaaaatcagagaagaattgtcagaaagtttcaaaatattttcgggagtgccccagggaagtgtcttagggccattactctttttaatttttataaatgatctgccgtcctttattgcaaatgaaaaggcatcagttggcataaaaatgtatgccgatgatgttaaattatattatgcccacgaaaatgatgaccattcgaatcagttggatagacctcaattagaatacgctaccgaagtgtggaacccaaatttaaaaaaagacattgacaaaattgaacgggttcaaaaatttttcacaagaaaagcacttagaaaatgtggttttgtgtacaaaaaatatgngggaaagactaaaaa

SEQ ID NO: 8248 - DNA, 3238 bp, Heterodera glycines
ttgcatatttatgcgcttattttggcaaatattcgtgcatatttttgacagccctgataattaattatatatttgttggttaaataaaataaagcgagaaaatgaaatgaataattaactctggaaaaacccctggaatcgaaattgagaactggaacccaaaaccctctaaattccaaaattaaaaatacctaataatgtatttattttaattaattttagaaacaacatgataatacaattaactcataaatttaattatttaaaataaaattaaactttctgacattgaactaaacgctggcataatttggaatatattaagaaagctccccaggcgaaattccacttcaccggataatgttccttacattttattaaaaattgtgcagaaccaattacaaaatttttagcagatatatttaggctaattttggattccggacaaattccggaaatatggcgaacatcattagttgtaccaatttacaaaaaggcgaaaaaactgatccattaaattacaggccggtgtcattaaccagcactgtctgtagagtttttgaacgaattttgagtagcaaaattttagaatttctgaacagtatagaattttttgataaagaacaatttgggtttttaaaaaatagatcgactacaacccaaatattaaaaacgatggacgatatatataattctctacaaaagaatcaacaaattgacataatctatattgattttgtcaaggcgtttgattctgttccaattgatttattacttcaaaaaatcaaaaaaattggaattgaaggaaaaattcaaaattttttaactaactttttaaaaaatcggagttttaaagttaaaattggcgaagaattgccagaaagtttcaaaatattttcaggagtgctccagggaagtgtcttagggccattactctttttaatttttataaatgatctgccgtcctttattgcaaatgaagcatcatcagttggcataaaaatgtataccgatgatgttaaattatattatgcccatgaaaatgatgataaaacaaatcatttagataaagcaattgaagctttggaaaaatggtcaaaaataaatgggttagaaatttcaactgggaaatgttttgttctttatttagggaaaaataatatgaaaaaagattatttaattaactcaaaaaagatttcagaatcggataatgttcgtgacctaggcattataattgactcgaaactgcatttttcaggacatattaacaaaattgtacgaaacgcttatcttagagttttccagattttaagagtcttaaaaaccagggaaataaagactctaacaacagcttataaaacttttgtccgacctcaattagaatacgctaccgaagtgtggaacccaaatttaaaaaaagacattgacaaaattgaacgggttcaaaaatttttcacaagaaaagcatttagaaaatgtggttttttgtacaaaaaatataaggaaagactaaaaatcactgatttacacaaattagaagaaagaagaaaaatcaatgatttaacaacagcttttaaaattataaaagggttcaccagcctagaggctgaaaaaagtttctttttctcggaaaggcccaggaggcctttacttttgcgagtaaagcgccacacggccaaaactcaaaataattttttcaatagaatagtaaaaaactggaataatcttccagtggtagcggtgcaaattaataaggcaaaggaattcaggggtttactaaaagcaatgagttctgagtaggattttccattttgccatatttacactatatttttatcacctgtgaatttttaacatttgattgatttatttttaatcatttttttattacgatattcattttttatttttttttttgaccaactttatttgttgttttctttttggcaccatataagagcactcatgtgcctttggtttgctcgataaataaataaataaataaaggggctgaaaaatagtttttcaacattaaaattttttgtttgattgaagatttttaagtccatataaatccatattttgtgggatttcgggaataaatccatatttcgccatttttgcattttgagagcatatttcagacattttttgaacatttggtcaagaaaaatccaaaaagcgaaaaatacacccttaaggatcaaagttctgttattttttttaaaaatactccacaaaaaaagagaatttttcaaattttggaagttttttcgtttttttcattttccaaaattttttcgagcatttttagtacatattttattagagatcggattttccgaatctgccgggccgggccgggctgagattttcgaaaacgaccgctttcctggtccggtctctcaaaaacgggtcaaaccgggtttttctaaaaattactggctccggttacctggcccagtaaaaagcggtactgggcccggtccggtctgatcactatatattatgtccatatttgggtattttttagtccatataatttccagccctactgatcactagtgatcggtgtttggtcgattttgcatttttagctctccgaaaatgtgaggaccaccaagcaaatgctggtgccgctgcttttccatctgatcaatctttgcttcggcaccgctgtgatcacaattgcgttttaccggcccttcgccaacaaattctgttacgatttctttggcgaattaacttgggccacagtgtctgtctccaattttttgatcgaactcacaatgatactgtaggggatgaatattatttctttttgggttaatgcaataattttgggtcgtttagtacgggcccttttttagcaataaatttttgcttttcaaatcaaatccaataatcttggtagcattcgccagccgtaggcgtgctgaaatagactgcttatgtttgcggagcagcaccgacgaacagatgcgaccagatatatggagagaccgaacccttcgggagcagcttcgctatagactgtactttaagtctgcgtcggatttttgctccccatagtcgtttgagtaccccaaacggacacttgagaaaatagatttttttgttgtcgtggtagtccccccgaaccgatgcgcccagatttatggagagagcgaatccttcgggaggagcttccctatagtctgtactttaggtctgcgttggatttttgctccccataaat

SEQ ID NO: 8249 - DNA, 1526 bp, Heterodera glycines
  unsure (1)..(1526): unsure at all n locations
taaaatgcaacacacacctggagcggagctgattattttagccaaatgataagataatacncgccgttggttgctaaaatgtgttcacaatttcagaaatttgccgttgtccgctcatttgttttgtgttgtgctgccagcgccgaccattcgtctcagcccttcccatcatttcaaattccattattcccgtgattgtccaaaatgatcggcggaatcctggaagatatctggacgagatttatcggtacacatctctcctgatcattttcattctgttcattgttgtagtgatctgatctgacccgccaccaaaataaacctgaaaaaattgttacaaaaacccatcttcgcggggataatggcacctgggggatatggcacttgggggattttattttatttttccatttatttagacttggtggaggacatctctgatcagtacgacgattctgagcaaccaacaatcatccaccacgaaccagcaacaccaacaacaatgtttgacaactatggtccgattgagaagattgttgtggtcggcaccggcctcatgggcagtggcattgcgcaaattgcggtcgagtcgggcgtcaaagtgtgcctggtgggccgtagtcaagagaagtgtgatcagacccggctgaagatcaacacgggagtgcaaaagtcgatcaagaagcgcatggcaaatgaaactgccgaggtaaacgacggcaaacatgaaaatggcatggcaaaaatgatgcaacgagttgaaaattgaaaaatgccactttccataaccaaaatttagtaattgctttcactctttaataagttttaattatcataaatattcctgatcgttttaaaaaagttaaaagtgccaaatgtctccattattcgggttttgaatcggtccaaaaatttcgtttaaacgcttttccgcagagttttttaaattaattctttcgcaatttgaaaattaagagtcaaaacaataagtaaaaaaaaaattagttattctgatcagatgaaccatcgaacatttgttttacttcaggcacaacagcagttggtcgaggcgacaatggaaagccttgagctggtgaccaacttggatgaagcgggcttgtcagatgccgacattgtcattgaggcggtggttgaaaatctgaaggtgaagcagaagctgttcattgaattggaagccaaggtgatcagaggcaatctcgaaagaattttttgatttaaaattaaattaatttaatatttaaatttaattttatttgctaataataagtgtcattcaacaaattcgaaatttataggtcagcgagaagtgtctattggtcaccaacacttcgtcctttctgctcgaggacgtatcgtgcaaaatgggcgccgccaagcgcgagcagttcggcgggttgcatttcttcaacccggtgccggcgatgaagctggtggaggtggtgcgcggcaatggcaccagcgacacgagcgtacgaagtgctggtcaacttttgccaaaagatagg

SEQ ID NO: 8250 - DNA, 4911 bp, Heterodera glycines
  unsure (1)..(4911): unsure at all n locations
gaattgtacaaaattgttgcatcgtccggcatcaaataagcaatccaccaagaaaaggttgacgtttgtgccgtgatcagcagagaatcgcatgccatcacagcaaaagcaaaatcattgctcttggcattggttttggcacgtaaacattggcgaaaagcaaaaaaaaaaaaattatcattaaataattgataatcaaaaggtttgttaattatttgcctggcgattgaaagataaatccgccaaaaattgcttttcttctcccagcaaaacgacagaaattgaaatgttgtcaaactttttctggaattaaaaattaatgccaattcatattacaaacccttaaatattcaaatccaaattcaattcctttctccgtaaaatctttcaaaacatttagcaacaagttaaacaaataaaataatttaaaaaaattataaataaataaaattacaaaattgttttcttggctggcaaagaccggaaaaagcatttccttttctcgtcctccttctgttccatgatcgtgtgttgtgcatttttggctctccttgtaaattggcttccgtccataaggttttccaatgccgtacaatgcggcaaaacggaactaaaagcgtaaggcacatggactaaagcgggcgcggaaaatcaaagtcaggacatagcatccgcgtcaaaaattgggcaattgaaactttaattgtcaacatttagtaaagtttcggattttaattcaaatatggccactaccccaaaatcagaaaatttagaaataagaaccaaacaaacccctgatgtatagaggccaatatttggcaaggtttttaattttctccatcaacaattgcttttttgacccgacttcaaaactgaattccgatgctcgacatttgtcttgtccacggaaaccctgagatattatactctttttgggatattttttcaaaacttttttttgaaccttctaaaaatttgattcaaaaattcagaataagaatcgtatagaagttttgaatttttattaacttaccaaaagccataaattatgaatacactgaagtctacctcagggttgacgcggctcgtgaaagtcgagtttcggtcttgaggtcgggtcagaaaaaatcaattttttgatggggaaaattgaaaattttgccaaaaaattgggggatgtctntaatttnttatataacaaatccactaaaaattgctcgaaaaattctcattgctctgtcactgctcctccctttggcattgtatgccagtttcagtggtggaaaagatattctacgaaaattttatttccctattattgaatttatcgaattttctttgtcacgacgtgaatttttttggagtggagagaggagcttaatgttggatgaatgtaaaaaagacaattttacattttataatattataaaaaaaattattttatctaaaaaaatttataagcaaaaaaagacatttagaaattattatttaactgcgctttcacaaataaaaattatactttaaatagaaaaacaatttttcaactcaatcaaatttagttaggtaaattattttcccgttttatttcttttcttcgagaaatgtacttcggctttatctgtgcaattttggcattttctctttacatgggcgaaggaatgccaatcaatccgccgccagatgaaaatgactgcgattttactaccgatttggaggttttggcggcatgcaaacaaagatacataaacaggagaagagggctgaatcctgatcaaaatgagccacgcattggcagcaaattggacaagtacaaagaacagttgaaatgtgttaagaccaatgatcataaaaggaagcggaaaattactgacgaagatcgccaagaaaaaatagaactgtataaaaggttgaagtcgaacccgaagcaaaagaatagacgaatgttaggccatttgtccaaattgttgaatgttgagccatcaaaacaaaacgcacaaactgatcagtcatttgagaatgaatctgctggtcaatcatcatcgcaaccatcgacatccgatgcccatcgatcggtttcggaggagcaatcactgtctgatgatgatcaattagtgcctgattattcaacggctgctgctgagaattcgagcaaaaatttgccaaaagaatccaccagtgaaaagcgaaatggatcagaatccaactgatcagatgagtgaacaatatgaagaagatgcgaatgtagatttagtgatactaaattttcacattttcatgagacttgcggtcttttgcatattgtagtaaattttgtgcttccaatgagcctacaaaaatttccaaaaacattttccaaccccctaggaattttttcgaaaatttccccgattttcggtgtattttcggttgtctaggtcaccatgaaggagtgatctgatcaagttggtacaaaagacttatttgatcagcatcaaaagttgtgttagcatgaattatttcagatttttcttaaattcgagattcaaaaagtggtcctaaagatatgaccacccaaaaaataagggtatgtgcgtgcgattggcctggtcgcatgtcggcctaagggaatgaatttatacgcatttagcatcattcgaaagcccattggatactctatctctttgttaaataattttattaattaattttgaaacttttaataaatttctagcactggtcctaaagatatgtatgatattactgtacattttatctccaaaaagtcacgaaaaagtgataaaaaacgccaaaaagtcacataaaaattccaaaaaagcacgaaataaatccaaaaaagtcctggaaaattaggcaaaagtaattaaaaccaaaatcctttttttaaacatttatcgaagaaagtaatttaaaaacgattaattttagcgaaaaaatacatttcaaaagtgttacaccgccagatttttattttatttttcagtaccgccatttcagtcctaatggtataagaaattcagtaacgtctcaaagatagacgacttatttttcagaattttcttcacttaaagtcaaattttgccttagaaagtgtaaaggcatgaaaaaagtcataaaatcccaaaaagtggaaaagtcagaaaaaggcacaaaaaaatgcatgttagaagcttcaaataaagtgttgaccactttttaagtcattttaaggtaatataaagtcagcaaaaaaaagtgacttaaattcccatccctaataattatcaaattttatcccataaattgttaacatttttcttgaatccttaaaaaatgacaaaccaaggatcaactgatcagtaaatctcaataaatcatgaaacttcagcaacagcaatcaaattctctgttgccggctctcattcttttgtttttgtgatccgcaatttcgagaagcgctttttgggtggcagtgtatcaatttgattgtcagcggttgggtttgcggttgatgatgaagcggatgaaattgagtccacccgctgaaatgacgcttttggttggacatgcggcggtgaggcgggcgactgtgagggcaacgatgacgcggagaatgagtgtatccgatttaatgatgcttggttctcggggcttggtttgacaatggcaccgggttctttttgatcatctttggccactggcttagaaagttttgcgtaaggggccgcttcacaagtcgtagtgagcgcaccgatcagcaaataggcaaccaatgccacaacagcaaatcgccgcttcattttaatgtttttttggcaatttgtgatggataatttgagtaatatataatgtttgttattaatgttaacattaaaatggcattttcattgaaattgttttatattgatttttttatgcgaaacgattaatttcgattagaattattgagggatgtctttacaaattatttttgcatgacaaatccatcaaaaaatgctctcaaattctcattgcctgtcacttctctctttggcattatttgacaattttagtggtgggaagcctaaaaagatattcaacgaaaattatattttgctatttattggatttattgaattcttctgtgatgaagtgaatttgttggaggggagggagaagcttaatgtaggctgaatgtaaaaaaggcaattttacgctttattttatgtaaaaaaaattttgataggcaaaaaagatatttagaaattattattaaatttaaataaagtttaataaaacggtattgactccttttttcagatagtcaataagaattaatttaaatatttattttatttaaattaaattaattttattggatttcccaatacttcaattatatttcacacttgattagtgaattttgatcgaacaaatatatttattaatgacgatttgaacgataaaaaatggtgattttgcaatggtttaaatacggcaattttacataggcgggctgacagaaatttaaatgtaaacaatgctgactaataaaaaggcttaaaatcacaaaggttatgaatttggcgaaaaattattttaaacagatgaatcataaaattttaaattttcgtcgctaaggatgaaattagcgacactccggcggccgacaattcactttctgttccctttgaagttgcccttgtagtgattgttcatctcggcaagtccggcggcaattgtgaccaggagaatggacacggcaacattgtagtcgcgaagatgttcggccaaagcctcgacggcatctgctgcggcggtagtcagttcatgggttcgctgccattgtgatgcgcccgttttcccactttcccccattttcgcctgattctgccgtattttgcgaaaaaaggaaggccccttttttcccattttttacccggtttttcctttttt

SEQ ID NO: 8251 - DNA, 3990 bp, Heterodera glycines
  unsure (1)..(3990): unsure at all n locations
agattcgtaacttcgggaaaagaattggctctaaaggtcggttcagccgggctgttgcgtgaaacagacggcttttgcccgtggctgcgtgctgttctttcggggatggtgcgtggactagtggtgagagctgcttgtggagcgcttcagctgcgtgtatgctcgtcagggtatgcacttcggttggcgctgaacgaccagtttagaactggcacgaactcggggaatccgactgtctaattaaaacagaggagacggatggtccttgtggacgttgaccgtgtctgatttctgcccagtgctctgaatgttaagccaaggaaacttgattaagcgcgggtaaacggcgggagtaactatgactctcttaaggtagccaaatgcctcgtcggctaactaccgacgcgcacgtgtggcgattctcggaacctccagtggagcctgttaggagttggcctacaggtcgcgaaagtccctaggtgctgcacgggttgcgctaatccgagccccttccggtgttggctagcactggaggggggggggtccaaagaatacgtgaagcggaccctgtgttttctctgacctcatacgggtatatcccgatgatatctatacagtgttcattttcatttcttaacctgctttttcctcaagagaaatatgaccacattcgtttgccatttcgaaggtgcgacttttgagggagttctcagggacatcgagctgttcatgaacggctcgtggcggcacgcagccgcgcgggccagttagggctggtgccaatgaggcagcgaagaagtctctgaaacgccaaaagcagcgggagaagagagagaaagcggagacgggttagagataatagcatgattgacggcgaagcaatactttgacttccaggtacggaggacggcggcaaaaagcaaaaaggggacgaaaccgatggcattgccaaaggggccgaaaccattgagctggacgctgatgggccgtctgccgtgcaaaaggaggggggagcccctccgtctgggaagaaggcgcggcgccattcgtccaacaaaccggaatagatcttgatgatctcagcaattgatcatattgatctctttttccagttgttgcgataaattatcgtgcattatttcttcgattcctccaaagcttaactcttttcctaatacctactcatgtatacgttagtaggcatgttttatgcaggtaaagatagacctggtgcccccgggcgacttgggatgtggatgatggttggcggagagctctgatgacgccgtagttccggaggaacagttcctactagtgccagcctgggctagtggagctggtctggcgagtgctttgctcgtcagataaggggtggttggggtggtacctctggaatgatgtgtcggataagcactctgccttataaagctgtcgttctgcccaggtttctcctaaccaggttgaacttgtaatgagcctttgggtatctggtcggggtctgcgcggagatagctcgcgaggagctgttattacattattggttgaacgcttttgggtcgtactgcacagataaatatgagaaaaagttttttacaacatatacctgagctttcaaatcatattgctatgtctgtgcctgcgagaaattaccccaaattgcgctctttagcgcagggttcttccggcacatcaagtcataatgggaagggtgtcgcaatgcaccggtgccccagcgatgattgtgctggtaaagatccccctcagcgggggtctcaaaaagggaatttgaggagtgtgcgatggactcccagcgaggagaaagctgtcttcgagtattggtcacggttggaacagcatgccatgttaaatggtagcgaagcccgggggacctgtgccataactagaagtcagtttctcattcattgggatggcgagagagagtcaagatccttgtcggatggtgtgcccgagtacccaatgaggacggaaagggcatactatgaaagggtccgactcttgcgacaacgcggatggcaatgggattgtgctaatgaatgcttagtaattggccaatgtacagagccgtgccgtaagccaaacgtggtagtgattaaggctgataagagtgtgaagagatcgctggttaggggaaagcttttgtccctgccccatgtaatgggtgaaataaaccaagtgagcgtgcaggttgaggtgcctttgccaagtgtacccgccagcgtgccccaggttgaagaagttgaaagcaaaggtgttactgaaacggaaccgtcgaatagaccttctttggaagggaatgcggcggaagaaggattaaggaaaccggagcgagtaaacgtacctgttcatgggataatcagtgatagtgaacggaaagacctgaaagaccggttttggagcgcctataaaacggccaagaggtctgtgggttttagaccggctctaaaaatcgaaccgagtagggttaaccgtgcccagtgggaagtactggattcctgcgttgttgaggtgctcaaaaagagggaaacctccaatgggtaccgcggttgcgtcctccggcatttgaacgttgcagtttatgcggcgggatacgtgctggcggaaggcaacaaggaaaggaggcaggtgatcagacgccagtcggcggaatggttgcttcgccaaaagtccgaaatcaacaacatccgtagacacatcggttggattaccgatgagttaacacggaggaggacgggaaagaacccaacatccagacagttgagtaattttgcatggttgcaaaggcgataccaggttttgggtaaacccgtaagggaaacccgggacttggaagtccaacgagaaagacttgtaagtcgtcttcgattggctcaggaccgagttaactcttccatggatcgtgaagagcgagctcgtaaacgaatgttacccctgcggagaaagttggaagaacctttgggtgactctaaacttgacccaaagcaggcacgaacattttgggccagcctgattggagagcgaaaggaatttggaaaaatcccggagcttgaaaactgggccgaagaagtgaggagcaaagtcaccgatggacaaggtttcgcaagtgaccatgtggatcaaactgtttggaaaaagatactgggtaaggccaggccactgaaggcgcccggaccagatggaatccccaatttactttggaaacggttaccatccgcaaaccaggcgttatttaagtggttaatggggatcaagcggaaacagctcagtgtccccagttggctcacaaaaggaagggtggtcctcctacccaaaggaggtgacccggtagacccggccaactaccgaccaatcgcttgtttgaacacgcagtatagtgactggtatggtgacggcatgggtatcggaacacctgaccacatactctattttgccgattgaacaacgagcgatggtgtctggcacttgggggtgtacccatgctatggtgattgacagagcaattacgtcttatgcagaggccactggactaccgctttatgtaggctttgtggactttgcgaaggctttcgactcagttagtcaaccgtggatcaggtacgctctaaaggtcgctggagttcacaagcgaatccgatgtcttattggaatccttatgaaatgttggagcgtaaggtatgaagtgttcaagagcgggagagtgttaaggagtgcgcttttggcagttaagaacggagtgttacaaggagacacgttgagcccgctgctcttttgtctctcagtagccgttgtttcttctgcagtaggcagcctctttgattttgaggtcaccatacctggacgaggagtgatgcagcagcagaaccacttngtctatatggatgactnntaagggtttgctcntagtgaagcgtccttgaccanngatgtagtaacattggagcgaaccgcttcagccctcggnngtgaaaatca

SEQ ID NO: 8252 - DNA, 5232 bp, Heterodera glycines
ttttcagagatcggtgaaattgccggcgctaccgaagtgaccgttcgtcaaacgtaccgtctcctcctgcccaaggctttggagctgtttccgcctgactttcgcttcgagacgcccatagatcagttgcccacttcctgaaaaggcgcaatttgggcttttcttttgaatgcgtgtcaattcgttcattttttccgttcattcattgccccgccctccttcccccgcttcgtaattgttaatttgggtattagctgttagtgtgtgctcattctctttgcttatcagtcgccacttcgttcctttgtctatatttatagtaattacaaggaggacgaattttttatcaaaagaagtcctcagcttttcgttcaataaattctcaaatatcaagcccagtttccgctttccccctttgttaatgactgtgttaatggaaacaaattttctttttgtttttttcattttattctttcctatcactttgttcgttgttctttggttggtcaaagggaaaatgccgatctctttttggcaattcggaaaacacacattcttaagacatattgtcatgttcgccttccatctttttaaagttccggctttgttcgcgggcgcaaagttccaacttcttttgccattgatggtggaagtgtctttctttttgctgccattccatatgctcgttcgccttctgccgaagtacgcttttcagcaccccatccgccaattccatgggcagacgtaagggacgccactaaacagggaccttcttgttggtggaaaatcacgtgagtgagtgccaatgggctacgcttgcaaggcccaagagttcgccagaatcgcctttcttggacaacgattaacgctttttcgttagtggttttcccaccgacgccccctcgctgtctccgatggatgaggactgtctgttggttttttgtctctgaacgatgtcttcgtggggctgtgccgttctccaatacatttgcgggggcaaatttatgtacggcagcgctcggaaactcgatgagcaaacaattgtcctttttgggcctttctccggtgatcaatgcctttgtttaaggcggacaatttcaattccctgggcagggaagtgattttggtcactttcggtcggtttttgccctttttttttggatttttcagcttctttagggtaccggatgaatgtctttgggctgctcaatttgaactttcgtttttccgatttgaatccgcaaaatttggccatccatggttccgttatttgtccttccccccccccccctcccccgatcactccctacacagatattgttgctagtcttatttggactcaaaatgaaattgcagtttttggcggtgatcccaaaagagtgacgctggccggccaaagttccggctcagtggccaccaaaattatgcgttttgttgccttttttcggctaacattacttacaattaattggttttgatagcttatgtttcttccacggactaatgttctgttccatcagttagtccccacggagtgagtgagaattcgtttctcttaatggttcatcaatttttatatgaatcaaaccagagttaatgagtctaattttcaaagaagtttggtccaagaattccaactcatcaagaataataagcattcaatgtatgtccaatcaatagataatcaacgacactttggtcaatctgatgagccgttacaggggcaagcacagcgtaatgacgggcaccgtttcaaaggagtttctggacggagcggtgctgctcagcccgagaactggtcgggtcgacaaggtccgcctcgcgctttactgtcgtcgattagtctgtcagttaaactatgaaaacggcgggaaggcattgtccgaatgcgtcaaaggctgttcgctgctgattcttcacggcgaaatgtgccaacctttctttaccaatttgaatacgatgaaattggcactgcttttcaatatgcgccgggaaggtattcgttgtgcttcccgtgtttcacttctctcttacgagggcgggaatgccatagtttctttgatggttcagatttggctctcttcccgaactgagtccacggcatgttcaagaccttgtctatttatttggtcagaataaagggattttcactgaaagtgaccgtcgcctccagcagctctactcgacacttttcgtcaattttgtaatcaacggcactttgaacggaggccccgttcaaaatgcgttgccatttcaaccgaaccgttcaaatttctacactctgcaaattcgaacaatcaaagcgattttgttggagacactgcgtactatcatcaaagggcaggtaaattttggactgagcaaataccaaagtcagttaaataagccaataactggtccatgatcctttttatcaccaaagttgcgggacggcgacatttgctgagggatgagtactgatcgacgatcaaatgaccagcaaatatttgtcggaggatttggacttttttggatctcttctgataggccatcctcgtaaaactgtgtgccaatgtcccttcagttgttgggctttcggcattttcctattggcgatgctgtgcacgctttcttttttcattttccacaaatggaaaaaacaacgaaagtcgaagatgatcaaaaaagaattagcggacataacgcaataaatttttaattactgtaataaaattcactcttccatttaccacataaatttacggtcggggtcgttttcgcgtggccgttttcgcgtggccattttcgcgtggccgttttcgcgtggggtacgttttcgcgtgagtacctgtttaggactgaaattggtcggatttgtgcaaaacatccatgtttcgaatccgaacccgaattcggacaaatttcttgactttttaatttttttatttcttgcggctagtatcttctacaatactttgtcagtttggtcggatgtgcatcaaacggaaaaaataattaaaattttataaaaacacataaatagtgaaatgtccgcatcaattgccttttgctcacatctgatcgtgtcaatgaagcgccaaattgttggatgagtgcagctaaattgccgctgaagtttgcgatggaatgcctcggcgaagttgttggtacgatcagcaccatctaaggtgcgctgatgaacattccattcgtgcgggtggaacagaggcgccgtcattggaacattgaaacgcattcggccatgtagttgtccaaaaacctagaaaaataaaaaaatcataaaattcgccttcggacttaaccaattgaaaacgccgttaagttgtggtggaatttgtgctcgaagaacattaaggccattttgaaggtggtgcacaggcagaaaggccaatgaagtgatcatcttagacttctcggcgaaagcaggatcagtgttgtaagcctaaactactaagaaaaaaatttatcatctgaaaaattcaattgacatgtgtgaggccaaggattctgatctgcctcttcatgttgcggacaaggtgaaaaaaacagtagcggtcactgcatgccggaagcactgtgcggaccgcaccgacaattgccaactcgaagtccatcgaaattgtctgcggcgcgaaattcggccatcgttccaaaagaagctgtaacatgcgcgtataaattgcggcacacttaaatgttaaaagacagtagcaaattggaaatacccaaccatctctcctaaaaagattgaacattgtgataacacaattaactttactttgccaacaacacataaatttggctgaaaagcggtggcgtcaatgaaaacgtgccgtccgcgtaaatgtcactcatctgatgggcccaatccgccgtagaagctcttccaaaaatgagaatccttaataccggttcaatgatcagcatttaatgtataaatgatgtctcaccgttgaggtccattttgtccttgaatttgaaaaacgccggtgtccgccaatagaaattgttcctcgtcaatttcagttcgcttgtaaatacgataggtatttggaatttacaactgctccaaattgagaggttcgactcgcggtgcattttcatcacggcgcaaacgtttgattacctaaaaaagaaaataataacaaaattgtttttggatataaacccaccttttttgtggcgtatttgctcggaaaagctgctaacacaggtgtgcatgtgttttgcagcacttgagcacgaatagtcgcagatgcctcgcacgtctcagcagcacgtcgcttgagtccagttacaagtcgctgacattccacatgcgcagcattcatgtcgcacgaatgaactccgaccaacttctgcacaacgttatttaaatccgtgtgcaaacgccctgaattttaaaagatttgcaaaattaaaaataatatattaacatacccttgcatttgtctgacgggccatgaaactcacatcgccaaaatttcttaagtccatctgcgctcaattggtcgaaaacatagagtgcgccgtcatgttctaacttaaatttgtttcgttttgttttaattttttgctgctggtccatattatataatttaaatagccttaatttagtttataaactcattaaaataaaaactcgttagaaaaaagagtgaaacaaattttggcaaaatataatgtgagttatgaattctcttttatatgcaaccacgcgaaaacggccacgcgaaaacgtaccccacgcgaaaacggccacgcgaaaacgtaccccacgcgaaaacggccctcacgcgaaaacggccacgcgaaaatggccacgcgaaaacggccacgcgaaaacgtcctggcccgcaaaatagggacccacgcgtttcggcgctcgtgtttcggcgctcgcgtttcggcgtccggtgtttcggcgctcccgtttcggcgccagctcgtttttccacttaagcttttttctttggcatccaaatccaacaatcttggtatcattcgaaagctcttaacatgctctattagccttatcaaaaacgaaaagtttttcaagcctgtaaaaattttattaagaaaaaacttcaaaaatttcgacttttcgcaattttcatgcataactgttttgataattgtctaatcgcaaagcaatagcttacaaaaagcttctaaatagattaagctttcgaacgacaccaacaatactggatttggtttacaaagaaaaag

SEQ ID NO: 8253 - DNA, 2228 bp, Heterodera glycines
ctatcataaagtgctttttttttgttgggtcagttttacattgcctatacagtttggctttctctttgatggaggccaataaatgcgttggatatttaggggtcaaatcttttttggtaatttttttcattggaatacactcgtttaaggtttctagcaatgtattattaaaggcgttgtatttttcgttcacactaaaatgctcgttagataaaagcgctaattctagaagaaaccataatattaaaaagagaaacattcgacggaaaaaaccgtcgattgtaaaagaagtttgttttttgtagtgtttttggaatagtcaatgtgaaaatttgcgctaaatgatccgatgaaaaaacaccaccttcaatagtacattgctttacaatttgatcatttgccggcaaaactaagtctaaccacgaatttcccctggtgggtccactcgtggcattgaaaaaagaaagcttactaaaaaagtggcaaaaaatttcaccaaatttactcatagaaatgggctgcccttccttccataccaggtctttattcggaaaattaaaatcacccaacacaacacaattacggctatagaatgtttctaaaaatttaaaaagttccttggtttgtctatatgttgtcttgggtggtcgataaacaagcacaaatctaattgattttagtttttgtaattgaaaaaccaagatttcgcaattatattttgtttcagaaaatttaacaaaaaactcaatttctttcttaattaaaacaccgcaaccacccccacgtgttaatttttgagattttctatgacaaaaaacaaagttataattttcgattatccatggactaaagaggattgggtttccctcctttgtccacgtttcagttaacagacaaatttctatgttattatttactaaatttaaagatatttcatcaattttgttgtaaatcgatcttatattaactaagcaggctttaacttcccctattttcggtattgggttattgagtctaacatgtttaaaaccggaaaagctatttctattttgtgagaaatatttattgttcaaaagtgatttggtgaaaagtcaattatttttacgaaaattgggcacctccgaccgcttgacaatgtttccggcgtaaatgatccaatcggcgttgggttcggccttccttcgctctgtgcattctttttgcatcgccctgcgctcctccagttctgccggactgagcgatggtcgaatgttcaggtgttgccacttcccactttgcttgatgtgggcccgttttttgttccattccgccagcagctgcctttggaattttgaggccgggagaatgattttgattaagcgcgggcggtgacctgaaccagcttggtatggaggccccattctatagctagaaatcgggcactcgacgccaagctcgtcgagtacatgcgacaattcgctccggtcggcagccactcgttccgatggtttgtctccggccggctcgggcagtccttgcaccaccacacttcggcgccgctcgtgatcctggatggcctcctccatcattttttgttgacggaagtgttggagttggtggtcttgctcggaaatgacggcctgttgattttgaacttgctgcaaaagtgcaacacaaatttgcagaagttgtttggtgaccgggtcggcactgttgttgtccatttgttgggagattgccgcaagttggtcactaagagcggtgtacgggtagtcagtggtggatttttttgatgcgttgtctgagagaggagaaagatgggaagaaggacgctttccaaacatgacaaatttgaaagaaatgtcacattctttttggcggttcttggactttcaatcgcccttttcatctatgtgtcggccaaaattgacactgttgcgtcggatatgagcgacgagatcattacacttcatgccttgcagtccaaatttaacgagcactacaatgaaatgcttaaatattacaattctcgcattttggctgcccaatcggatttcaattctcgttacgaccggcttcaatcggaatttattcaaattcaatcagaattttggaaaaaatcaaacaagttcacggagcgtatagtcaatttggagttggagttcaagaggtacagtaagttcggctttttgaaaattattacaatttgagtacagtcatgtgctaaagtaaagcaacatattttttat

SEQ ID NO: 8254 - DNA, 1888 bp, Heterodera glycines
  unsure (1)..(1888): unsure at all n locations
gccgccaccaccaccatcacaaatggaagatgggctgccgttgccaatgccaccatcaaaagccaaagtcgccgcccgacagaaggccaagacttcatcgacaacaacagcagcaaaagtcgtcgccacccaaaatgcctgctgctcatcatcatcatcaacagcagcaaatgttcctcagccgtcgtcgtcgtcactttccgccgccgaagaattcgctaaacaaaaaaagcggaataagaacaacaaaaacaaattcaacaaaaaacaggcaagctttaataaaaagtttaaatttcatagcatttaaataattaaaaatattaacctttcatagtcttttaaaattattataaaaatggttttaataattatttttaaaaatatcttccaaatttcttttctttttagccgccgcccccatcaatccgcattcctaagggcaaaacgccgaagaaggtccgtccacgccgcccggaacccgaccagccggacgaccaatatgagcttcgggcggtgttggcgaccgccgaagtggtgtccgggggcacgacacatctgtgtctgtatgtggatttccttggtataaaaattttttttgaatttttacactaaaatttctatttaatttcgatttaatttttaaatttcagattatcaagggcaagaggactggtgtttgtcaacgaaaagcgacgccctagaactgacgcacttccacgacattgactcgacaatggactctacgctccatgcaattgtgggccgaccggtggcgccatttctgcaacaacggcttaatgctcgcccactttttcatcaacgtaagaaaaatttttcaaaatttaaaatttttgaaattttttattaattagtgcgtcagcagcagcaaaatggtccgcaagtggtcgagcaacaattgccatttgtgttttcatcttctgtcgatgtcacgccagcgcaaagggcaaaggtggattggtctttctctctctttctctttctctctcacatttcataaagtctgggtgttgatgggcaggccttccctcgtgttggtccccccttcaatgcttatctcggagctgtgaaaggcggtaggcaggccttcctccgtgttggtccccctattgttttttgcttctcatttctctctttctctctcacatttcataaagtctgggtgttgatgggtaggccttccctcgtgttggtccccccttcaatgcttatttcggagctgtgaaaagcggtaggcaggccttcctccgtgttggtccccctattgttttttgcatctcgtttctctatctctctctctctctctctctcacacacatttcctcgtttctgtgttttgataagcctgaccaaaaatatttaaaaattcaggcaaatgcattgtttgaagcgttcaaagtgcgagaaggattgaacgaagagtagaaaaaggaggaaaagtgcggaggaagcagatggcgaacaacaacaaaaaatggcacaaaaattttttaaattttcattttgtatttccaaaaattaaacggaagtgtcacggggtggctgatttaaccatttgtttttttttttaaattttttcactcaattaacttaatttcacacgttttttattaaactttttgaactttacgggtctttattgagataataatgcaaaggttagaaaatgtcgtccaattaaaaaaaaaggtttacataagatgattaggttaatgaattaagtgatcgataataaaaaggattaagtggatggtctcaaacatatactgataaatgttgtgttagtgttaaaaaaaaaagtcaattacaaaaaaatttttttgttttgccaaaattattcgcaattaatttanatatgtactaacac

SEQ ID NO: 8255 - DNA, 1809 bp, Heterodera glycines
cttaccttattcaaaacgttttaaaaaatcgcgatgaaaaaataaggccaaattcggttttgttttgctcacatttcctcccgtcgttgcgcctccttctcatcgtccaccaattgttccaaatcctcctcttcgtctcccctcgtcgtcccctttccccccgccgctcttttcgcccttttcccctccctttggtcctgcaacttccgtttgactctgtccagtcgctcttctcggcttctttcgtccgcttcctccgcctctctttggtctccgctcgtcgtcaattcctccgctttcactgccctctctctgctcaacaactcatcctccaacacatcgtgcgcacttttccctttaaacttctaaagaaattcaaaataaatcttaattttttattaaatatttaactgaatttccgaactaaaaattaattcgcattaaaagagatttagaaaaataaaaagtacaaatattattgtcagctctgaattaccttggtcagatgttcactttgttcgtcctcctcctcaatttcgtctccaaatgacaaaagcgaagtgttccgtttggtcgctgccattgcgacatttgttgcgtttttctcccttttggacctttttctctcatcgtcctttgtcgctttcctcggattaatgtcatcaaatggattcaccaaaactttggcgctcgtaattttatgtgggtaaattggacgctcatttttgtcaacttcgtattcgttaagcttcaaaagattaaaaattgtgtttccgaccacctaaaataaaagtcagtttgttttacattgtaattttggtattgcccaccttcccaaacactgtgtgcttcccgtccaattcggtggctttgtcaagtgtaatgaaaaattgagacccattcaaattcttttcgccagctgtcccgacacgtccacgccggtcaaatttgagtcgctgatgaaattcactctaaaacagacaaaatcgaagtttttgaaaaaagatgtacaaagaaacaagtgtaaaaggccaccttaaacagctctccgctggccgactcgccgccttggcccgtgccggtggggtcccccgtttgaacgatgaagtttttgatgactcggtgaaatagacaaccattataatagccatccaagcagagttgtacaaagttacgacaagcaatgggacactcccttgcccataattcgatgtcaatgtctccgattgttgtttgaagacagacctaaagatatacaacttaaataaaagcatatcacaatcagcaagaaataattaccttcccatttgtcactggttcattgatgtagaaggaagacattgccacaattttttacacaaaataaaaacggtacttgtccagtttacctgatacttttaacatacatttttaaatgccaataaaggtacaattaattatacatgattttttaagcatggaaattttaaaagactttaatattcgtgacttatttactctcctgcaaaaaccagatactgaatttgaagaatggctccgagaatgcaaattactccacagtaaaaaaaatttgcgaatgcgggctcgaaatgaaattgtattacgccaacaaaaaagataagtatcccatatggaagtgcaattctcgaaaaaaccatgatgggcggctgcttctatttatgaaatttcgtgattaaattgaattctgttttaattatgttaaaatgcataaaaaccatgtataattagtacatttataggcatttaaaaatgtatgttaaaagtatcaggtaaattagacaagtaccg

SEQ ID NO: 8256 - DNA, 2186 bp, Heterodera glycines
  unsure (1)..(2186): unsure at all n locations
ggtacttgtgcagtttacctgatacttttaacatacatttttaaatgcctatacacggcgattcaattttgggctcccagtgcaaataagtttattatttatttattaatcagaacgccaaaactttgcaaaactttaaattttcttgggattttcccttgtaaaaatggaagagccgatctcgagttaaaaactagacagctaaaaaataaactgtgattcgatagagggggtcaaaatatgggcctatgcaaaattttaagaaaattggtcaataggaaaaatttttttcaaggacaacaaaatcaaatttatttgcaacatttttagcataaaaaaggttttttggacaaaaatctgttaacaaatcgcattaaaaattacaaaatttttcccggcggcgcctatcggctccgccggacccccctcccctcgcccgttcaccaaacaaaaaatttgttaaaaatctgatttttgatcccgaacgcaatgaaatttacgatttaaagaaatttaacaaaatgttcttatttttgaccctggatattcgtcccctattagcgggtcatcacagaaaccgttggacatacggtacttatcctttttgtcatccctctgaattttttttaccttgttccccccatttttgaaaaaaatgaaaattttaaaaagtcgttaaacccagggctcggatcgacaatttttcaaaatcagaacagattttgttttgcgaaactgcctccaaattagttatttttaaaattattcgatcaataatgtattatttttttcgcctccgattgtcgaatttaacgatttttggggaggaaataagcaaatcgtaaatttcagtgcattcgggatcaaaaaataagatttttaacaattttttgcgggtgcagttttttttttttttaccagactctagtgttcggtaattgactaagtctatcgtatggtgcacagttgggctggcgtaattaattaaatttggctttagactcatctatacttttaacccaatcttcccaacatggttgatggacaaattaaaactgcgcaagtgcaagaaaatgcaatgaagcgaggatttgtcaaacaggtcgcagtaggaaaaccatgagaattcgctgataagctcgtgttttatttaggttttgagtggcgattccgttgtgttacagcttccgccttctgtccaaggcgcggctcccacggaattgactgtttacttggccaatgtgtcagcaccacgtttggctaaacggcccactgaaaacactgaggcaactcccgacgaggtgccatcagtttataaaaacaggagcataaaataagacattatggcacttcataaatatgtgtaattgagtaagactattattatttaattcgaaattatgacaattttctaattagtccaaattaccattaaacacagccttatgcctgggaagcacgcgaatttttacgcaaaaaaattgttggccaagctgtgctttttatgcgcgaatttcaagccacttcaggcagagaacatggcaaaatccttctcgggtcatccggcacaagtgataaaaaaaatttgaaaaaggcaatttagtctttttttagacattgaaagtgccgaaaatgtttccgaaagtggcgtttcggctggttggttggaagtccgacccggcaaacaaattgagttggaaataattcttgttttttataccttctttcattcagcgattatggtaagaaactgctcgacctacaggaacaggcaaaatcggctaaaaagggtcgttggtccgaagaagagagtgcaaaacatattcggaacattcaatggaccatcgaagaaccaagggaattggtggccttatactctgggaagcaactggacgcggttgtggagcaggtcagatgggggatggagggaggcgaggacgggtggaactgacggaaggccaacccaacatgccaatgttgatcgagaagtgttttgcaactaattcaggtccgcgatggcacaactttccgcctatttttgttgccgtcctttgaatatataaccgtcgcacttagtggaattaaggtgagaccgatgtgtccgataatagttgaattttggggatgaatttgggcacggtatttgttggtanaattacggctctaatgcactttatgagtccatc

SEQ ID NO: 8257 - DNA, 1510 bp, Heterodera glycines
  unsure (1)..(1510): unsure at all n locations
gtgtccgtttggggtactcaaacaattatggggagcaaaaatccaacgcagaattaaagtacaggctatagggaagctattccggaaggattcggtctccccataaatctgggcgcatcggttcagggggactgcctcgaaaactcaaaaaaaattttttggataaaaattatttaaatgatctgactagataatatttaaaataggttatttctcttcctttcagtatccctgcaaagtttggtgcgctcataaagtgcattagagccaaaattactaggacgaacctattattatgactaactcatatatattttactgtgcctatttgtaaaataataaaaggctcctcgggtcggcagcgatggaaaaccggaagaatttggcgaagacgcaaaactttttgtggaattgcgactgcttcagagagatgttaaagttgtgctggaaacaacggcaaatcaggcactcacagggaactgagaatgaaatcaatttgctggctttagaatttcatcggcactgttctgcacccgcggggaaacatcgccgagtttttgcttaaagaggggttggccaagtgcgtcgactggtcaatggccgttgaaggggcggcgccgaaaaactgagagaagccgaacggtcggtgaaattgcttagggattatattcnatacctaaaaagccattataaactttttaagcatcgcaaaagaaaagcgactccgattatggaagtcgttcaccgggtcctcctcaaccgtaaaaaatgcatttactgccaaaggttgtgcaaattcatttctacacattttaaagccgttaaaaccatcagagtctctctcattttcagtggttgaaattggtctggtcgattctctttctgtgcttaaagacaatggagaggagatgaaagtgtacttctcatctttgcgtgcaccgaggtaacaaattatttcaattatttctcaaagttaattcattttaaagacgcgaaggcaccgatggaacttctggcggcgttcagcgccaattcaggcctctctatgacattccgtttatgtttgaagcccgcgagtttcttcgtcgtcgtcttatcggcaaatcggtccaagtgattttcgactacgtacagccaaagcaggaccaattcccggagaaaacgtgctgtacagtgatgttcaacaaccaaaacgtggccgtcatgctcattgagcgaggctttgcacgagcagtgcgtcacggccgtgacgacgacaatcgatcgccacaatacgacgcattgttcgctgcggaggcacaggcagagaaagacaaaaaaggtcagtgtatggatgggccgaagggaaaagcgattattcccaacccaacctctaacaaatggcaaaaacctcaacaaaaatgaatcgagaaaaagccgatcaagatttgtttccctcaatgcttaggttttacttccagccaattagtaaggaccgttttaggaatttgggctgaaaagtgcacagaaa

SEQ ID NO: 8258 - DNA, 3407 bp, Heterodera glycines
  unsure (1)..(3407): unsure at all n locations
ttaattaaggcattgtaatgaggcatttttggtgcgttgggagctaaggaaaaacatgtgacaaaatataaagttcggttaatactaacacaccgtatttattgaattagaccccccccccccccctgaaataaagccctcattttgagagggcctgaaaaatagaggccagtcaggagggggggggggggctttatttcagtaaatacggtatttatacaaaaaaatcaatggataatggacaacgaattgcgcaggaaaggcacttcgacggcggacatttgttcccgattggcggatgggcaacggatcagatggtacgtgttccactccaccaccgattcggcttcttcatcttcgtcctgctttggctgttcaaataatttatttaaaaaaaaacacattgaaaattggcttcaataatatcagtttttcgtggtccggaaaattattgggggctgtcaattgaaaaaggaacaaaatgagaatccaaatcctatcacattttcctaggaagtgagggtggatgacgaataaagcccggatttcctgaaaaattcagggtccggaataatattgcgggaactgcgtgcccggatcggatttcaggcgtttttcaactcctgatcagatcaccaccgcttcatcatcgttcgcctccccctccggcggtggcgccgttgtcgtcgtcgtacttcggcacctcttcccctccggcgctgctgcttccgcttcacttgacttctcctcctcaccgtctgtcattttgtcgtcgtcttcctccgccttcaacacttgggagcgtttgaatgcaaatgccaacacctggccaaacaaattcgggtttaaaaatagggtttgaatacaagcaagggcgagacaggaggggggggggcggctgagggggccaaagcatcggcgtccattcgacccggtccacccccccggaacccaattcagcaacttttttgactttaatttttaacaaattactgaaaaatttcaaaaattttcccagcggcgccctaacacgtttaaaaaaacattattacctccccagttttttcattgttatagcaaaactcgtccagtgagaagcccgggcagtccaagcggacaacaaatgttcgtcgtccatcagcatcgaaggcattgtcaaaatcctggaaaatgtgaaaaaattaattcaatccgaaatttatgggaaaaatttgtatgaattctttcccgaaattacagggaaataaaaagttctgtggccaattttcgggattaaatttagaaaatcgtttttggaaactatttttagaccaagcccatcaaaatttccaaaattttccctggcggcgcctatcggaaccctcattttatcagactttttaaattttactcaaaaattaaaaaaaattggtaatatttagtgaaaagggctaaaaagtctcggattccccccccccctctaatttttttttctagctaggggcctgaaccgattttttcttaaaaatcccttagaattcattcctccacacttctttgaacagtttgagcatttcctccgccgtgtccgcccggtcgagcacaaatttgagacggcattggcgaagatttgccattggttccgccgccgtcgtttgtttctgtgctggaacatttttgcccaaattgacgagccaatgcttcacgtccgcaaaatagtgctaattgtaaaaataagaattttaagaaatttccacccgttttaccatgggaaatacccctggggagacaaaggatggaaaatttttaagaaaattgaaaaaacacaactaaattccaaaacatccctaaattcttggtacagaagaaccatggtttaacaattggcaggccatttttattattaattaatgtattaatttcgctgtgatgaaaaaattattaaattttgtcttgaaaaatttttctagcgtttttttttaaatttttatgcattactaacaataagtttttctcaagaagctttccaaaaattccctgaaataaaatttttttttttcttgaaattttcctatgaaaaatttctgagactgaaaaaacaaacggctccccaatttcgagtatcactaccgaggcctgaatggatcccaaattttttaaattttggctggaattcagaattttttggccatccgattaagtcccgcccgaccatagccaatttatagaaattttatgcacctccaccagcgtgtcgttctcgcagtacacatgcacgtcgtaccgtctgggaaagtcgggctcggccaccaactgaggaaaacgggcaagaaaggtggccaaattgccaccctcggagtagtggaaggcgcccaccaagcgaagaaggcccggcactcgcaaaagggtggccaaattggtggcaaatgtgctttcctgatcgtcttaaaaaaatgtagatgatgaaaaattgtagacctggcaaaaatgccattccttgctaaaaaattagaaaatttcaaatgtttcaacaaaaaaaaactcaaggaaatttatgtaccgtctaagcgcggcataaaattgaactcgataattctgggagaactaactccatccttttttctcaaattttagtaatttttaatggacgctaaattcgtcaaaatgataataaatgagatggaatttgaattataaaccgacccttgaattcgtaggacaggaacaagttcaagcagtacttgcaccgttccttcgacattttctgttgctgttccgccgccaatttgctcagccattgcaccgcctcgtccccaatgccatccatccaattttgcatgccataaatgctaattgagctcacggcgtccgctgagatgggcaaagtgccatcgctgttcaaattgaggcgctaaaatttgcattcgcgtatttcttaacaaaatttaaaaactgaggtaaaattgaaaattaaatttatatatttgactttttcaatttaaatcaccgttttctctccgaaattcgtgcccgagtaaatgcccactgttttcaactgttctttcctctgttgttgttgttgcaattttccatttgcatcgccttcatcaacatcaaccagcttgaattggatgctgtcaactgcctaaagcgacttttttttaattttcaaaaattttaatccgattccaggtttttggtatcccatgatcagttttttagacgtcggctgatatcctaggtttgagctattaaaaagctaacttcgctgtgctttcgtttactcatcgtagcggctgcacgtctggcaattaaaaatttcacaaaatgaaatttattgaaattttaattcaaaacgccacaatttactttaaaaaatatattttanagttaaaggaagggaaacaaaaaatcgtgtgattttcttt

SEQ ID NO: 8259 - DNA, 1718 bp, Heterodera glycines
cggtggttggcacatatcagtggacccaacaaagtaaggctcacaaatgacaaatgggtaaaaatgtcttcattttaataatcctgcgaaaaaaaaacttcatacaaaaatcgattttttcgaaaacttcatcccttttttaggtttccgtgacaaaaagtggcagcagcgatgtaatggaagtgaacacaaaaaacattctgatcgcatccggctctgaagtcacaccatttcctggcattgacattgacgaggaacaggttcattgatgaattttttttaatatttttattttccacctcaaattgattttgaggtcccaaatttccgggtgcgctaataaattttacaaaaaatgttttcagattgtctcctcaaccggagcattggcgttgaaaaaagtgccacaaaaaatggttgtgatcggcgccggtgtcattgggcttgaactggtaaatggcaacattattttcaaatttggcccctcaaaaagatattaaaaaaagttttcttcgttttagggcagtgtttggcaaaggttgggcgccgaagtgaccgccgtcgagtttatgagtgccatcggtggcgtgggcattgacggcgaagtgtccaaacaattccaacgttcattgaccaagcaggtaaatgcctttttaacggaatttcatccaaagcatattggaattttttggtacatttttgcttgaaaatttaaaaaaatggacaaacatgagatttttaactaattttttacactttgtttagggcatcaaatttttgatgaacaccaaagtgttgggtgcgcagcgaacgtccgatggacaggtcaaagtgcaggtggagacggtgaaggacggcaaaaagcaggaggttgggtggggttttttaatgacattttagggccaatttttctattctctactcttggctaaatgtgtattttttgaccaatacatccggatgtactacttcattctccctctcccaccagaatttttttaaaaaaatattctaacagaattattcaagaaaaaagttcttttaaaaaaattttctgcacttttttggaaaaattaattatttacataaaatttaaaaatcgtaaaattttcctcaatttttttccttgaaattttcctttgaaaaatgggtgaaacgacttgctcagattaaatccattgtctctatacgccattctaacattgcccagttgaactgtgacgtgctgctggtgtccattggacggcgaccgtacaccgatgggcttgggctgaacaatgtgcagctgaacacggacgagaagggccgtgtgccggtcaatgaacgcttccaaaccgcggtgccgtctatctatgccatcggcgatgtgatccaaggcccaatgttggcccacaaggcggaggtgagagaggggggggatgactctttttaaatataaaaaattcactcaattttaaaggacgaaggcattttggcggtggagggcattgcgggtgggccggtgcacattgactacaactgtgtgccgtccgttgtgtacacgcatcccgaggtggcatgggtgggccgagcggaggagcagatcaaacaggaggtgaacaaaatgatgggttggagtcggggggtgggtaatcaatcgatcaagggtcaggaaaactgggccggactggtccaaagccttgctttccttaccctacaccgcccccaatagtgtttcc

SEQ ID NO: 8260 - DNA, 2246 bp, Heterodera glycines
  unsure (1)..(2246): unsure at all n locations
gggtgtcaactacaaagtgggcaaattcccgttcgtcgccaattcgcgtgccaaaaccaacaacgacgtggaaggctttgtgaaggtgatcggcgacaaggacactgatcggctgttgggtgtgcatatcatgggaccggttcgtttgcttcttttaattaaatattgcattcaaaaattttggcgttttgtccctaactccaacaaattttttttttttttttgctcagaatgcgggtgaaatgattgccgaagcgacgcttgcgctggagtacggtgcctcctgtgaggacattgcgcgggtgtgccatccgcatccggtcagttggttttgtttgcgtgtgccttgccgtccagggaagcggcaatatttgatccgaaattgtccttctattttcttttttggtgaagatcgagaagacaaaaaaaatttaattttgaaaattttttggagtggggcggctcgagagagagaaataaagtgcacccaaataaattcccacaatttaacaacttatcttggaccatggaactcttctaacgcttttttgataagtccggcttggcccaatggagcctgccaattcgttttccatttcctacgtccctctcatccattcattctcttgctgttttagaccctttccgaggcgttccgcgaggccaacctggcggcatactgtggcaaggcgatcaacagcatttgatgaatgaataatgcattcgcagcactgttcatgatatatggattgaattgtgacattggcacttttttgtttgttcgcgcactgttttagatgttagagatagcaaagagagagagagtacagaaaatgagacaaataaagaataatttaattttaattaaaaacataatcgttctaaagttctcttttttcttagggaccaaaaatcagttgacttacttgattcctgttgtatgtttgcttaaaatccacataaaaaactgttaacaataagtattttctatttattttaaagtggactaaaaagcaaacaaagtaaaaggtcatcagaaaaaatattgagcgtcttttcaatttcgtaaaaatttggcctctggggggtgggcacgatctttcgtattctgtaaaagcaaatttctgatcccgccctcttgtcaatgtacaatatgattgtaggtgtgtattaattcattttttgtcgcttcccattgccctaccaaacaaatacaaaaataaatgtatgtaatggaaagaaatgtcgacccatattgataaatgttgatatgtcccagggatggcattccgaggccccaaaaaagcatcacaaaattcctgttgccaaataaaattcgcaaaaatgtccattgaatgcaaactcggttgtccggggaacaagctcgtcaaacagttccatcacaatgcgtccaacaggctcaccatcgatgtgaatgtcaaaaaagcagcgccgtctctcggcctttgacaccgattttgaatctagtaggatggtcaatggaaaaaagtaggttgttcgagacattcatttctttacacatcaaagtattttaaattgtgtgcgatttctatcaaggatgagcggatcagcagggggatgagatgcaatgaaatacaagcaataacagtattcaatcatttcaaaacattggattgagacggaatcacaaaaaaaaaaatacattttatcaatgaattcaataaacaaaacaaaaaataaaggaaaatttaacaataataaatcaacaaaaaaatcactcttcatcgtctgctttttcttctactttttctagcaaaaacttcacccaaacagatcgtccatttttaaaaaaagaaatcgctttgttttcgaagtcaaaatggcacttataataaagaaattcgttaatgcccaatctaaaattattgtttgcagtttctcaattactttgacgtaaacatacgttaaagagtccttgtccttttcaaggacatcgcatttaaatcccgtatcttcgaattcacctattttgatgtttaaaccatgcagcctaaatttttagtttaaaaaaggattgttcacgaataaaaaacccactgtccaagggtttcttctggatcaccaaatgcggggttgaactgttttttttttaaattgatccaactgtggtcccaaaattgcacgatttgcattgaaaaaaggtccgcccataacagcatttgaacagcctgtgagaatgtnanaaaatttgtacataaaacaca

SEQ ID NO: 8261 - DNA, 2965 bp, Heterodera glycines
ttttttatctctctttctctgctttctctcttctctctctctggttctctctctcttttcttcttttcgctttcctctccatctcatctctctctctctgtctgttctcttactctctactttatttctctctcactcgccctctctttctttcgttctctctcactctcattctctctcccatttcccttcatctctctctccctctctcttctttctattctttctcattttcattttaaattaatttcaatttttaattttcaaccttaataatatatttatttatttttattttaatgataccatattataaaaattttatttgaaaataccgtacgtatcacttgcgcaggttccaataggctttgtcaatctgaccaatggaaactgttgaaattcaaataaaatgcaattaagaaaatgaaattaatgaaataaataattaatcagtcaaaatcaaccaatcaaaaaaatgaaaaaaaaacattatcaaatgatcagtttatcaaaattgcgaatcaaatacattgaaaaatggattagccaaagaaaaaggcttcgaagccgaccgatactcactcattttttgccctaaaaagggacactttagggtataaaatttaattattttaaatttattttattattttaattaaaaattgtttttttaccaatcatttgatatagtcgttcagctcagggaaggcgaactcttcattggacatgttggcacccttctgcccaatctgagccaagcacgtgtggttgtaagtgccaaaagaaagtctgctgacgatcacttgagtgtcattttgctgctcacaagcccacaaaatgacgatgtgttcagtgcctaagagggcaattaattaatttaattaattttaattgggtaattagtgacccaccgagtgcgcaaccgattgcagaacagaactgttgatccgcagcacattcggacgccacaatagcagcatagcctgacgtttcgtagatcccaactttgcaatgggtccctttaaatttaattttaaaatcatttttaattatttaaatttaattattttttatttttaaattttaaaaattaccgtagcaaatccatggcaaagcgaagaagcagcagatgacagacaatgggagaacaaagttcattttctgcttaatgtttttttggtatgctaaaaagttgattaaaaatgtgaaaatgattttaaaaaatatggaataaaataaataattaaaatgaaaaatgaaatgaaaaatttgaaaattttattgttaaataatgaaaatttaatttccccccccccaaacttatgcattcaattcatccaccactttggcttttcatcttcttcttcttcattaacttctttcactcttcattcactcaccattcaacgcacgaagaagaaatttggtcaaaaaacctttaaataaataaaccataataattttacaaaataaaattatctattaattattaaacaataaatatttaatatttatgcactaaattttatttttcgataattgcttaattaatctcattatgtaccaaattaattttattttccgataattaattaattaatctcattattaccaaatgcgagagttgcgcaggcattgaaaatgttcgcatttgcacgcgtgccgaagccggtcggtattggcatttcgcttatgacaatgtcaactgtttattaataaaacaatcacttggaattaaaaaaaacacattaattaatcatgttaattattttacatttgcatttaattgaataattttttcaaattttttttggttatttcgttttatccattttaattttcagttcattttattattcaattttattcaatattttctctcactgtgactcattttggagaggggcataaacgacggattcagcaaatccacattgtccatgtcgcgccccttgcgcgcaattcggcactggcatttgtggccaaatgccaggtatttgttgagcgtctcgcaatctttgtccaaggcacacccccaaaaggtgaaactttccgtggctgtgaaattatggaaaattcaaacagccaaaaaataaattaaaacaaatttttggttgaatgatacgataaattttgggaattttttaattattaaattcattgttttattgctaccgtatttccgtgagcaatttttggggtcattggcaactcgtatgtttgacaaaacaaagcctaagattaagccctaggctttgcttaaaacataggcttaagccaaaagctaggcctaagcctaagcccttagacctagacctagctaaacaattccaaatttttcctctcattggaatttggcttagaaaatacggtagttcaattaatcagttgcttcttattattttattaatattagaataataaatacaaatagggattaatcaccaatttggcagctgaccgcgtaacagtattctccgccaacgcactccttcacctccgtcttaccgtaaccgttgcctcggaagaatccggtcctgcactgtatgccttccaatttaaaaattgagatatcaaaattcaatttctatcatttttccatccacggaataataccacgtgccattcccacactattatttttctttagcattttccctatcatttttttgtgcccatgtgccatgccatgcaaaaactttggcattttgccgcccacttttgttcaatgccaccgccggaagggtcggaattttgtcgggctcctgcgcctcgggcagtttcacgtgctcattggccatgtctttgccctggtccccaaattggcactcgcagcgctgcttcgtcgagtgcagcgcggtgttggacgcgttcacgaagaattcttcgcagccatttttgtccgcttcctcgctacagccccagctgagcagtgccgtggaggtaaaattttctgaaaattaaa

SEQ ID NO: 8262 - DNA, 3192 bp, Heterodera glycines
  unsure (1)..(3192): unsure at all n locations
attcatggcatgtgaatggcacaaatgccaaaatatgagttttaatttttttttttgatttggattcgttttcacacttacgctccatgcaaagcacggaaaagcaatgctgcgcatttggcactttgtcctcacatttcccattcgccgatttttcgcccattttgtgatttgcatgtccaatcttacaggtcaatgcttaattagttgattaattactttaatatttggactaattatgatacgcgagcattgattgatcatggcgatcagcaccagcaaggcaattggcggcaaaagatcaaagggggcgatcattgccatttgaaaaaaaaaaatttgttgaaattaattggattttatctgaaatatttttaaattaatttgacttatttattttcatttttatttggactaataaattgtaaaatgaatgcttttcacatttttgttcgttttccatttggcttttttaatgaatcattcactttccatcccacaaatattctttctgcagccactgttctgatgactaattgaaaatgatcaaaaaaaaaaattttatgataattattcactgggaaaatggacaaataaaaatgatttatgttaattaaatgtgcaaattattttttaattaaataaataaaaaagcaataaaaatgatttggtgccatattaattaattaaaaataattcggtgtcatattaattaatacaatacataataatttagagtgtcatattatttaattaattatcaattgagtgccattaatttcggcttcggtatttttggcacaaatgtatgaatcttaaataattttaattttaagatgttttttgtaaatttaaattttgttattttttgcttttctatccatcttttcgctgtttccaatgccaataacacaatgtaatcaaaaaaaaaattatcaaatattcaaatgatcatttactaatctgaagcaattaagcaaagtgccgttggaatttagaccattttgcacattaaaagtgaaatatgaaattcatggaaattgtgaaaggtaattaattgaaactaattaaaggcatttcaattaattaatttgctttaattaattaacccaattaagtttttcgttgtgttacaaaagtgaattattattcggcaacaaaaattattcatggaaattggcgaaaagatttaaatttgacaaaacattcactgaaaaggcaaatgaagaacaatgtggagaaaatgccaggaaaattcaattttcacttgccaacggaaaagaaattattgaaaatggaaatttattatcagagtaagtgtaattatttaacaatctaaatttataaaaattaggaaaaaatcaacgatttggaaatttttcaaaatatgaaaattaatttaaatttaagtagtgtatttacaatatttcgctgaaaaataacagaaaaatactaattaaggaatgaaaatgttaaatcaaaattattgaaaatattttttgtaatttatttttaaggcaatttttaaatttttaaaaaatataaaaaataggaatgttaaaatgacattcattgttttttacttttaatactgaaaaaattcaataactttgtaattttttgaataataaaattaattaaaatttcaaaattaaatgaacgatttttcattgaaaaaacaacagaaaaaaataattaaagaataaaaaatgttaaacgaaattttttgaaaatatttttcttatttcanncaaagatgtttaaaatgatattcattatttttttataaatttgtcgtcatatcacaaaacttgttctattctttaggaatttgtcagacgaatacatttttcgcgcattgccaattttcgaattaaaatttacaaaatcgaacaaaacaatcataattaacacaggtatttttattattccttgctctcattaaatgccaaaaataatttcacatttaaatttagtctcgccaaaacaaatgaaattgcgctcagaattttttgccgaatcaaagcttggcccatttttagaagaatttgccggcctttggcttttggcggcggacatttggccaaagtttggccaaatgccaacaaaatttgtgtttatggtggcgaatggatgccaattaattcgtgtcgatggcccacctcaaaaatgcgcaactttttatcatttggcatttgaaaagccacgtgccattcgccaacaaatcattaagccactcgtaggaattaattgaattgtttgtttattttttaatgaaaaattatcccaattatggtctcttttaaagatatttctgaattttttcccaaccttcaaagaaatagttttaaacttgattagttattaacggagtttttcattttttttacaagatttttgggtttattttagaagaattattttgtcccattgtataaacattaaaaataaaattaaatttattatttttttaaatcttgaattttttaattcaaattatgtttaatttatacttttcaattagtaataataataatgatcaattttgtattaatatttatatttacacaattagttaaaattacaattattaaatcaattaaaattttgctcagatttccggtggtgcccaaattgacataaagcaaatgccatggacagtttattttatggcaagtttgaccgaatattctgaatacggcagaagatgcactgcttcattaatttcaccaaaattcgttctgttggccgcccattgttttgacaaaatgaaagaatttcagccatttttattgggtaaacaaaattaataattaattaaatgttttgaaataataaaatttggcatttttaaaggatttggctcaaattcgcgagtcttcaagagcccaaattatgacggttttgttgttaaaatgactcgtgtgaccaatttaaatgtgttcatccatccaaaatatacgaaaaatggccttggcttaaacgatttggcattgataaaggcacttaattaattaaaataaataaccaattaattaattaataatagctggaagaatgggtctctcttccgtcaacagtttttcccgtctgtattcattgtgagaagagcacagaaaagttcaaaagtggagaagcatacattgccggatggggactaatggagagtaaaaatgaattagttaataatga

SEQ ID NO: 8263 - DNA, 1379 bp, Heterodera glycines
  unsure (1)..(1379): unsure at all n locations
aatgattttatttttgagatgcttgtaccagaattcgccaaaaaagcccattaaatctgatgggccgaagtgccaaattaactgaatgcgcttatttgcaaaatgatggccatcaacgaatttgcgttgagaagaacactattcagacagttaatcaattttattcaattaaaaatcattattttttaaaatttattaattttttaaatatttataaaactttgaatttttgcgaaaaagtaatcaaggacataaaggacatgtgcagggtttgtccttgaatgcttaaattcttttattttcttagggtgatagcggcggtgcgttattgggcagcaacggcacaaattttgtccaaattggcgttgcaagtgtcactttatgtgaccccttatttggcaaaagcaattttaatatttataaaatttaaattagtctaaattaacgaataattttaattaaatttttatgaattttaaattattcaaaattaaagaatttaaatacaaatttgtttatcataaggtttggtgagcatttactctccgctggacggttgttggattgagcgaattactggtgttgaatgtggcacctaattgatcgatctctattaattgcttttaatgccacaaattaattactaattaaaattgtcataaaatatgtgcaaagataattgaaatgaataaaatgatgcaattttgagatggataaaaaagcacaaattaattcgttgtcgccataatcatttaatttaataaatatttaagtatattttaattcatagtcaaatgggatgaagccaaatttaaattttcagaaaatgaactttgaaattcaattacaaatgctgggtaagcgactgatggatgagctgcaaccatgccttatttgtgattagaatcccggacgaggacggctcccgaaaaattggacactaacagaaaataaaataacttatccataaaatttgcatgattatttcatagatcagatagtataataaagcattttcaaaattccaatttttttttgttttttgctttttttggacgccgatttcatcgaaaaaaataattaattttttgcgtgatttttaatagattatttactaataaaaaaataaataactttcggtgattatcgaggacaattcgtcaattagtaaaatgcaaataaattcgaaatgacaataacttgtacaattttgagatggaccaaaaaaaacaacaaaattaattcgtattttcagacaccttanaacattaattttttaatatatttaattcataaattcaaatttgcaacattattgaaaaaaatgcgataaatcttctggagatggcctatcgatgacaaagaaacatttggaatta

SEQ ID NO: 8264 - DNA, 2429 bp, Heterodera glycines
  unsure (1)..(2429): unsure at all n locations
ctcgggagaacgctcctccttcggtccaacagcaatcgccgttttctttttttgtttgaaattcaaaattttactgcaattatgaagagtggcggggataaagcaacagcagctgaacggcaccagtaactatgggcatggcatatttaatgagtacagacagcatttcagcattgtaattaaagagtggnacgttaaaaatttaccccnactaaatttctttttttaaaaataacattaaaaactcacaaaaaacccgaaaaaacnntaatttcccccttttaantacccttactnnnatattccattttctnctcattanttntactaatancntnntttatattttttaaacanacctttcanncnnatattncnnnaaaatnnacaacaaaaaatcactntttaacaaaaaaaaaaagttggtggaattgccatttcattttacaatgatttatttatccctccccccccgtccgatttattcattttcattccttcagttttttgctaactttgaacaacaatttactctggccatatttgtataataattcaccctgtttagttgatttaatttaaaataataatttgctcactcttattttacagttttattagcagcaaaatttaataagttttttggcctatccttccgattaatgcacaaattttcccgccaatttataaactaattaattaatgtctaattgtcaggtattcagctaagaattttaatttacttacggtgttttaatcatttggacgaatggacgcgtgaaacgaattggttaatttttattttattatttaaaatttatttattgcgaaaatgggcatttcatgcaaatgcttttgggttatgcatgccaccgatccgtttaaaattttcttacattcagagggaagtaaatattcagaactttgtgctgtccaattcccatcagcaaaatcttgttgaaagtttaagggtaatttgtcagtaaaaaagacaaattaattccatttttttggggggagggctttatttgcgaaaaatggtcagtgtcccttaaaattatggattctgctttgaggggaggtggtattttttcggttcacgtgtgtcctaccccctgcccctccatggcgaaatatgtaggtgtgcaaaaaatatagaaatcctacaaatccgggccctactaaactaattacaatctcacattctgagaatttatgtaaatttttcgatataataaaaatgcaaaaaattggatttatataatttgattattttattaaggcacagcaatgtctccgttctgtgaattgggtgcgtcggctcgtaaatatgattgatgccgaccgactcgtccacgctgaggcacacgaatttggaggcattcaattgcctgcgcgaaaacttgaggcatttcgccttgttcgaggtgttaaattcaaaatgaaaaatttatttaccaccaattcattataaatatccaattaaacattctttagagttgctcgccgttgtcactgctcatcccaatttaccacagaatattcagcaaactgttggcttgcccatttccgctaacaatcgtgattatgttggtttagcaaattttaaatttgttttttaattaatttttaatattcccccttttggggctcaaatggccccggatggataagcatgaacatttatccttgtccaatgttggattgtttaataaaatttaagtcaaaaattgaaaaattgccatttatggaaaaatttgttaaacttagagattttttcctttaattaaaatattttctgactaatttgtaagtgaaattctcatgttttgcattaataaaagcgtttgaaattaaatcaaattattttatttttaatttacattattacaggttcgtctgtacccgtatgcataaagatcggatcctcggatcacgacccttattacaagggaaaataggatccgaggatcggatccgtagatgaggctcacgatccgtatgcataaagatcacgatccgcgatccatggatcatttttggtgatccgcggctcaggatcattgtgaattggccgcttaccacggtcgacaatttaacggctgttcgctttggtaagaatacattattattaatattcaaatattttttgttttaattgccaaaattggcattaccattaccagtgttaatttcgaaatattctattaaacataaaaaatttgaattgtgtaaattagactcaattttagtgctgagagagcgcactttgcacctgaacggagagtataatcttggccaatagtcggagatacaaaaaagacaaagtgccataaattgatttacgcttacaatttagttgttaatgcgatttatttttaaacaggcctttcgcccagccgtatccagaggggggggggggggggggg

SEQ ID NO: 8265 - DNA, 892 bp, Heterodera glycines
actccagttcagcgaatagcacttcattccatggaatggcacaacatttcagcgaatggcacttcatcttcagttaatggcactttatttcatccaatggcacaatatttcagcgaatggcacaacatttcagatcatggcacctcatcttcagtgaatggcacttcatttcatctaatggcacaacatttcagcgaatggcactttatttcatcaaatggcacaacatttaagcgaatggcacttcattaatcgaatggcacttcatttcagcgaatggcacaacatttcagatcatggcacctcatcttcagtgaatggcacttcatttcatctaatggcacaacatttcagcgaatggcactttatttcatcgaatggcacaacattcagcgaatggcacttcatcttcagcaaatggtacttcattccatccaatggcacaacatttcagcgaatggcacttcatttcagcgaatggtacttcatcttcatcgaatttcacttcatttcatcgaatggcacttcatttcagcgaatggcacaacatttcagatcatggcacctcatcttcagtgaatggcacttcatttcatccaatggcacaacatttcagcgaatggcactttatttcagcgaatggtacttcatcttcatcgaattgcacttcatcttcatcgaatggcacttcattcatcgaatggcactccagttcagcgaatagcacttcattccatggaatggcacaatatttcagcgaatggcacttcatcttcagttaatggcactttatttcatccagatggcacaacattttagatcatggcacctcatcttcagtgaatggcacttcatttcatccaatgggacaacatttcagcgaatggcactt

SEQ ID NO: 8266 - DNA, 1635 bp, Heterodera glycines
aaaacatttgttattgcaaagtaacagatgaaaaaacacatgtttttgggcaaaacatttgttactgcaaaataacaaatgaaaaaacacatgtttggggccaaaacatttgttactgtaaagaaacaaatggttttgcatgtgttttttcattgcttttgtaaagaagtaaatagtttcgcttgtgaaaatgtgttttttcatttgtttatttgcgtaagaaatgaagaataacaaatatatacactaaaccattttttatatacaagcaattgaataaaacacaacgaatttctaaacatgttttcgaaagtaactaatgaataatatgtgagaaataatttgcttatattggcaaactaagagaagaaatgcctattcaatgtttgtctgaacatttgttttggaaggaaacaaatgaaaaacacacccagtttccatccgtccaggccgcaaccctggataccagcgcaaaaggaccagtggaaagcgaacgcccacgcccacccaactgggaagaaaacccagtaccaggcaggactccacggttttcatggatggcccccaggatattcgaaaaagcgtatcaaatatcctataggggtttactaccgcgtcaaccaaatatgcaaatgtttcggcccttcaaagccgtagacacggtttgaatttcaaaaaaatacgagcgggcctcgtcagtacggcactcgtattttattattttttgttgctaagctcaccagtcagcctttggcgtcaccccggattgttgcttttaattttattaaaatttttggttgcaaaaatatttgtttgttaggaaagaactgaaaaacaatttttggggtaaaatattttatgttttcaaaagaaatgaaagaagaaatgtttgggatgataaaatattttatgtttggcaatgaaatgaaaaagaaatgttttgggggagtttaaatattatatatttggaaaggaaatgaaaaaatacaattttttgagatcaaacatttgctactgcaaagtaacaaatgaaaaaacacatgttttgggacaaaaacatttgttattgcaaagtaacagatgaaaaaacacatgttttggggcaaaaacatttgttactgcaaagtaacaaatgaaaaaacacatgtttggggccaaaacatttgttactgcaaagtagcaaattaaaaaacacatgttttgggacaaaaacatttgttactgcaaagtaacaaatgaaaaaacacatgttttggggcaaaaacattcgttactgcaaagtaacaaatgaaaaaacacatgttttggggcaaaaacatccgttactgcaaagtaacaaatgaaaaaacacatgttttggggcaaaaacattcgttactgcaaagtaacaaatgaaaaaacacatgttttggggcaaaaacattcgttactgcaaagtaacaaatgaaaaaacacatgttttgggacaaaaacatttgttattgcaaagtaacagatgaaaaaacacatgtttttgggcaaaacatttgttactgcaaaataacaaatgaaaaaacacatgtttggggccaaaacatttgttactgtaaagaaacaaatggttttgcatgtgttttttcattgcttttgtaaaga

SEQ ID NO: 8267 - DNA, 987 bp, Heterodera glycines
  unsure (1)..(987): unsure at all n locations
aaatgtattaaaaagcccgtttatacgtgtgtaataaatagtcatcannntggtaaccacatgtcaaaaataatgccgggttctnttatgtaatagaccaaaaaaaatttttaaaatttaaattgatatgaaacaatcccattattccattttatcttttaatataaaatgataatgtaatttaaaataaaatgaaaatatttatgtgattgtcagaatctgatttgtccaccctcagattcccgacatcagatacgcaggaatctgtgtcttcaacgatctcttatgaaaaaaaaattttgacacaaaagaaatcaaaaattaattttaaaaaatttaattttgattttaaactaacaaaaatagattattttattaaaaagatgatctatttttcaatgtcttataatttgtttttgtatatatgatcatttaactgtttaaaatttgtgagataaaataatataatctattaaaaattattcttttgaaattttaaaaaataaatagatagcgattttttgttaactgataaaaaagtatatttttaatttaatatatttgaattatttttaatgattataaatgttgcttaatttataaaattttaaaatatggtgttttgatcagaaatatgttgttggtacgccggtttgtgatttttgacatttaggaccggaattccgattgcggtttttttggccgtcaaaattccgattgtcaattgcacaaaaaagtccttattttttaagactatttaaaaattaaaattttgtacacgaaattttttagacgtttaaaaagcactcattcatttgtctaaacacaaagaaatgaccatcgacatttaaataatgcttactaaatttattcattatttcaaattataccaaaaaacacccaaaaacggggattattatttccattattttttattaccattttaaatgcaaattttttagtgagtctattgataagttcattata

SEQ ID NO: 8268 - DNA, 6147 bp, Heterodera glycines
  unsure (1)..(6147): unsure at all n locations
cgtttgcctataaatgcccttcggcgttgtgttggtattccattcgtcctcttctccttttcctctcctcctctgctccgattggatttcccacaacaaatccttcctccctttcttcgcctcattttgctcaattcgcaaccttttcccttccccccccccaattttagccatttaattcactcaaaaataaacaatcaaaatgaaaggcttcttcgccctgttcgtcttcgccttcaccctttcggtgttttctgccgcccatttgccgcctttggacattaaccaaatcccggccgaataccgcggtaagcgcaagagaaaaaacaatttggctgggcgattaataataatgataattagcgataatgacgccgttaacgtgcccctctcagaattgatccccgaggaggtgaccaaattctaccacgagctgaccgaggatgacaaaaaggcgctgaaggaagtggcagaacgccacgaggaattccaaacggaagagcaggcaaataaatggacacccccctaattaattagatgaaatgacgcctaattgcccaccccttttaaggcaatggaagcgctgaaggaaaagagtgagaagctgtacaacaaagcggtaatttaaagttggatggacaagtggggggggggaggatttctctgattttgaaattcgcttgggaatgaaaatggcgggggggggtgacggaatgatcttcccaacaaaataattggaaaaaggaaacagggaccgatcattggtgatcagtggcccagaaaaggaaggggtggcggattttaaaataaaatggttgttctacccgcacaatttaaggtcgaactgcgcacccttgtcaaggtcagccacaccaacaactcagcttttgactagcgaaaggacaaaaataaattccccaaaacttacagggaaaaattgaccaattggtgcccgacgcgaaggcattcgttatcggggtaagcaatgggcagcggaactgatcagacagaagccgctatttggtcacagaatcggaaacatttaacgctttgctttcagatgatcgaaaaggcaaagggaatgcgcccgaaggccggcgagaagccgaagcttgaggagctgcgcacggcggccaacgagctgatcgagaagtgagtggggaagggaaggacggaaatgacaattagcggtgcctttgaccggtggacaaaatgccgcttttccctcccaggtacaaagcattgaatgacgaagccaaagagtcgctgaagtccaacttccccaagattacgagcgtcatccaaagtcagttgtgtcaattaaattttcaaagtgcatgggctaatcacttttaattactttcccatataactttccctacgtttcagacgagaaattccaaaccttggccaagagtttgctgaaacaggaggcaccggccgcctaaacggcggcacttaggaaggaacggactgatcactgattaattgatggaccattgcgcttaatcttttgccattattttgtaccaaaaaaacagacagaacagaatttgtgcatattcacatacactgataatataatattataataacttttctcagtcttttgtaaatggctaataaattgaattgccaattgacacgacaattgngggaaaatgggcaaaagttttttgggaaggtatcactgatcagatttgggatcaaagttttacgaattataagggcaaagagcagatgtattggatacttttaccacgtgtaagaatgcacttttaattccgccattttcctctccaaaattcgtttttctccgattaattggcncaattaaattaattaatggggctgctctgttggtgtgaacattttgactacggtatgggagaggacacactttcattacgttgtttctctgttgaagtttattgccctgcctcgtgccaaatgccaactgttgcttctgtcccccccaccatttggccaattctccattattttggctaatttcccgattctttttccgtctccccgctttgataatgccaataaaacggaggcgctggcggaaatcggagaaaacaaaaattttcacaaatttcgcaccaaaataataataaacaaaaaaattaacctaataaaaatagattatctaaattctactaatttgctgtgttttttctcattttttttgcctaattttcaatttttttgtgcctaaatttgatgccgaaatttaaattatatgcaattttaaggaaagcactttcttatcatattgtaattatgctgctgcttctctccattttttcgcttcttcttccggtgtttttgactttttcccccttttcaaatgcttttcccgtcctttcggttcgctttaatttttatttttaaatcggtttaacaaaattattgctgttagcagaaaacaacagaaacagcaacaaattacaatgctaatgacccgtggcgatcattgccccccgagttggacatgggacgagtcaaaggtcagtggtcgtgaatgatcaaccaatcagtttgacactcatcttgtgcttcctttttggcccattctcttggcaaaacttcgcttccaaattagtcttggccatcattagcgattaatcgctgctaatccgtctccccatttgcagaagttgtgccggaagaagcagcggatttcttcgatcagctgacgggccgggacaagcaagtgctgcgcgaagtgttggccaaggcggacacttatcaaagcactggcgaagtgctgcagggtttgttatcatcggcggatgagaagcatttacgagaccgtaaaatgtcaacaaaaacaaatagcacggcatttcgacattgttttttcgacttttttccgacccttttgggccaaatttccatttcccccgtaattttcggtccccctatgtgtaaatcttcttctgtaaagatctgcgaaacggttcttcgacactgtacgacaaggctgtccaagtgagttggagcaaatttatgttgttgagtgtatatctgggcttattgcaaaaaggtggtcacttccgttcgtggcattgtcggcaaactcagtgtgcccgcgcggacattcgtcgacgaagttcggtggactgtttttttgttgtttggggtgtgggatactgtacggaaatgttaactgtagcaatcaaaattattaatgaacatcatcggactgctgtgcaacttaattattgaaatttcctgtttcgctttgttccgatataagcgctttatcactgatataataggttcggttcagtctaagcttatctgatttgctggtccattgagttggtctaccgactgatctgttcagcctaatttggtttgatcagtcagttcatagtttatccgtccgttttctgacccaaactcttttgctagcctatttccgctggtttatttttacaccaaatttctgtccaacttttcgggggcaaaaataggcatttcggggtcgggcagaagccaaacattctaatgtttcctgcccctcctttggcgtttcagtccgtcaaacagttgcgcaatgcccttgggggcggcttctctctgtccaatttgaaggcccaagctcagcaattagtcgcccgttatcgccaattggacgctagcacaaaagaggaactgcgcaatgcttttccaacgattgccttcgttttggacagtgagaaaattgaattggcatttcttaaaattcgcataatggcattggcacttctgctaaacgacggcattttcagacccggtcgtacaaacgatggcatccggactgttcgacattaagacaaaggacgaagggccaatgggagagcgagggagagaaagaaatggggagggcgagagaggagaggagggggatagagacaatgggggaatgacgagagggggagggagaggagaagacggaggaggaagaggaggggaggtagaggacgaagtgggcgagagagcggagcgacggaatgtcgtccaccgacggaagaaccgatcggcggtttccgtagcatcaatggcagcactcgcagcaacaagcgcagcactcgtaacaacaaacggagcaatgtcaacaatgatcaatcagcagagaagaagcaacttgggaaggagggacggatgatcagtgatcagtgaccgatcagtccgtgcgtggcactgatcggcagaagcggcgataataaaatcggtctacctcagttgggcgcgctcggttgggcccagcatgtttttccactataactttctataacttttttctttgtcatccaaatccaacattgttggtatcattagaaagcttaacatgtttagaaaatttttctaagaaattgcttcgcgattagacaattaccaaaaaagttataaaaaagctatagtggaaaaacgtgctggcgcccaaccgtgagcccccaaactgggagggctccgtaataaaattaatgttactacaccgcccccttgtttaaaaaatatttcaatttttttaatcttttaaggagttttcggggtcagagaatccaattccggcagccctttcaaagcccgaattcgaataaaaacgctgccaccaaataaattcagggaaaaacgtattaaagtttagctaacatttccaaattgatacgcagtcatattaatacaataaatatgctagaaacacttaagcaaacgcaaaactctttatgcgctacacttgaaccgatttttattgaataaatttgaattttgttaaatttgaatttttaattttattcgaacccgggttcggggttggaaataggaggaaacaactgtcggaatcggttatctaacccagaaaatcccgctaaaagtaattaaacacggaaaaaagaaatgaaacagcaaatggaatgtaatttttatttgaatttagtacccaaatcccggttcctggctctatcacaataattgtgctatataaataccaaggcataaacaagttgaaaatttaattttggattaatatgggcatacggtactttgtatttgtccgtagggtacccgaagcccccccgtgttattttcataatgaattctccgcccatttcgctaatatctgtgaagatgtcggttttggcttaactttcgtacgtgcaaaacttcttcattagttctgttgcttctctgttcgcccccccccttgactcattcattcatttgcattcatcgccaattttccgctctttgtgctgccatatgccatctcctctttgaatgggttcgcttattagtccctaaaacttgtcaaaaggaagggcggggaccgaagatgacagaagcttttccgaagactttaattccgataacgtttcctttcattttcacctacttttacagctgctgagattgtgccgttcttcttttcagcctttgtgccgatttttccctaatagatttttaaattacctaccgtaaatccgctatttgaaggcccgggccttctattgttcaacccctctataagtcaaatgtgaattgcctattttttgtacctctatttattcattataagtagggctgtgaattttagtgacgaaaaatcccgaaatagttaactaaaatagtgagtaaaaatgccaaaatagtgaagaaatagtgacaaaaagtccgaaatagtgacgaatagtgacaaattttcagccaaaaattgagcaaaaataatttttattcactgattgcagttgcaaatgagtcggactgggatttttaagaccaaaaaacccaaaagttacctaaaaaaattttaaaataaaaaatttttgccaagaaagtaaatttttgagaaaatttttttcatttcatagtttgaaaaattttagcttgattcttaggggtgtattttttggttattgcatttttgttaaggaattttccaaaaaatgtcgaaatagtgaaaaaatagtgacaaaacgccaaaatagtgaattttccaaaatagtgaattttcactattttagtgacgaagctccaaaatagtgatttctagtgaccgatagtgacatcagaattgaaaatttttaatgcagaaatgcgttttttgagctcctttcttcaaatcaatcgagcaaaaaatttagttaaaac

SEQ ID NO: 8269 - DNA, 5552 bp, Heterodera glycines
  unsure (1)..(5552): unsure at all n locations
tgcttatttagtcccgccgggaccgggactggcaaaaccgggaccgggatttctgtttttccaaaacccgggaccgggacctgaaaaaaccgggaaatcccggctcggtcccggtcccggntcccgcccaactctacttaaaaagaccatcattggtagagttgaaaaaaatttttaaaaaaatttgaaaatattaaattttccaattaaattcccttctttacatttatattaatattcatttaacctctaaaatgtcgtaaaaaattttaaaaaaataagtgcgaaaataggcacaaaaattaaacaaaaaattccaaacgttgtctaaagtagagatttttcgccaaaatgcgaaattaatgcttgtaaattaatttctgcttctaaatccagtaaattaaatatttttttatttggaaattatttttatatgagtttttccaataaatttttaatagaacaatttattattttaaacaattaaggcataattataaaaaattaggtgggttgagtgattttcaaaataaattcaacaatttctttgtcacttaaagaagggtctcttggtttctttcttactattgtactttttcttcatcttttttggaatatctatttgctcctgaaaataaaagaataaattcaagaaaagaacataaatttaaattagaaatttatttttgctaatttcaatttcctaatttctttttccacttaatgtggggtgaagaataagagcgcaaaaagagaaagcagattttgtcctacccaaaacttatccaccaaaaggtcaccagtccaaaacgacacttattaaatgctgccgacccaaaacatcataaaatcacaaaaatcaaccaaattgaaaataaaattttattattttgtggataataaattttagaaaacgtgaaatagagcacaaatgccaatcctcattataactgtgaattttaatatattttcttatgataattttaattaaagctctttatcctttcttatttttacatcatttatgaataaaaaaaacaattaaaaggaaaatgccaacagataaaaggggaaaaacaaataaagcacaataattcataggctaacaggaaaataagtaaaattattaaaatttttgtttccatgttagtagggtgcgttgagtgatttttaaaaattcagcaatttctttatcactcaaagacggatttgctttcttcattttcaaataatcattcattttgctcattttctcttcattcgaatatccttaaaaaattaaaaataaataattattaaattaaattaaaatttacttttgccaatttcaatgccaaattcctttttccattttcttaatgttttttcatcaatgcccaactctttcgcaaattgcttctgtgttcctttttttgacattcttttaatctcgtcaattcgttcaataaattccttctttttcttttcataataatttttattattttttaaatattgtccaaattcttttttccatttataaattttctgtcgactaattcccaattttttcgcaattttttgctcagttttaacccaaacttttgccgaatattttccccgtttcttaattccttctctaattgcatgaaatttgtgaataatttcttttttttgttgaaaatctaattgatcgttctgataagttgattcattttgatgaaaatttgcattttgatcagtttcattttcattttcatctcctccaattattatttcattttgccattcttcgccaaatatttcagcaaaagttggtcgacattttttacacagattaactgacaatgttttgtcagttgaattgtttatgattaagaacacaaatataaaaaggagaaaaagcatcactaaaaaaagtataataaataattaattaataagtttttaatatttttaatatatatatttgtattaaaattaagctaatttcttcggaaaataattttttatttcattttaatgaatgtggagaagcattgccaaaaaggcgatcaataagtgaaactgatcatcaatagattttcttaataataaaatattaataaataatattaaaataattaaaagccatgaatttcatcataatttcaaatgccatttcgtaattacgtcccattggatgttttcacacttcatcactagggcttcaatttttatttgctgagctccctatggtctgcaatacacgaaaaacaagttgttgttgttttttggtggttgttaaggtacttttcgagttattagggcctattttctaggttttcctttttagagtctaaagcctaaaaaatttaaatttatataaatcataaaatttttacaattatttgtcagtcacaaaacaatcgccggtgctgggggagggcaacaaatgtaaagttgtgcggcgacacgttttcttcccagaaacatttcagcaggtgttttgctgttcggcaacgaatcatttggcgtagtccggtaacttaccaggaaagtttcgatgatttccttgcttggggctccctcccctttcaattttttaaacgttctcttacacgtgtccacgaaccgttcggcctggccgtttgacattggattatacggcgctgaaaacaggtggttgacaccgttgacggccataaatttggcaaattcgttgctcgtaaattgggtgccattgtcagacactaaaatttccgggatgccatgtcggctgaacaaatatcgaagcttttctattgttgccgctgtcgattttgtggccatttcgaatacctccgggtatttcgaaaaggcatcgacgatgattaaatattccttgccgaaaaatggtccggcatagtcgatgtggactctttgccacggtgcagatggttttggccacggttgaaggttgcttttaactggtgcctttgcttccatttggcacggttggcagttttctaccatctgttggatgtcggcgtccatatttggccaataggcgtaatttctcgccaactgcttcattcttttgattcccgggtgtcccttgtggaatgaatgaagagttttctgccgaagtttttcggggatgacaactcggtcggcgtacatcaggcaatttctcgtgatgcaaagctgttctttgatccgatgaaaaagctttatttcggcactttcgtctcggacgttccttggccaaccattcgtcaaaaattccttgactttttgaatggttttgtcggcttctgcagctgcgacaatttccttaaatttaattggcagtgcttcaattgatccgatcaaaatgtcgtcaatttccgaatctgatcggagagatgcaatcactcggtcttcgtcgctttttccctttgcgatcagccttgaaagcacatcggcttgaccaaaatcattggtgctgatgtactcaatgctaaaatcgtatgcgaggaggatcagcgaccatcggagaagtcggttggcactgcactggcgcactccctttttgcttccgaaaatggcaagaagtggctatggtcggttagcaacgtgaattttcgtccatagatcattttatggaatttttgcacggcgaaaatcagtgccaatccttctttctcgatttgagaatagtttttctcagccggtgttagagctgatgaagcatgtgcaattgcctttattgttccgtctggaaatttgtgggagattaccgctccaatcccgagttcggatgcatctgctgcaaccacgatttcctttgttgggtcgtaatgcgtgagcagaagttcagatgacaaaatttcctttattttgtcaaatgcttgtttgcatttttcactccacttccattcgctgtcctgcttcagcagatcgtctagcggttttcgtacaaaacgcatgtttttgacgaattgctgccagtggcccaccattccgaggtatgaacgcagcgatggcacatctgtgggtgcgggcattttactaattgctgagattttctccgggtccggtctccgtccgtttctgtcgatgatttgtccgagatatttgatctcttctcggaaaaacgaacacttttccaatttgatccggaatccccattcttggaatttttccaaaactttcttcaagtgatcagcgtgctctttgacactttggcttacgatgatcacatcatccaagtaagctgtggcgaattcaaattctgccaagatttggtccattaccgattggaatatggctggcgctgacttcacgccaaaaggaagtcttttaacttcatagttgccacggtgtgttgaaatcgagcagatttttctcgactcatcatccaattcgatttggagatatgcatccctgaggtcgatttgcgaaaaatattttcctccatttaaggttgcgaaaatatcctcaggtagcggcagtgggtgttggtggtcttgaagggcattgttcagaccggttgaatagtctatgcataggcgtgcgcttccgtcggcctttttcaccgccaaaatcggagctgcccattcggtgtattcgacttttccaatcacacccattttctcccatcgctctaattctccatcaatcgcttcttgcgcgttgtatgggactgggcgagcctttctgtagaccggtgcggcgtccgctttcaaagtcagatgcgccttaaatttcatacaacggcctaattcgtttttgaaaatgtcgggaaatgtcgctttgagatggtcgatgtgcgctttgactgtcgaattttgtgacggttttggagcttttgtaaaacctcttgtctcgtctccgactctgcacaaattcactggcgcatcaattttggccttgagttcgttcaggagtccaaaagcgtccatcatttgcacacttagcaaatttagcgatcccctttttgccacataatattcgcttttaatgcaaatattgcggaatttgaaatttgcgactccctttccgacgaatttgacttgtgttccatcgaacatgcatccactttcggtgcatttgcggagtcgggggctgccgatgacttcatgtgatagttcatcgatcacaattatttcagccccgctgtcgagtacgaatttgatgtctttgccatctaccgccacgtcggttttgaaaagcgaagcggagttcactttcatggccgttccaattcgtaaatttccaattttcctttttggaattggcaatttgtttctccgtctccattcctgcaccttgtcgcattggccttccaaatgtccattttgggaacatttttggcactttgctgacttatgcttacactcccagtggctgtgatttgtccaaccacatcgccaacattgttgtgccggagcggatgatgattggccttgcttgttgtttggccttcctcccttttgggttttgtgccactttggcttgactgcatttatgcttcggttggccgcagatgattcaatcagctttgcttcgctgattgtcgtcatgaaattgataaaatgttgaacaatttcatcatacttgacgttatctcc

SEQ ID NO: 8270 - DNA, 2073 bp, Heterodera glycines
ttcagaccggtggagtagtctatacataggcgtgcgcttccgtcggccttttttaccgccaaaatcggagcagcccattcggtgtattcgacttttccaatcacacccattttctcccatcgctccaattctccatcaatcgcttcttgtgcgttgtatgggactgggcgagcctttctgtagaccggtgcggcgtccgctttcaaagtcagatgcgccttaaatttcatacaacggcccaattcgtttttgaaaatgtcgggaaatgtcgttttgagatgttgtgttccatcgaacatgcatccactttcggtgcatttacagcggttttcaaaagtgaacttaagtttccaattttcctttttggaattggcaaattgtttctccgtctccattcctgcactttgtcgcattggccttccaaatgtccatttgggaacatttttggcacttcgctgacttgtgcttacactcccagtggctgtgatttgtccaaccacatcgccaacattgttgtgccggagcggatgataattggccttgcttgttgtttggccttcctcccttttcggttttgtgccactttggcttaactgcatttatgcttcggttggccgcagatgattcaatcagctttgattcgctgattgtcgtcatgaaattgatacaatcttgaacaatgtcatcatacttgacgtcatctccgtctgcgccgagctttgacaaaattcgttgtctcaaagttgcatctttcggcgactttagatctgtcaagagcatcaaaaccttgaattgttcctcctttagtgatgaaaacttgaagtcattcgtcgaagtcggtcacttttgacggcaggcatgatttggaatattcactgaatgccgtttccgacaatttgttcattaatgcctttactttcactgcgtcagttgcgtttggtgccgaacagtccattgcaaaagaaaacctttcgatccattctgaaattcgtcccttttcgtcggtcggttcgaagtccgaaatgtcaggcagcaccggcaccggaacattattgttcggattcggttgattgttttgttgctgctgctgtgcggtgacgagttgactaattgcgtccagcaattgttgaatattggcttgtgccattgtcggtggttatcgatcgcttttcagttgagtgttgaaattggacgatgaaaaccgcgtatagcggaaccgcaacccttttagggtctattggttttttgaagcgttgaaaaccgcacctggcggaacctcacccttttagggtctattggttttttgacgcgatgaaagtcggcggtcgaaatgtggacggtttgttttcgtccacttgaagaccggcggcagaatgttgaaatccaaaaattactctcgcctggagatgtaataaatgaataacaaatgcgctttatgtcgtttgctttttagctgactgcgccaattgttcggtccgagggatttgtttaagtccaattaaatatttatttattggagaaggaaaagaaagtcacaataatttggggaacaaatataaatgcaaaatgaatgaagggaagacaatctaaaggggaatgggagcatatttatgggcgagggaaggaacatgaaatggaacagaaatcgattggcattatgtcatgtcattcaaacttcggcggcagtgccccgaacactaattgtgcagtttaaatgagaacatttacgaatttatttatcagtcagagatattcgaattttttgttgaaaatatttttattatgaaatatttaagttttaaataatttataatttttttgtcctaaaatttattgaatcatttatttacttaaatgtttttttaatagatgtcgaaatgattgacgcagcaaatattttaaatttcttttctgagcacgtgcaaaagaaagaagaaaaaagaaatggggaaacaattgtaattgaggaaattgaagagcagagaaatggcggacaaagcattgataagaaagggaagaaggtgatcattgaaataagcagctcatcagaggaggaagaagaggaagaggaag

SEQ ID NO: 8271 - DNA, 1745 bp, Heterodera glycines
  unsure (1)..(1745): unsure at all n locations
gtgcttcgacgggcaaagagcagcggaaaatatttgcggaggcgaaggcgtaagggcaaagtgagcaaaaacaaataaaaatttaaatntaaaacggacggaataggcgattattttttgaggattgcaacggaaaattcaaaatatttttggcatttcattgccatttgtcagattaatccaacactgtaaacttcttctgctggaggccaaacaagaggagctttgcggtcgtgttctgatgacactttgcaaaatggcctccaccgccaggacgaggcaatacggcgaagaggtaaaagggacaaagggacggacacaggtgccgaaagtcgaaggattaaccccggactccaagaactcgagaaaattgtcgagactcgggaaccgaaacccattctcgaccccgcccaaaaaaaagtcactcattcactcgccggctctgccaaattgtctctttttctctttgtcttccctaaaaagattttgtgtctgtttcttccttcaaattataagtgccattctcttcggcattattttccccattttatttatttgatgaaatttttttcagttcagtttcgttaaatttccaatttctcttcagttggtaagtttttcgcctttttcgcctttttcccttttcctttttttcttctttcttttggtttccttttttctctctctcttttctttctctccctttcctttgggtttctttttttcactattttttctgaatttcacttaatagggctcttcaattcgccgcgatttattgcttcgctattttggtgccggttctgtgcaaggaaatggcaacgaacttttggtcatgggaaaagccgagaaaagtgatcattctgcagccggtgagaatctctgatcaactgatttggccatttgtcctatgagtttggccatttgtcagctcgtcattctgtcccctcggcttcttcgtacgacgaatgcctttttggcactgatctgaggcttttgaaggagatcagtctctatgaaatccaatgcaaattatgcgatgctaaggcagttgatttggtggtcgatctgatcgtgttggacccgtcctacgacattttcttgaaaactgtccaattggccaaggcaatgcttcacggagggaacgaaaaagtggaaaagcaaagcaatcaaaagaaaattaaaagcataaaacaatcactcacaggtccaaatgagcttttacaagcgacttcaggagcgcaaattgtccgctcgtttcttcaaagtgttggttcagaaaatgcaaacggcacagaacagagtgaaaacggacattctctgcgggttggcacggacacggcccggtcagtggagaggagaaacagcgtcaaatgaccaattaattatcactaatcacttctcacccttcaatcccccccccctccattttcagctctgtccgccgttgtaagccgtcgctgtgagtgccctcctccccatttttgcttaaaactcggcttttccattccgtactttcatttcccctcagcttctgctgctgtcactccaatgtctgctccgaatggatttggccatttgtccgttccccgacgctccagcctaaaattggccgagatgagagggacgacggggcaacagaagcaaacggcggaaaggggagaagagacgaagccgttgcagacgacgatgagtgtgcctttgatacagcaggagggagagcaacgggaggaggaggagaggac

SEQ ID NO: 8272 - DNA, 2392 bp, Heterodera glycines
ggggggggggggggggtcagagtccatttccattacgagcggccattttttctaactgaagtttttttttactcttcggaacaatttttttttctccaatgttatttaaaaatttttaacgcccgagagaaaaaaaacagggcttattagcactttgaccaagaaaaatttttttatttttttactgggtgggaaaatgttcgtttcaggatttctgctgggggggggggttcccaccccggcaacgaaacgactttttttcgcaccacttttttgcggcgcttttccaaaaactgccgataggcaccgccgggaaattttttgttttgttttttttaatgcgatttgttaacaaattttatcttaaaaatgacaaaattttgcatatttttagcaaattttcaccaaaaaatgaccaattttatgcttttaagccaaatttttaaagaaaattatagacgaaatggaaaaaattgattttagtcgatcgtagttggaatttttaatggaatttttttaaaaactggcaaaatttttggatttttctacccctctcctcttacgatcgacaattttcctcgcaaatcggtattagtcgatcgtaaaaatttggaaccttgcacaggtatggaatgacgattatttgcctttcccaatggtcagcttcttctcgccattatggagtcgcggcacgactcggaaaatgcggacagagtgttgcgaaacatggcacacattaacgggggcgggaagcagctgctgaaagccattgcacaagcttattgcatgccgaacacgcaaaacttcgaattgtttcgcatgcgacagaaattgctgtgcaacgaacaaagtgggagggagaagaacgacccaaaagcgaaggaggggcacaaaagcggcacattttggcggacaattgccacaaaagtgccatttgtcggtccaaaatttgccgaaaagccccaacagcaaaatcagcaacaaatcgcctctccgttatccaagccgacgaatttggcctttggcactttggccgaccctcgcgaagtgagcagaaaattcaagcacaaaaaattggatttgaaattgtcaggttggacacaacatttatattttggcacaccaattggcacggcatagcgccgaattggatgtaatgctaaggccggagaatgccaaggacgaaaacacacgcgaagcattggcatattatcgaacgcacacgggccaaattgaggtgaaaatgagaaattcagcagcaaaatgagtgacgggccaacctacaatcagtgccactcaaagaataaaaatctttggcaaaatgtctttggtaaatttcaaagatcgttcgagcggaccgcaaaatggagcgcgtcatctttccgattcacaacatttgcgcctatctgacctccgagaccaaagagagtgtattcataaacacggaaaaggacgcgcaggggtcgaaagtgacggactttttcgaacgatggccctccctttacgaggaaatgaaatggcagcgcaaattgcagggtgattagtgccactctgatcagtgatcacccatcattgtctcttccgatcagatcgcctttggctgagtgcatgcacaaagcgtttgcccctgtggggccgaatgggctttttcatggccgttctgatcaatctgatcctcgccgttgcatatcccttcgatcatgaggactcatcagcagctcgtcctcgtatgttgtgatccttttgatcgtttccccacctctgatcacttcctcccgctttagtcgcactttctcccagcaatcccttcctttacatgtcatttgctgccgctctgttccacctctattcgtcctcctcctcctcgtcctcctcttccaactgctggtccctccctcgctcccccccccccactttgtgccaccctttcccctcccctcaggcaatgtcttggcctttccctatcctcccaactcggcattttcgctctgatggttagctccacgctgttgctgatcgccctgctcggtctcctcccctccctctatccccccccccgaaatgaaaatttttaaaaattttccagcaaataatggaaattttttcgaattcccccccccccaaacgaaaatttaataggcaattttcgtaacaaataacactctaatttcaaaaattttcccggcgacgcctatcggcaccgccggacctccactttccactatttttacaagttttgtgccttaaaacggtcaaaattgggtcatttttagtgaaaaagtgcagtttttaatgaaaaaaagttattggttaaatagcaaaaaaaaaaaaaaaaaaggtcttcaggtcgggtccccccccccccggaaaatgtttctagatacgcccctgc

SEQ ID NO: 8273 - DNA, 1646 bp, Heterodera glycines
  unsure (1)..(1646): unsure at all n locations
catcagcagctcgtccgcgtatgttgtgatccttttgatcgtttccccacctctgatcacttcctcccgctttagtcgcactttctcncagcaatcccttcctttacatgtcatttgctgccgctctgttccacctctattcgtcctcctcctcctcgtcctcctcttccaactgctggtccctccctcgctcccccccccccactttgtgccaccctttcccctcccctcaggcaatgtcttggcctttccctatcctcccaactcggcattttcgctctgatggttagctccacgctgttgctgatcgccctgctcggtctcctcccctccctctatcttcttggcattttccaggtcattatcgcaattggtccccaaaaatggttgaatttcttcggttcagttggccaacaaatgtgtccatttggccagttatgccggcaatcggggaattgttgagcgcaattggcacgaccttctgacggactccacaatgctttaccatggcggctatttgctgtgctgtttgttcggtttggtcgtccacccgttcatttacgctcttctcgtaataactaattagttaattaatcattgtccaatttccctcttgtttttcagctgtttgacgtcgtggccagcgaggacactcttcgaaatgtcattcgatcggtgacgcgcaattggcagtccatcattctgaccggcttgctggccctgatcctggtctaccacttctccatcgttggctatttgttcttccaacgcggtgccctccaaaatttgccaattgaatttcttcaatttattccttcagactttcgcttggaagtgcacaaactcagtgcacagcgtgcagaggaggggcaaaagccatgtccaaatgatttgccgtgcgaatttcgttttcattgcgacaaaaaaagtgacggcgaaaaatgcgacggaagggaaaaatggcggagaacggcggaaaaagaaaaggaggaggaggaagaagaagaggagctgaagattccctcctgcgacaccctgctaatgtgcattttgacaacacttaattggggtgaccatttgggaggggggaaaactcattcattaaatggtcgtaaattcattcaaatgagcatttaggtctgagaaatggcggcggaattggcgacgttttgcgcagtgtcggccctcatgtgagtgatgaaaatgaatgttggtcgaaccatttgtaaagcctgaataagcgctaactcctttgaacagggggagggaaaagggatgggacaaaatctcgccgcaaaaaaatccatagcctggcaattcgtacataggcttaggttagaagatttaggggtgcacctcatttccatgagtcactctgctggtcctactgtatctggctggtcccgtcttacggtcggactgctttgcccccccccattgactaattttccgtgcgttttaaaaccgcacattggcaggagccgtatttcatctggcgcattctgtacgacatgactttctacgtggtgctgatcatcatcgtactcaatttgatcttcggcgtgatcattgacactttcggcgatttgcgtgccgagaaaaacgagagggaatttgtgctgcgaaacaattgtttcatctgcgga

SEQ ID NO: 8274 - DNA, 4571 bp, Heterodera glycines
ggttattttacaaaataatttttggaaggttagggaaaaaaaaataaaacccccaacaatggccttttgaaccctttttgaaagacgttattaattcaaattcttaataaaaaattttccggcttaaaaaaggaaaagggatgattaaattctaaagatgcaaaaagcaaaaaagcgtgcaattattttgggttttattaaatttacacagaaatttttaaatccaaaaaaagaatgttcaccgatccctaatgctgttgttgttgttattggcgacggcgaccttgccttgcgctatgccggaaccaaggcattttggacctgaaataataaaatattattctcagtaaaaaatagttgaattaaattaaaataagtataaatttaaaatgaattaaaataatttaaaaataattaaattaaatagaatttaataaggaagtcgcatagtaataaaattggcgaaaattggctcaatcccggggtgaaaatgacaaaatgatcgcattacactctattttattagccattttttgtacgtccaaatggtgaccttctccgttccgatcggtgatcagctgcttggggcgattgctttagcagcattgcctttcgctcccaccgcccctcgcaaaattagcgatcaaataaatgagcaaaatacaaaaaacctttatttgctagcaaagatcccccgtccaaaaaatcaccgaaaaatctattaaatgaatttggaaacaaattaaggaagattttttagcaattccgcccttctctgttgcgatcggtgatcagctgcttgggagcatagctttaacaacattgccgctctcacccctcccaaaatcgtcgatctaatcaatgagcgctcaaagaacatataatttttggtgaatagctgttagaaattaattacgattgcctaaaattcgcccatatcggcacgccggccctccaaaacctattttttcttaaaaaattcgcccaaaatccctaaatttggtcatttttagacaaaatctgtgtaatttatgccaaaggaattgaatcgaggcgaaacattgactaaaggaatgtggagccaacacacattcataaaaattaattttttgtgaattttttggaattaattcaaatcaaacccccgccccagcgggggcggaattttcgtgcccccgtctccgcgactctgacccccgcccccgtgaaaagccacccccgcccacggggtccgaaccctattttaaatgatcgttatatttatataagcctttaattccgtgaagctcgtcttggcaaattggtcgtagacaaaaaattattttgcattggaaatggcaccgacagacgatgctgcggtggaagaacagtagtggaaatatgggggaacatttgcggagtgtttgcgggagacgaaacgccaaaagacgcgctaattcgctgacgaattgcactaaattaaaaaagtattaattaaattatttccatttttgcgaataaaaaatgtataataaaaaagtagggacaattcttacgcgttgacggcaaaataaatgatgggattgaccgccccgttggcaatccacatgaaattcagcgcacattttgccatttttgtgtttggcaaaagccactgaaaatgaaaatcataaaataaaataataaataaaaaacaaaaaaaaggaattaaaagatcacttcagagttgtgccaaaaatagttgagaacggtgcaataaatggtgatgacaaacgcttggatgagcactttcacttcagcaactgtgccggtctggcgcaaaacgagcccattgatccgcttaagaaggaggaacttagcagggaaaggaagtgatcgaaactaatcagaagacggatgatcggtaatgattaaaattattcaagagggaaatgatcggctggattgaaatgaatttaaactgatcagaagaattgaagtgtctaaagataagggattgagaatacaaaagaaagaaagtgatctgaaggaacggcaagtgattggaagcattggaactgatcagaagacggaaagtgatcggtagattagaagacggaacatccatccgaaaagacagaaactgagcaaaatggaaagtgatcggaagggattgaaatagttggtcagaagaaagtaagtgatcggtaacgattaaaattgatgagaaaaggcaaatgatggcaagggattgaactgaatgatcggaagccgttgcaactgatagcagagggaaactgagagtgaaagggaatgaataaatccgagagaaaaagttgatcggtttaccaattaatttaaccaacatcctttaattaaaaataatttcggggataatggtgactaattaatgcattaagaaagtaatgctaattactctccttgatcaactttataattgggccaccttgtagagaattgtgaagaaaattgcggcgtaaatgaggccggccgtcggaatgccgcccaattcgatgatttcctccacaatttgcacccaatggctcagcggccgactgtcgtcgtaagcccacgaaaattggtcgggccaataggcaattgcggcccacggggaggaaagtgccaacgcaaaactaagcgagaccaaagccggcaacagaaaccacagctaaagccaatgggtaattaaatgattaaaaataatcaatacaaaaattttaaatataattacctttaaattgttttacctttatgcaaattggtgagaatagcaaattatccaaccgatcggacgtcaacacaaccaaacgattaattgccaaaataatagtcacaattgtgtaaaatacgtaactcggcgtggcaattgcgccaagcggctgaacaaagcgccaaaaaaatttttaaatttatttatttcttttaaacagcttttaaaatttgtttaaaaaattgcctggcaaatccctaaatggaaagtgtttggagaaattgtgaagaagccggtgacgaaatggacgcacgaaagggcacagtcggcgaagcaaagtgccaacataaacttgtagcagctcaaccggaacagctcattgtccacgatgattatcttgagaaattattttaaaaaataatttatataaattttatttaaggaaaatgcaaaaataaaattaattttataattcgaacccgaatgaccgccaaattgaccaccaaacacagtgctgaaagcacaagaatgcaaattccgaccataacaattattaattcgttcaaaaaaacttccgacaataagcttgacattggcacaaaattaaagtcaacaaaaagggtaatttaataaagcaaaattaaattaatttgctgaaagaacaaattgagttggaagtttagggttttctgtcgtaatgtttcgctaaaattggttaacttttgaaattcaaactaatttacatttcctttttgtgactaaaattttaacttatcgtgaattttaattttccttcccacattttcttgtctcattgactttgcgtgccgtgagaataattaattacacctttcaaatttcaatttgcgttattatgggtttttgctccccataaatgtttgagtaccccaaatagacaattgaaaaaaatgatttttattttttttggttcttcgggcagtccccatgaaccgatgcgcccagatttttggggagatcgaatccttcgggaaaccgccaaatggcaattatgtaaattcgtcattttgtcagaattaaacaaatgagacttggaacaaaaagttcaattttataaaaatgcaaatttttacaaaaagtgaaatgccaaaatgggttctccaaattgatcctccaattttcattcctccatcggccccagtgacgggtccattcccgaaaggagcatccgatcaaacaagtccgtgccgtcttcggcagtggtcgagttcggcacttccgtcgtggtggtcaaaagttcatcggaaagaaaaggataaatttgaaaattagaaaatcaaatgaataattaaattaattaagtgttgcattttacttgtttcctcttcggtcgaattgtttgctgcacttttgttctccgcttcttcttccgtcgcatcccttcggattcgctataattaattaaattttaaaaagcaaacgtttattcgataaaaatatttttaaatatttacattatttccatgggttaaatgcagcggaattagtccgatcagcagaagaagggacacaaaagaagacatagcaaaatgaaaataaatattaataatttaattttactgtttttatttggtatttcaaattttaaaaagattgatttgtttaaacaatttcctaaatttttgacctttggaaaagcatttttaaaattgaaggttcaaaatgcaaaaatcaaaaagtgaaaatgaatgaaatgggccaaaaagacactccaaaagcattcactgctcaaaatcactcaacataagctgcgagttgttttacacaaagaacgaaacgaacaaaacggaggcggaaaggttttgtttgcattattaggaaaagggaaaaaataatcatttaa

SEQ ID NO: 8275 - DNA, 1353 bp, Heterodera glycines
cagtttccaatttcattttttttctaaaccaaaaaaactcgttgttttaatgtattaatttttgtttgtacgcctttctcaaaagcttaaaaatatataatcatcttgccaaaaattaagttctaaccaatctgtacagttttttgtacagtatgccaataaaacattaaaaattatttttttcaacagatttactattaaaaatgtcctcttccccctcaatgccatcaccacacgaactgatcagacaattgatgccgatgagcaatgatctccaaaacagactccagcagcagaacggcacggccattgctcaaatgccgccgaacggattaaatgtttgtttgaataaaaattcgaaaaaacaaaattcaaaaatcaaaaaaaaatttagattttctccgcccctcaaaagccctttctgatgccgccgcctcttctgccgattggcccaatgcaaagtttggcacacctccaatttctcggccttttggccaaggcccaacttttggcacaatgccaaacggcggcacagcaaagcgtgccgggcataaataaggcaaaaataataaaaatcaatttaataaaaatgaaattaacgagctgaaacgcctatataatggaaatgtcatccttttatttttacagctgtgaaaacctaaattaaaatattgctgaaaaatattaaaataattttaataatagaaattgaaatttgctgaaaatatttaaaataatagtttaatcttttaaatcgggaaaaatttaaataatttcaccatccccatatccaatgcaaatttttgttaaaaatatttaatatctttttaaaaaattgggcaatttccaattgaaattattgccttcctattcagctgtgctcttcttctccttacttaccaccgtatatactctttttatatgccagtctccattaatctgccagcctccaattatatacccccttctgaggaggttgaaaaataatataccagtctccatttatctgccaggggggataaatagaattttttaaataatttttttggcacattttccaaaaaaaaaattaaactcaattcaacagtaaaagaaaatgacacatttttgccattttggggtcaattctcagaagttgtttaacagaaatgcaatagaaataatttttttttgacgcgatgacatttttggcgacatgttcaaaaaaatttcaaaaattttccactaaataaatcagctgaaaaataatctcccagtctccattaatctgccggcctccaattatctacccccttctgaggaggttgaaaaataatataccatggcatataaaaagagtatatacggtatata

SEQ ID NO: 8276 - DNA, 3393 bp, Heterodera glycines
tttcgatatttcattttgcagcccttcaagtgcaagtactgtaaccgtaccagcaagtggaaggccgacctgatccggcacgttgcgagtaagtgccgagatttgaatgtttgggaaatcaaatccatactcccgaattcgagactgatcacaagaaccaagtttcagcagagatcttatatttgaaatttgccaattatgaaaatgaatagcaaagggacccatttttggtccgaaaatttttggcttgaagaaccctgttggattacaaaagtttttgaaaataacatcctaggaatattattttagaagagaatgatcccaaattatcttaaaaaacaatgcgccactcttcggcgccaaaattgcggtgcccgatttagctatcctgctaaataccattttatcccaataatttgtttgattcaaaaagtgccaaaaaaaatttcaaaattttcagaaacccacggcattcgtgtggtgtccaagtacagtcggagcaaagcgttggagctggacaagcagcaacagaagcaattgttgatggtggaagaagcggtagaggaggaggaggaggacggcggaagagcttttgattcatcttcgtcatgctgtgacagtgaaacgccgacaaaggacgagaacaacaatcaaaataaggcaaaattttaaattttcaggggccttccgcaaaattttcaattttttaagagcctttccacccataaaaaataaatcaaacccaggcctaggcctttaaaatacaaatgttttttatgtaacgaaaatgtcgctaaaaatttcaattttcccgagcagcttccgccttttgccgccaggccacaaatgttttaatttaggctaatttctccgtttctctgccgggccactaattatttttaattagacttaattgttttttttgccgttgcttttccgttattccaattaaaaagcaggaaagttttatgtatcatttttgggcaagaattctgtttataaatctgaaaaatgcaatttttcattagacggcgccaaatttttgaaatattaaaaaatatatggatgagttggatcataccgtttttttaataatttaaaatccttttaagtctggcgatgcgtctactctgctgaactcgcaggagcgcaaggcacagcgactgttgtccagcatggcacgcaacaagcagctggtgcaacgccaacaacagaagcggcgaattgatgcgatagtggagagcggcgatgaactcgctggtgatcagcgaccggtgattgacaactcgcaacactctgccgaactcgctgatcttttgtcgctgaaacgagagactgaactcgctgatcacctgtcgctgggcttgcagcacaatgccgaactcgccgatcagctgtctctgaacagagaggcagaagtcgctgataagctgtcgctgggttcccactattctcctgcactcgctgatcaattgtcgctgggcccccagcacactgccgaactcgctaatcaaatgtcgctgaagagagaggcaaaagtcgctgatcagttgccgctgggtcctcagcacactgccgaactcgctgatcagccgctgtcgttcccgaactcgcacgcttctgctttcgctgctggctcagtcgctgaagcgtcgaaactggcacactcgctacatcagcaacagcagcagcgtttgcagttggacgcgtcacttgcactgcttcagcagctgctgaatattttgccgccggtggcaccgccgccgccgccacccaatggcacagaacagtcgcgggacggcaccgctgggagcatttttcggcctaaaatggcatgaaaaattgacgaatataaagatattgaacacccatatttgtctggcatttcttttttgtattgtcgcgatgcgacgaattttctgtccttttaacgtgacattgtagggccatgccgggatgaatgtttaaaaaattgaaaagatgaaaatttaaactaatttttaaaatttatggtttttaaatcgaaaaattgtcaaaaattttttattgggctgtaattttgccttaacaagtcggcatttatagagtttttttttcgggggagagaaaatcgtgccgggtttttaggctttgctaggcttaacaaattttcgcttgattaattaaaatttaataaacattttggccaaaatatattatgtaaaaaagacataaatttagctagattttaatttattcatgagaaaaatagctcaaaatgtgagcacttatgataaatatgcggtttaaatgatttttatgtttttaacagtgaaaccccgactaaaaaggttgctgagtttttttttgtcgagtttttgaaaaacccgaatttttgaaggggtttttgagaaagttgacaggttttttgccgaaatcatctgctgctggacttttgaatatgatctattacaatgtcatttagtgatcagaaatttgacctctgctttattttcatttcagtaaaactttatttatatataaaaaaactaatttggcttattgcgtttagaaaaatcaaattaattaattaaaggccgtctcatttaaaagatttactgaaatacttttggaatccaactagactttaggtaaatcggagatgctgtttccgaatctgccgtcagatttgtcatgggattgcaaaaatctctgattttgtcaaccttttatttttagttttttccataactttttttttactttaattatattgagttaaaattagcattaatttgattgatatcgctattctgcatcgaatgataccaaatacataattttatatgttttaaaaaattagtggtttactttttttatgggatgctaatgatttcacatttaaaaaaattgttattagaaaaagtctcatgaaaatgaattatttttatcattcttaatagccccaaaattgcaatttaaaaaaaaaatttgcgaaaaatccacattaaaaaattctaaataaattttaaataattctcaaaatttcagccatccgattgccttaattaatgcccttttaaataatctttttgctgcaatttgtcctttaaaagtcaaaatttcatttttctaaaagctttctctccagagaaaaataatccgttattttcttttataattattattgctgggatataataaaattagctgccaacaaaaagtgcactcacaatggcaatctgtttgtgcgttttttttgaaaaaaggaatttctggcattttgtcgcgccgtcaaaatcactcgtgcgcatttgaatggtttagtccacaattaaacacatgttttggtttgtgccattcccagaatgtaaagcacaattcggagatcattgttggcacattttcattact

SEQ ID NO: 8277 - DNA, 2414 bp, Heterodera glycines
  unsure (1)..(2414): unsure at all n locations
agcagtagcgggcgaagatgacatcgaagtcggcgaaattcggagcatcgggtcggtgtttgggtttgatggggcagcttttttttacanaatttgacaggaacatttaaaaactatttaaatattaatattccatcctataacctcttcacattgaatgatttagtgactctgtgtccggtggcgcaatttctgtggattccaatttgtatgcgaaattttgggagcttcagaagttttttgcaaatccaaatttgctctttgaatacaatgcgttcaaagattttcataaggtatttaatttaaatgcaattgcataaatatttcggagcttttccatttgctatgtttagactttgtccgacgttttggccattttttcagccaataaattggagagagtgcagcaaaaacgaaacaattcaccaacggtccatcagataaaggcaagtttttggaggcacatatgcgcaaaaaagcaaagcaatttccaatttggagtgataaaccgattttgtcaaaaaagggcattttgaaaattcggagacaaatttgcgccgatagggctaaataagtcgtttcaaactgttttgttccgtgttaaaaaattatatttgggacaaatcgtccgaatttgcttcatgttttgaaagcgaggaacaaataatttgtttcacatttcgttcatctgattcattagcactttagtttttcatgacaaagaacgggaatggcttgtacatttttgcattttgatgtgataattaatgtgtttatggtgttcaatggctcgtccggtgccccaaaacaatgcaaaattcactgagtctcggaacgacttatattttgtatcgaaatgacgcttaatggaatgtgcacccataccgacagggactgtcagcaattcttggaaaatagttaatgaactgcgttaatagaaatcagttttttgtttccttttacagaattaattggaacttttgatccctttctttcatatattttgtctcagaaacactcaatttttaacttttttagacagaatttccgcagaatggtggcgatgtgcacgtaaaaatggaaattgacagcgaggagcaggcgggcgaacaactgcaatttttcgccaaatatttgacaagtcaaaaagtgagcggtgggagaatgccattcttttcactcgacgcattaggaaaattaaacctctgtctttttgagttttgaaattaggaaaacaatttctgtcttacaattaacatgaagctaatggctccgtctttgggcaactgtttgggtttttatgttgtttctttcagttgttccctttgcaattggccgactcgcagttccgtcgctattttttactccaatatttgatcattgccaattaccttctgctcaaagtcaaactgaaagagtgcgtgtttttaggcataatcaaaaaataaatattgtgaaagtataattttttcataattttgcatttttcaaattaagtacctcacaatttcagcactttcacgctcaccacgctccaggaagaagaggtgcgcgagctgaccgacaaatgttttgcacttttgcgtgagacccatcccaacgggtcgctgttcgccgatgcggtgaaggtacaccggttttcactaaaactatataattttgaaaaatttacaaattcaacatcgtaaaaaataagaaactgaaaaacgaaatagaacttcgtaaaaatttttgttgaaattttaacatgttgtcgattattaatattatcttattttttgagccgttgtatttttttaaatttcagaaagtgctcagccgtgaacgcctttggtccacctggaagaatgagggttgccctgatctgatcacgcccctgctgaacgcacaaaccatcgaaaaatacgcagcatttaaacggtaattggacttattgagcaaagaaaatagagactgaatgaaatgaaaatgcaaacaatttttgatacaaaaattaatttttttttaatagaaatattttatttattctttcaacattttttcaatttttttcatacttaatgaaaaaaatacattcattaaatttgaataaaaatcttcaaagaatttttaaatcaaaatcttactccttttttaaatttatcgcaccattctttgcctctgtttgcagaaaggcggtggcccaatgcgtcgctggccaattggaccttggcaacaaagaaatgacgcgcttgtggaacattcagccgaacaatttgctggcctgccggtcacagaagcgcaactgcacgcccgaccttgtccagtttctgagcgacgcgcttgacgagttggacccggaacagcaggtggacgagcagtaccaaagcgtcaacgacgagaagtaccagtggatgggcagccgctttttgctg

SEQ ID NO: 8278 - DNA, 1284 bp, Heterodera glycines
aaaaaattatatgacaaattataacgaaatagacctatcatctcaagattattttgaattctttaaatttattttttagcctcgattttgttcctagtttaatccatgttttacgatttgaagtttaagagctccaatgttcaagagtccaacagagtgccgaccgtggccaatgcttccgctgtttccacttcaactgcatctttcctcaagaagacaattaaactgactgcggaaaatttaccggttaacaattgatggacaaaatgaaattgagaaaaagaagaaaatatttttgtttttttcttgaaaatttatgcttttgaaaataattcaaaattagaatttgttttttaccaaaacttttctgacaacatttttcaaaatagcaaattctgagagtttttagtccaatcttttaaattagattttttaaaattaggttttgcgctttggtgcttttaggcgtttaaaaacttaaaagaaatgtatagtgttttaaaacttacctattttttatttgaaaaattttatttcccaatttctctttcagttattaaaagaacgcgcagagcaaattcaattggcaacaaagaaaattgaagaagcggcaaagaaaagcgaagaaacaacgaagaaaattgaagaaacaatgaagaaaattgaggattcagaggccgaacggaagagagagcacagcgccaacggagagaaaagtgagaagcgagagagcgaaacaaaaagcaaaaagagagaaagagaaaaagagagcgaaaacgaaaagccaaagaaaggcgaaaacgcgcggaagagagagtcgagaaagagagagttcaagaaaatccaaagttgaacacaaacaaacaaacacaccaatgtcatcgtaattgcattcattcctcaagtaaaatatgtatgtccacgcagttttcgtaccaaatgcatttttttgttgttgaagaggaattcaaaagggatacaccacaaaacgtcggcgcaaaaaaatagattaaaaaactcaaaaattcgaaaaaattttttaaattgttttatggttttttgaaaacctagatgttaactgggaacaaaattggtaatccttcggaattgggggccccggcggaaaaaagaaaaaaaaattttcttttaactttttctagggtagaaaaatggcactggattacgaatccggctcggattttgcaaaatcattgattttatctatgatttttcatcaagtacttaatttttttttaattttttcgttttctaaaattttgcttt

SEQ ID NO: 8279 - DNA, 2628 bp, Heterodera glycines
  unsure (1)..(2628): unsure at all n locations
attttgcaaaatcattgattttgtctgtgatttttcatcaggtacttgatttttttttgaaaattgtttttttctatattttttctttatttctttttaaataaaagtttgccacaccgttttgtctcggcggcgtttcagcagagacgttttgtcctgctcccttccaaactaacaaatgagtgccatcccctccgggaaaaataaagagaaaaaattgacaaattccagaaaatggccccaaaatttgctaccgcctgactccaaattgcttgggttttttaattaacccagaaccctaaaaatgctctttttttgagttaataaattccactcaaatttttaaaaatttctctgcttcgcctttcggtgccgcccgactccttctttccaagaaactgtgcttcatttaggaccaactaattatttggttgtttttacaaatcagtggcaaaacgtggagtgtgtccatgtgattttgtaatgcctcattaagtgacttaccccaatcaattatcgaccacttagcttttcgtagtgagttgggttggttttgataaaaattttcatttattcggtggcattggctataattgcatgaaattgtgccatttcttagggctgattttttccttaactaaattgttccctttccttaattctaattacaatcaattaagacatttggtttattaagctcattattatgcatctttttttggcattttctcctttctttttgccgctgctcggccaaaattgggtccacagtaatgagaacgaattgacgctgaaaataatgccaagtctgttggcagacgagaacgatacccatctttattatgtcagagcatactgtatgaaccgaggcaaaagattccacgccaactacggtacatttgtcgtgaatcggtcagcagcagccaatgaggacaaagtgaccattagctttgaacagaaagaaccctgtgactattatgccgcggaagttctgctgatgcggtccgggagtctctacggaatgggatgggtaaggaaaagggaaagaaaacgcaaaaattgaaaaattataccgaaaaaatattttgcagttacaaaattatgagattggacaccttgaaaacaatgggatgaaccatcggattctgttcggcaattatttccatctgaccattgggcccactttgaccactgaaaaccttttctatcacatccgagtgttttgcgatgcgaaggaaacgccaacaaaaaggaccaaaactgacggtgacggattaataattttggggttttccagaaacgatttgcccaaagaagccgagaaattctcgggtcaagtcagcaaccgaggcatttgcgcactatttttgattattttttgttttgtaatttagaaaacggtgtaacctccgatactttggaatttcctgaaaggccgtgccaatacaacgaataccatttcaaaacgttcaccaaatcctcaacaatggttgtgttcggcagtgagttgcggctgtgcaacacttatcacgtcaaagtgtgggcaacgccaacggaatggaaattgaaatatgtacgaacatacagtacagtaatgggctgacaaaacaagcagactgtgctttcaacaattgttactcaaaaaattatcaaaatttaacaaaaagttttcctaattttgttccaaaacaatcaaataacaaaaatgccaggctctaaccgatggggcggggcgaggacaatttcccattcgcccgaaaaaatgttaaaaatgggaaaatttctaaaaaaaaaccatcgcattcttgccaaattaatgcaaaggttcgaattgcggctagtgccgatcagtcctcccccgggcgagtgccgatcagtcctcccccgggcgagtgccgatcagtcctcccccgggcgagtgccgatcagtcctcccccgggcgagtgccgatcagtcctccccgggcgagtgccgatcagtcctcccccgggcgagtgccgatcagtcctcccccgggcgagtgccgatcaattccccacctcgggcgagagctgactccccaggcgaatgccgatcagtctcccaccccaccccctcgttttctttcaaatgccctctcttcagcccgacgagcgtccaatggtccatttcgtgtgcagctcctacgggaatggtgaaaagcgggaaattgtgttcaagagaaattttcacctacaaattacgcccgcccttggcgaaggggaggaggaaaatgtttattatgccgaagttgaatgcaatgggaacaagtaccaaacattcagaacattcacaaagtccaaaacggacgtggtgctgcacgtttccgactgcaaaagttacgacttttcggtgcgcaaagtgccgaaagcgttgtttaaaccacaggacaacatgagaaaagtgcgttttcaattaattctatcggaaattgcagtataaaatttgaccaatgcacactactctctgttaatgcttagagaaaggaacaanatttacaacttttggaccaggaatggtcccggattgatgataatttaaatcacaaaccgatcattgatgattagctggtaaagctcgcgatggcttctggactagtcagctgatgg

SEQ ID NO: 8280 - DNA, 2344 bp, Heterodera glycines
aattgacgccgattatgctcttttcgttgccggacataatccaccgccaaagtgcaagaaatatcgcgaggcagatgaaagaattttgagactgacacaaaattttaacccactaaacattatggaatttttggtcggtgtttctcggaattatcagatggatgcttagaattttagtgataaatgtttgggtgataatattatacaataatggtggaaaaattactgtcccttggggcccagttggcggggcccagttaatccggggcccagttggttggggcccagttggcggggcccagtcggcggggcccagatggcggggcccagtcgtgcccgtccgataaattttcctattgaatatcaaaagaaaatatccgttttgcccctcctaattttgtttcctttgaattatgggcctaaaccgatcaactttcagacgcggagaaagtcattttgcgggaggaggcggtcgggccgaatgtcgtcgactgtttgcgcacaatcggcgaactgcgaaattcgctgcagaaagagacacagctcagaatggtccgctttcttaaatccaaacggggaatattctgtttacaaatgagactcactgttcttttttcgacttttcccgtttcttttgttttttatcactctctccccccattttaggtttatgagaaggaaatggccgagttgcgctgccaattgcgtctttccccgccctcctccgccctcgtcgctcttccgccctttccttcgcctcgtccttgctacgacttcgccccaatttcttcgtcttctccgacttccgcggtggccaacggaagggaaggccttctgattgagttggtgcgtcagcgagaacaacagcaacaactctttcgtcccaccgcggtgctgccttccgaagttcagcttttgacctcggcaattaattcgttgtctaatgggtcgccccagggattggcactgcaaatgcagcagcaacaacagcaacaggacaacaacggcacaatgactgtgccaacgaatggaattggacaagacgcgcaacaacagcaaatgggccaacagctgaccacggctttcgacatgagagagcctcttgcggtggtgcagcaacggacgatgggaagcagcgaagaggcgaacgcaatgccaacggcggaaggggcggcggtggacagcgattgtgcaacgccggcgaccatttcacagcaaaacttgcaggttctcttcgtcgacatattgaattgcaattcttttatctgcaaactttgcatttgtttaggcactcgttttggcaattcgccatttggagggttccgccgccgccgtttcgtctcccctccaaagtgtccgtcctccgtccgccctttcttccgcggattctaacctcgcgttattccagtgaaacactcctcttttccttgtttttgttgtttgttttctcatttcgttgttaattgttaaattttttgttttgttgttttcctcccattcctttcggcatgggtttccataggttaggccttagtttttagatgttttttccccatttttgcgctttggcatggcggacagatcacaccgtaactttaacccttcacactttttgttatcgggttttcgtttcgattttaaatgggctctttttggaacattgaattgaaatttctaactcgagaatgaatgaatactttttcacttcctttccaatttttttgcaattattgccatttccatttcccttttttgttatcgctgttatttttgttgactcttttgttaagctggttaaatcctcattatttccaagttttatttaacaatcgctgccaaatttcgtatttcctctgagaaagtcactcgattgtctgtgttttctctatcgttgcggaacaaattgttttgaaagaaagttttcaccgctcaataataaattaattgttgcttttttcaatgggaatgtattgtgttttacatttgtgagtgattgagtgtcaaaaaggtcatttgtttttgttggcttacggtatgtgtccctccattagttaaatttatttggcctattaatagtttttgttgccttctttctctcgtttgtcttctcctcttttattccacccattcgtcaaattccgatctcttcggcttttctccgtcgtccgttccgttttcgttcttctgaagagatttggtgggtacatcaccctctgaaaatgtcttcccacccccccctcccttttgggtcctttttttactggtgaataaagtgaaccccatctgctggcgctaaatggtggggtggtgacaacccccccccccccggggggggtgggggggg

SEQ ID NO: 8281 - DNA, 1124 bp, Heterodera glycines
cataattggacaaaatgcgacgaatttttttttggttttgtgtatgctgaaatggcttaagcaaattcatatatatcgtttatgaagatcgactttgacaatcaacatgaatggtatgaaattttcaaaagaatctctaagagtaagtggatcaaattaaaattttaatagcgacacttgcgccctgaaatgtacgccgcgaataattaatggcgcttcgacactagctccgctcagtcaaaaaatatatataccaatttctcacggaatccaaagaaatattaagccacattaatatatgtagattgtggcttaaaataaaatattttcacttggtttgaggcttccacgttcacttttattatgccttctttattttttgcctttttcgggattgtcgtcacttaaatgcctttgtcctcagcacctcccttctgggtccttgttttactgtattgaaatttccctgggggttcgtaccccgctttacccccccccccctcccttgcccattctcggcttgtctcgcctgttcctgctcaaattgccacgcttcgtagtcgcgcagtgccatttgaacgtacgaagtgacctttttttgttagcattttctttggccaatcgttaacccccccccctcttcattcacataatgctgttcctccgttctgacgtatttttgaagcatttccaacgccaattcgcgaaattcgaccaaattaagcgcctcacattcgccgattagtctaaaagcgaaattaagcccaaaatcacggggccattcgttcacttggccaaatcgtctggctttgctggaagtgctgtggaaggagctgataattaatatgccatatgataagaaggaatggacccaaagaggcggcgcatcgctcctttttcaggcggagataaccaatgatatgacggaacattttggggtctctgtccaaaaaaagattcccccctttgtcggtaggaattgcttaacagaaaggaaaattagcatatcaattaacacttgatttgccaaataacgcaaaacccacgcgggcgattagtgcccgggcgaaaccaatcagccaatttgctgcgcggatccgccagcaaatcggtgcgacggacct

SEQ ID NO: 8282 - DNA, 950 bp, Heterodera glycines
ctgctgcgcatcactcaaatgacaggacgaatggtaagctaacaaagccaaacaaggagttacgacgatgaggaaatttgttaagcaaaatgaacgcggaaattcggaaaatggcgaaaggatttggcaaagggggcaattaaagggaagggacgacggagttggcatttgacaatggaaacattggcgaattaaaaactcaaaaggcaattcgaaaagcacaaataaacacattaaatgctaatattacacaagtgaatgaaaagggttggccattttatgataaagaaataaatattatgaattagacaccgtgtttcacagaattcgctgattgatcatctcaaattctcccattttctcctttaaaagtgttcgttctcttctcgccgcttcgtccgtccgtttgccgtttcaatttccctttggcgactgattagcgtcggttcgtacccaaattggccatttctgtgttccaaattgtctccaatggctccgttttgatcctctgtctacctgctggcgccacttccgtcgtctgtttgtctttgccctccgccgcccctccgccgactttcgccgctcgtcgccctccgcgcgctcccctcgcgtcggttcgcttcttccatttgcttccggcggtccttccgttcccaccactccaattgctcttcagcctcctcctcctcctctctgtgtctttgctgatgcctcgccgccgttccgtttgtttcataataattcgccgatgggtccgtttgccgtcggggcgctataaaaggcgaaagtcggccaaatgttcattcatttgcccattcgttttgcattttctgaccttttcccctctgctggtcatttctctctttctcttctcgcaatgcttcttccgttgccttttgcgctgctaggaaatggcaatttttaattctgccaaatagtgccttttcgcg

SEQ ID NO: 8283 - DNA, 764 bp, Heterodera glycines
cccctctctgtgctttaactttccaacctcaaacacttcaaaaatggagccaattccgccgctgttaatgtcggccaatttgcgataggacacgacactgcacgcactttggacgagcggaggactgtacatcacctgaaacaaacataagcaacattcaaatcccttcttcatggcacatgccatgctgactactgacctggtaccattgtcccataaatgcgtccaaattgaactcggccaccgccacgggctttgggctgcacaacggactggacggctgcacaatcaaattttggatcatctccaaattctccccgatcgcctcctgttgagcggcggtcagagtgattggggtggaagtgttcaggtcggggaacaaagcggccaaaacaggcggcaaagagacggacggaggaaagggaaggccgagggccgaagtggcgttgagggggtcggcagaagcagaagcattggcagaggcggaggagggcagcacggagccggaggtcagagttttatacagaacctggcaaaatgacatggcattggcaaatgagtgagtgaaaagtcggcacattgttgatgaattgtttgccgggcagtggcgaattgctaccgcccaacaaattgccaaccgcccttccgattccaccagcgtcgggtgtcggtttgccgtccttgttgaagccgaacagatccaaaaccgttcctatcagtcccccaggggctggtgagtcatccgacagcccaccgtactgaaa

SEQ ID NO: 8284 - DNA, 5809 bp, Heterodera glycines
  unsure (1)..(5809): unsure at all n locations
ctagagcccgatgcaggaccggatcctgcgcaggattttgcaggatcccagtccgcaatcctgtattttttgggaaaaacaggatttgcaggattaatccggccggatctggtcctgcaaacatttttgaattccaatcctgcaacaggatccgcaaatttgaatttttgtgcaggattatgcgggattttattgattttttaaaaaaatttctaagacagaatgccaaatgtacagaaactttgttatttttataatatacatatggattaggtatgaggacgcgcttgttcattctattcctgatgtcaatttttcatattaagtttcaccagtttttgtctaaaatatatcggaacacttatttatcgttttggaaattttttaaatttaattgaaattttttcaaaatttccaaaaatccacaatcttaaatgcaggatttgcaggattaatccggccggatccggtcctgcaaaaaattttgaattccaatcctgcaacaggatccgcaaatttgaaatttccgggctctattaaaaacctcaaaatacagttacagcatgcatgggactcgaacctgagaccccccccccttttggtgactaactcacagaccactaagacgaaaaatccagcataattgtacttggagcccaaaattgggccgctatgtaatggatgaaagcggatcaacagcaggagcagatgatcaaaacgcgtcatcacaaatcattaaaattggtgataattagggctgtgaattttaggttttaactaaattttttgctcgattgatttgaagaaaggagctcaaaaaacgcatttctgcattaaaaattttcgattctgatgtcactatcggtcactagaaatcactattttggctacttcgtcactaaaatatttaaaaatcactattttggcgttttgtcactattttttcactatttcgacattttttggaaaattccttaacaaaaatgcaataaacccaaaaaatacacccctaagaatcgagctaaaatttttcaaaatatactcctatgaaatgaaaaaaaattttctcaaaaatttactttcttggcaaaaatttttaatttaaaaaatttttttaggtaactattttgggttttttggtcttaaaaatcccagtcctactcatttgcaactgcaatcagtgaataaaaattatttttgctcaatttttggctgaaaattatgtcactattcgtcactatttcggaatgtttgccactattttgtcactattttaacatttttaccaactattttagttaactatttcgggattttttgtcactaaaattcacagccctaataataacccatttaattggctcggtttttatgggtttaataagtacgaatgataaaataaatttatctttaatttttatgttatttaaaccaaaacaatttaaaatccttttattcgcactttaaaattgattaaacattttaaaagcaaattactgtatttaactttagtatttttgaattagcaattttgcacaattctgttaacatttcccactaaaattttcaaaatttttctccgtcggacttcattgatttgtgatatatgtgttaaatatattgatatcaagaatcttaataatcgtaaagttaaaaaatttttgctcattcattactgtgtttgataaattttagctcattttcagaattttggcctttagacttgttgttccaattcaattcgggtatttcaatttgtcgaaatggatgtcgtaatctgcaccctgaaaaccccagacaaaattctgacaatacaaaaatgatgataaatggatagtgaatataggatttagcaattttcgccattatggaatcaaattctgcaaaaaatacaaatattgggtctggtctgtgccaagtgaccccgacggggtaatagtcaagtcggcaaaattaatgcagcattgttgtgcgaaagagcggacgtaatttgaacaaattaatcaattcatcaattaatcatggataattaatttccaaacaattaattattttaattattatttttcctcatttttttaagattcccgtcaaagtgtccgccctgaggaatcaagtctacaaggtgcagcagaacaaaaagatatcaccgaaacggggtaattaatttattttagggcatttacacgccattgatgggtggcacttatcaattgattgtccaaattgactccaaaaatgtgccgggttcaccgagcagggtgattctcacattttatcttaaattatttctattattccaagtccattcccatcaattacctgctgaattaatctctgtcgacgcgaaaccgctcaaatttggcgtgataaatgaggatattaggtgaaattgagaagaaattagttaaatcatttttaaatatttattttaattcgtttaatagaactataatcgacgcacgaaaggccactgctggacatttgtcggcacaatgttcaggaccgacacggcccgaatattgcgaattgatggacaacagagacggaacggtaatcaactcggacatcttttatttaattgaaattttatattttattaaatttttttagattttttaatttattcaactgaatgttaaaagtggaattaattgatttgaaattcatttattaattattaaaagtttataaattttctatgtttcacgttttatttaagaaatttttgaccatattttcccagtttttttattagaattaatttttaacggtttttttttacaaaagaataaactttttataattggcagtctgaatttctattaagctcaatatttattaatagggctgccaaaagtatgcaaatgcatatttttttcctggcttctccatgctctaaatagtacgaaaaacactttcttttttgtgtttgcgtataaaaatcgggacttttatttgcatatttttgcatattttgggcctttatgcatattttgcatattttggcttgttttacattttcatgcatattttgccattttttgtgcatattttcgattttttgcatattttgccacttttcttcaaatattttccgattttttgcttattttgccatttttcgtaaaatattttccgttttgaatttttttaattttaatatcaaagaaaatttagcatgatcaacttactttaaacaatattttattcttttctaataaaacaaaaaagaaattcttaaaactttttcataagctgacgctgctcgagctacaattgtgagatgccgaacaacaagaaattaaactgtaatattcaaagaaaattaggaagaaattaaattttaattcaatatttaaataaataaaataaataaaaatttattaattatatatattattaaattcttttgagacaaaaaattttaagtgaaattaaaaagcaaaaggtcgcctctgtggttttacattccatggagaaaaaaaactatgagacagcagaaaatatgaaaatgtatttaaatcaagcttatttagcaaagccaattattttaaaacaaaaaattattattatattaaagaaaaaacaaaagattaaaataaatattatataatcaaacaaattcagcgactgaaaacaacagttaaacgtgcagggcagggttgttccgggtcgagaaaaatatcgggtcgggtttcgggtcgggtcggccgaaaaatcatcgggtcgggtttcgggtttcgggtcgagaaaaaggccgggtttcgggtttcgggtttcgggtcaattgacaaatttttaatttgtttaaaaatcaaatggcactgcaatatttgcagcgaattgcgccatttataggacgatggaaataaaaccaaatggaatcaggtttttcagccatttgctttgcttaaattcaagaaattcatacaaaatatctttagaaaaaggataataatgaatagggatgtcaaaaatatgtacaaaaattggtcaaaatatgtacctaaatatgtaaaaaaaatccccaaatatgtaagaaatatgtataaaaacccaaaatatgtacgaaaatatgtaaataaaatttttttaaatggttattttttgggaaaaaaccttcgtaaagtgttaaataggcgtaaaatggcataaaaatgacctaaatatgtttagaatcaccttttaacatttaaaaaattatttttggaggggtacatttaaaaaaagtttttttttaattttttcactagaaatttctaaaaattttcaaaaattctcaaaatatgtataaaaaaataaaaaatttgccaaaattttggattttttttttgaggatttccaaaaatttccgtaaaaaacccgcaaaatatgtaaaaaaatcaaaatatgtaagaaaaagtccaaaatatgtaccaaatatgtataaaatcccgaaatatgtaaaatatgtataaaacccagaaatatgtaaaaatatgtaaataaaagtcccgatttttgtttgcaaacacaaaaaagaaagtgtttttcctgctatttagagcaagaagccaggaaaaaaatatgtatttacataaaattgacatccctagtgattgaatttcttcagggaatatcccacaattatgagattaacccatgatttgttatttatgttttacaattaataaaattttcagtttaaggtttttttgaaaattttttgccaaattttctggcactgaattgtcggcttttcaacgtacactgaatcgtcggcactgaatcgtcggcactgaatcgtcttcacactgaatcgtcgtcactgaatcgtcggcactgaatcgtcggcactgaatcgtcggcactgaatcgaggggcaccgaatcgttttggcgccgacgttttggcgccgacgttttggcgccagggtcgttttggcgccgacgttttggcgccaagccataataaaaaaaagaaaaacacccaaattaaaaattttgtaaaacaacaaaaaaaaacgtatttttcgcgaaggtaatactgccgatggttggttgccccccttttttgaagaaaatttttttgttttcaaaagtcacgaaaacatgcttccaatggttttcagggtcgctgctgacgaaccaggcatccatttcgaccaattcggaacccggagccgaaattcgaacaaaaaatcgaaaataaaaaatttcaaaattctctttttgtttctaaaatagattaaaacaaccaaaacgttttggcgccgacgttttgacgccatgtagggggggggggggttagattggcaatatgtggttgtaaaaaacttttgggtatggaattattttttgaagtgagtcaaacaccctattagtgctttgctgtgccgagaaccggcaggcaatggatagctttaaatctgcaagaaattagattggcaatgagtggttgtaaaaaacttttgggtaatgaattattttttgaaatgagtaaaacaccctattagtgatttgctgtgccgagaaccggcaggcaatggatggctttcaatctgcaagaaattagatgggcaatatgtggttgtaaaaaacttttggttatggaattattttttgaagtgagtcaaacaccctattagtgctttgctgtgccgagaaccggcaggcaatggatagctttanatctgcaagagattagattggcaatatgtggttgtaaaaacttttgggtatggaattattttttgaagtgagtcaaacaccctattagtgctttgctgtgccgagaaccggcaggcaatggatagctttaaatctgc

SEQ ID NO: 8285 - DNA, 1681 bp, Heterodera glycines
  unsure (1)..(1681): unsure at all n locations
aaaaaaaatatattattttttcagttcattcagagagtatgtactaaaagttccgaagttaaggcttgtgctgcttagagaaaattatacccaaagtaccatatcatactgtcgtgcacatataaaaattcttgaaattttcatgaccttgaaaaaatatatattatttctcagctcattcagagagtatgtactaaaagttccgaagttaagctagtgctgcttagaggaaattatacccaaagtaccatatcatactgtcgggcccatataaaaattcttgaatttttcatgaccttgaaaaaatatatattatttctcagctcattcagagagtatttactaaaagttccgaagttaagcttgtgctgcttagaggaaattatacccaaagtaccatatcatactgtcgtgcacatataaaaattcttgaaattttcatgaccttgaaaaaatatatattatttctcagctcattcagagagtatgtactaaaagttccgaagttaagctagtgctgcttagaggaaattatacccaaagtaccatatcatactgtcgggcccatataaaaattcttgaaattttcatgaccttgaaaaaatatatattatttctcagctcattcagagagtatgtactaaaagttccgaagttaagcttgtgctgcttagaggaaattatacccaaattaccatatcatacactcgtgcccatataaaaattcttgaaattttcatgaccttgaaaaaatatatattatttctcagctcattcagagagtatgtactaaaagttccgaagttaagctagtgctgcttagaggaaattatacccaaagtaccatatcatacactcgtgcccatataaaaattcttgaaattttcatgaccttgaaataatatatattatttctcagctcattcagagagtatgtactaaatgttccgaagttaagcttgtgctgcttaaaggaaattatacccaaagtaccatatcatactgtcgtgcacatcaggggtgtgacttgtctcagaaaagacgagagcgagagtttggcgagaggcgagagtccccaaaaagacgagagcgagagtttggcgagaggcgagagtccccaaaaagacgagagcgagagtttggcgagaggcgagagtccccaaaaacacgagagttggcgagaggcgagaggacgagaggcgagagtttttcaattttttctgtagccttatttttaatttaaaaaacttcaaaatcgtatattaaattaggggtacgggcctgggtatttgggcaaataccgggtcagggtattgccgggtacagaaagccgggtcagagtcctagtttttaaaccgagtccaagtcatgaaaaatccaaacaaaaatctttaaaattttttcatgaaaattaaaaaatattttcatgaaatatatttattttagaaacaaactttattatttgtccattttttccaccttttttttgcggtgcgttttttaaaacttcggggacgttggggggtcggggcgggtgccggtaggcgccgccgaaaaaattttgaaaattgtcttncggatttgttcacagattttattcaaaaaatgaccaaaacttgttttttacattttttgtttttaagtcgctttttnttgtggcgctgtttttccaaaataaatt

SEQ ID NO: 8286 - DNA, 928 bp, Heterodera glycines
ctcggcaaaaaccaaaaataaataaaacaacgaaaaatgtctttattaatgaaaattaaattaagaccaaaatgtccaaaagagaacataaataaatgtgtgtatatatgcatatgtaagtttaagtgagagttagcgtagtaatggccgcgtagagttttcttttatttcttgctccttttgttcgttttgggttcgctgcctaaaataggataattaaaggaatttccactcaaggcatatcattaaataaaaagacgaagtgcctggtgaagtttcgtctttttgtccctcctctccgcgactcttctgaccctgaacagaagcggaagcattcggcggagtgccagtcgagaaaaattgctaaaaataaattttcttcaaaactaggtggcggttttcccggtttttactgccactttgactaacaattaaacattctgaactgtgactgctcagattgagaaacatataaaatattacaacagtaagtccttacaaaattttctctactagaaaggtcaaatttttggcacaataattttgtgcaatttgagtcattttttagtggttccgccagagaaaatgcaaatttgatcatatgcacctaaaactaaagaagttttcaggcctaaaagagaccccgtattaaaaaaaatgattcaaatgcacttttttatttaaatcatttgcaaataaaacctcctgtgacggtggaaacggtgaattgtcagcagacggagggggacacagtgaaagtccggcgcgtccgaaaatacgtttctgaaaaaattgcatttacaatttgaaacggtaaacttagaaataattaaacggctgagaaaaaatcagtagcagtcaaaataggctttttttttaaaatatattaagttattttaacgacaaaaatgcccacaagacctgcagg

SEQ ID NO: 8287 - DNA, 3646 bp, Heterodera glycines
tatgagagatttaccactaaaaacaatacctgtcgcgatggcacaatcggttttgcttcggtggcggaatgggagccaaagatgacgaagtcgactggagaccagccgcatttttcttaaacaacttttgtctcccagaaacataacccaaattattaccgttggtccaacgcaagcgacagtttgataaggatcttcctaaaacaattcttgttacgacaaaaaaaagaatacattaaaaaacctctgatgttgactcgggaacggctccgaaataaagacccggctaaaaagtattttttaaaaagcatggaaagggaaacaagcaaaccgattcgataaactcgcaaagttcttcaatcagaagcattgtagccggaaaaagttcggcttggactacaagtgccaaccacgcacgtgtttgtttaacacggaggtaaagctcgcggagattggaaagcaacaaattcaacatctaaaccgtgtgtttaaagtcatttaccactcatttcttgttgcttttcaaacacttacacttccgtcgatggaatcataaaaaccttcctgaattttttaatcgtttagaaaaatggtaataatttggaaaacggtcaaattcatgcctctttaaacagttcggcgaacgtgttaagaaaatcagtgcaaacactgtctgtttttgccaccgtggcaaaattggtccaggggagatcgtctttggccaatttgtgctttttaatcacctcggaacggcgctgaaaaaacgtaaaaagtgcattaattggtcaaattcccgttttgtttgcgtttgtgcattacataacatactaatttcaataattctttccatcttttgatacggggcatcaaaaattccaagagtagccaggaagaagtcagaattttagaaaaatgttggttaggatatacgtaaaaagccatttcgtccaaaagttcaggcggcaagtatttcatattagccatttgtttttataggagttagggatacttttccgggtttcggtgagggggcagttttgatggaatcgactttaggatgtgtcacaaatttaaattatttagggatacctatttgttcattttgatattaaacataatgccaacatttatgaaaattactcaagtgctttttaaattaaattccaaattacttggtcggctgacatgaagttagggttcggagaataaaattatgttattgttaataaatatatacctaaaatagttttgtcagttaaatatatgtatattttggtaaataaatttggcgaacaatacaatgaatgaaaccatgcttaactagttaaagcttgctcttgctgggggaggggggggggggtttgggatgatttgacaacatatttttgaccaatcctatctaataaatatggcagatatttgttagtacgcatatctgttacacttatcattaacattttcttgcaaatgtgctgttgtctgaccaacaaataattaaaacaaaaaatgagagaggaaaaggtgaacgaacggtcactaatccctcccttcaaaaaatgacaacaaatgaatgatttgaaaatgtgggggggggggagagggggcggagtcttatttttgtcaacttgggcaccgaccattttctttcccaattttgtttcatgtgtttatcgctcccacgtaaaacagagtgagtcgaggcagtacgattgggtttttacggagtcaattgcgtctgccaaatttttttatgagccatattatttttcttcattttccaaatccaaaacggcatctataaacctcggggattgcagtatggatctggaaagtcatatttgcgttcatttttgtctgagtgcgaatttttgaaaaaagcgcgctgcaaattggaaatcggcattccgacggctgctcaaaaaaataatcaattggaaaaccgaatcagaacgcataaatgtcggaaatcaattattgattgcttcgtttgttgagcaatgttggaactgcgctgctacaatttgacgacaccagcgttgaaccggcagttgcattcactttctcaccatttctctttgcggttttgtgccattgcctgaggatccggcactgtgtaaagctcaattacggaaaatcgttaattgttttgcgtccatcacaagaatatccggggttttctaccaaacggtttacctcagttgggccggcacggttgggcccccaataattcaaaaaatcttcatttcaaaaaaaaatgctttattgtaccaacaacttttgacaatatcaatattaaaataaaaaatacaaaagctcatcaaggattcatctggtatttcgggaaatacctttcaaatactcaatgatacagtgatgtcggttaactttattgtgatcattgttgttgggaatgtcgacgtaatagttctggaccattgcaagaattcgggcatcagcattacggtattttttctttttggaagagctcaattccttagacaaatatgtgcaagcggcatccgtagccttaaatgggatgttagggttaaataagcaatgaattttgagcgcgccgcaaaaagtgtttttaaaacaaaaaaagtagagacgagaataatctatttctgtatgttttgttggagattgatgtgttttttgacattggacggttcaatcccaaagccatgttaccacttcagtcccgggtctgtaaatcttcagggattggttgccgccgtctaaaaattgcaccattcgattttctcatcgagacgaatcgaatggtatataatttatatgcaaaatcaaaatggtagtattcttcaattttacctccatttcaactaattcggtccacggacccgaattcgaacaaaaagtcgaaaattcaaattttcgatttttgatctaaaaaaggttcaaatgtttcttttattgaagcaatgatcaatttagttcgtttccgtgtatttaaacaagttattttcaattatttggcgttttgcccaaaatttgggtaccaaaaatgcaataaaaatgaaaaatacatccctaagaaatgattttctcaaaaattcatctgcaaatttatttattttttttgacaagaatttgagactttaaaaattatttatctcaatactgatttcacttaattttattacctttttggtaaaattttacgattttacacccttaaattcggagctttttagcagctatttttggggttttttagaaggtaacaactaattatttaggcagtttttattattggttgtagaaagtttaggtcaaaatttctgaagagcaaagttattttatgtcatgaaaaagtttttgttaaaaattttttagattttaatttcttaatcccatacgatagttatacaagcctgcaccgcggtattgcgcctcactttgtcagtgcttcagcggcatgttcaagaaaatgactccaacgtgatttgaaaagtcgaactttttttattttagttttctttccagtttcattccggcagacacttggttggcagtgttggaattgtttacgccggctcaaaacggactcgaaatagcacggattagtccccgctttgaatgccgtatggatgagcatttcaagagtaggaaatggatcagaaat

SEQ ID NO: 8288 - DNA, 4378 bp, Heterodera glycines
  unsure (1)..(4378): unsure at all n locations
atatgaaattaatttcactatttcaaattattttcatgtatgggcaggcgaattctgtgaacaccgttctctcagctgttttcttcccccaaatccctgcttaaacggtgggacttgtgcttgggaggtcaaaaagtaaaaccatgctagtcattagcttgattaattgcccttcattgcctttgtcccttttctgttcgtccgctttgtccaccgtttgtctgtgtcccattggttttgatggcccccgttgtgagaaagccgcccatgctgaacaattggagcaatgcgatcgggaacatcggtgtggccaaaatgggaaatgccaattggacagtgccattggcgcattgtattgccaatgcaaccgtggtaaggggaaacagtatttcaaaatgtcaaatcaaaatgccaaagacagacacaaacgtaagccaagagtcgatgaaaagcatcatttgctcttgcaattaatattttgtacactaccatatgcatcatttttaggctattttggggagttttgtgaggccaaattgaacccgtgcagttctgctttaccaaccgcaccgatttgcaaaaacggcggaatttgtcaagaaattggacccgaaaaagcgtaaacaaaataatttaatttaactttaaaaattgtttatatattgtatttttatttattttataattaacgcaaattaaggatttgccagtgtccagaaggttggacaggcgatcaatgtgataaagcagaggacagttgtgcagggaaggaatgtgtgaacgggggaaaatgcattggcacccatcacggcactgcctactgtaactgccccgacggatacggtggagaaaattgtcaggtaatcagaatgacaataattaattaattcanatttaaactgagcatagattgagcagaatatatgtactaagtggacagaaggcgacgagggaatatgcgggaatggacaatgccaagccaaaggcaaagggcacaccgccaaattcgaatgtttgtgcagagacggatggacaggtgaagaagcacaagggcagccgaatgatggaaaaaagaaagaacaattggcatttttcagggccaaattgcaatgtgccaaccgatgaatgccaaaaatggaaaaagtgcctaaacaatggcaaatgcatcacactgattgatggggatgagttgccgcgaaaaagggtgtgtttatgccctgacggattttgggtaatttaaatccaaaataatattcataaataattctgtttcaattagggtgatcattgtgagaatattgtcaactattgtgaactggagggaatttgtgtgaacaagggcacttgcgaatccgtcgggccaaattatcagtgccattgtgacaagaaaagtgccaagttttatggtttcttttctctcttaatggaaaaaggctttcatataatatttgatttttacctttttttggtcgaaattgtgaacaaattgtgaaaccgtgtgaacccaacccatgcgcaaatggcggaaaatgttcgccaaattacgacgacgacaaaatgggcttcgaatgcgaatgcggcccaaattatgcaccggagacaaattgcactcgaaaattggtaattaaaaaggaaaacaaacagcgaataaatgggatcaattgtaattagacattgaaaaattaattggcaattgacagagtccgtgcgaacaatggccaaattattgcaatggcggaacgtgccaaattttgccaaactcttccgattcgccgcattgcctttgcccagccgattcaatgggaattcgttgcgaaacacgtaaaatatttaagctttccaatttactaatatatgattttttgccaggaaagtccacccattacgatttgcatttttacccatttttaaattcgtcgtccatttttcaaacaattcgttcgcccacttttccgtgtttcgcgctcattaaaaagccattttcgctctgtttttggctccgatttggtctaatggacggacaaacaaatgaagtgaaataataaaatactttaatccatttttgtataattattttataattgtttttgatttttccgcagttttccccggattctcatcgctctttttacatttctataaaaacttttgaaacgatcggagtgaaaaggtacggtatattaaaaagggaaaagttttcttttgaattttacagtcagcggacagatattctgctttttgatcagtttggcgtgacaattttcggcagcaaattgcaatttgacaatgggcgcccattgactgctcaaatttggcaccacgtaaatgttttttttcaatttgatacaaaaataacagattttggccattagatttgcttaacttacgacgtcaaaatcattcgactgtttttgaatggacattttgtccaagttcgttctgctgtcgttagaaattatccagccattttcattaataaaacctgtgaaattttgttggccaaaaatggcggaaaaaatccttttgttggtcagctgagccaagttggggtaaatgagacgaaattggggcaggatttgtaaaataatttaaatattttcattattagctgtattcgaaacatttcgaagacgcggaaattgtccgaatggcgtggagttgtcgcgaatggacacatcgccaagaaaaggcattcactcacttaaaacattaaatttacaaaacgaatttaagcgattttcactcattgaatgggctcaattcacgacagtcgatggtaaaataattatattaattatttatttttataacaatttatttagttttcaacaaggcccaaattgctctcattcccggaatttgcagtgaaagcgattgtcagccggggcggataagcgattgtggccaagggaaaaagcgtataaaatgaaaaaagaattcattaattaaaaataaataaataaataataattatttggatgttgccatttaaagtggtgagtgatacaaattgttaagttaaaacgccgccccatctgctgttctgtccccgttctcagtttgtcactgtccccgtgccccaccagcgcctaattcaaattcattgggagggtaaaagaaaactttaatatttaattttttaataattctcgaaggatccctcgagaaaatgtttcggcctaccggcacttcgcccattgttcgctttgagagcaattttcggcccggccaaacctttggctggggccaatttcacgtcgtttatttggcggaggattcgctcggaaattgggccatttgcgaagtcaaagagaaagacaatttgccaacccattttgatcacctcaatttacagttcgatgtcgtcgtttcgcccacaaaatgttctgatctttttgtgcccggctcatttaacaaattgacagtgcacaaattccgcgtcgaagaggcgaaacaagcggaaaaaagcgtaaaaagcacaaaacgattactaattatcacttatcagatggacccattgcttctccaattcattcagatcaacctcaaatgtttgaacaccgaattggtttccaatgtcgtcgcgaaaccgcccttttacatttgcgatcgcctggtcatatttaatgcattttgataaatattttttaatttattcatttaactcagtcagtaatttctcgggttcacccaccctttttaatatttatttttcctcatttttcagggccaatgggaccgtttggcaacttttgggcgcactttcgctttgccttcgtgcacgccaactgaaaatgcaatgcaggttaagaacaaaattaaatattgaacactaattactatataattggaatcactattcaattgtacaggaggttatcggcgatttgcatttcgaaggcccatgcgatagagcagcgaaatgcgcacggaaagtggtcagtgaggggggggggggaaggaaggcattggcaattgttaatcaatgcttttttgttttctatttttgggtgttaaaatattaaattttattttttatacaaatattttttaattctgtttttaatcaaattctctttttttcctttgtcttttgcaattttttctcaccttttttcctttttcagattcaaaccatcgaaaatgcgagcaaaagtttcggctccttttgtacgcgtcccttctgcgatggccaattgggcatcaaaacggaatgccttggcgaacggagcgccattagtggcgccaatccatcgacgacggcggcacaaaatcctccgtcggctggtgcgacaccgcttgtggacacgtacgagcgaaagcggtgcgggacaaccgacgatggcggaaaacctcaccaaacagagcgcgtgctgtt

SEQ ID NO: 8289 - DNA, 1590 bp, Heterodera glycines
gggaagtgccagcgtggcaatggcaaaaatatttttaatttttttggattttttggcaaatttaaggcctcagagccaccactggtgcaatgtgccacttgtgcacctggcgaaacgtggcaacaaattgtgcagaaaattgcgacgacaacaaaagtgccgatgggaaaggcatttttggcatttcagttttggcatttacaggacgaatctgtggtcaattctgatgtgtcggggagttgcgtgaaatgtccaccgaacagttacaaaacgagcccagggtgagagggctgctggactttgtattgtttacgttttacgatgaaatttaaaaatccgaagggtccatccgtgcactccgtgcaaagacgacagaatcaccggaggggtggtcggatgcatgcgcgaaatcgactgctattgtcagttgaaaaaagagcaaaaagtatttggccacagcaaacgttttgttcagtgaactgtccgcccggttccgtttactgtccgacgaccgattcgtgtcaaatgtgtgcccatggccaatttatgccctacaggtaaattcatttcaattccctaattttcaatattcaagcattctttcagcggacgattgcaatgcatcggctgtccccccggcacttccactgaacagcaggtcgatggcatggcattctttatgttttcaaaaacataatttgtaattgtttaagggcaccaccagcgcggaccaatgttcggtgcgttgtgcggtgggcgaggaaatgggcgcgggggaacaatgcgaaatgtaagagcccaatttgaaaacaaattattttttctttctattagattaattaattgattattcggtaaaagattccaataaaaaagtcaaagaaattcataccttttggaaacacacaataaaagtggttcagcttttgcataatttgaatttcaaattttgaaggtgcgcccgcgggacattccgcgcggaaggaatgaacgcgtgccgacgatgcaacgtaaaaacaaattaattcaaatcaaatgtttattaattattcattttgtttaaatgttggccattttcagctcggcttcaccacccctgcgaatgggtccaattcggcgtcggattgttcgctcattttctgtccgcccggccatttccgcaacacaaccattggacctgccgatgacagcttcaatcagctgaactctgcgttcgaagctgtgtgtgtgccgtgtcccatcggatattatcaggcaaaaaaaacaaatgggaaagaagcatttaaatgatggaagttgtttatgtttgatttaataactaatacctatttatttaatttctcccttaattttttcgtctgagtatggcgccgagcaatgcgtacgatgtccgatcggatggcaaacgcttggccatggtgccaaatccgtgcaggaatgcgatcatacgcatgatggcacatgcaaacccgacgaacccgcgccttgccccgaaggttgccgtaattatttttattttttaaattgacaatgcaattttcaaggaatgaaaggtgtacagacgcggggccaaacgtacgaatgccataa

SEQ ID NO: 8290 - DNA, 2578 bp, Heterodera glycines
  unsure (1)..(2578): unsure at all n locations
aaactcgaacagaaattcttataatttaggcctttttctccaccagcggcgagtcaaagcggcgaaaaagatgagaaatgatcggctattttggagaatattgaatggacaaattggtctgctgatcacttttgatgctcatttttgcttgttaattttgatgtgtctttctgacgaaaaaattcatttctttaatgtttgacataaagccgagagtcggtgaaccaaaaagtagggatttgtcgagctgttgtcaaacatacgagaacgagcaacatccctggtatatattttgctgaatatgtatttacgttttctggactagtcagctgatggataactcagccgtacaataaaaaataaagcctaggcccaagcaagcctaagactaggccctgcctaaaacttaggcctaagtctaagccgaagcctagcgtaagccattgtatgagttgtcttttagctgagttgtcctcggctgttttccccagctggctgatcctggcgcggtatttcgagttttaactcactggacggtcaatcccaaggccatctaagtcccgatctatacccaattcgtttttgaaaaatacaaacaattaaatatattcaaacaaaagcaacaaataaatgtgaagagcaattatcagatcagttccatctagggcttcgatttttaggtttttacatatttttttcctgagctccccgtggcctgaaacgcacgaaaaacatgtttttttgggctgttgttaagctacttttcgagttattagcacctattttctaggtttttatttttagcacctaaaaaacctaaaaaaatttaaaaaaacttattttcacctattttggcgttttgcccaaaatttgttaacaaaaatgcaataaaaaagaaaaatacacccctaagaaccgacccaaaaattttttcaaaaaatacatccctaagaatcgaccagaaaattttcaaaaatgcgcccctaagaaatgaaaaatttctcaaaaatttatctccaaaatttatttattttattttcttgacgataatttttgattttgaaaattatgtatatccttaatgacttggcaaaatatttttgctttttgatgaaaattttcgattttacacccctaaattcggaactttttggcacctattttcccatttttagcacctattttgggggttttttagaacctaaaacctacttattttggcagtttttagcacctaaaaatcgaagccctagttacattttatgattcacaatatttaattatatgcgaataaatacgaagttgattgctattaattgcgcaaatattacttcccattaattgatttcacaatattattttccacatattacttcccattaattgatttcacaatattattttccacatattactttcgattaattgatttcacaatattatttgcccttacttccgattaattatttcacaatattctttgcgcaaatatttcattgacgtatcatttttatctgtgttagctgaatacaattacgcacaaaactttgaaaaatacaatatcggtttcataaaaccgcaaggtgctgcgtatcgaaaatttttcaaacccagaactgtaaaaaatagagtgtatgtaaaacttgaacattttgcaaaaaaactttaaatcgcttgtgtaacactttttcagcgggttttttctggtgtttatcagaaatattctgatttgacgagtccaaaattttagatgttctgacttgggggtagtgccctatttttgtctgggcccggtcaataagaaggtggtaatggttaaataaccatgaagttggtggtaaacttcggtcaacaagagctaccacgaactttggtcaaacaaccacgaagttggtggtcattcaaccatgaccatgaccctcttttttaccctgtcaataagaacgtagttcatggtcatttgacgggagttggtggttagaaaagctaccaccatcctacccatggtattcactttttataaaggtagtcaaattcgacaaaaaaattttccagagacaaataatttttatgaaataaaaaaaattaagtaaaacgggccaccaattcatgtcttttctcaattccagcttggcgcgcttgacgataatttaaaatggcatttcgattttcatcctcatttatttcatttaaatcatcattttcatttgactcttccgtcgccagtggtggttcaggcaaacgcatttcaatggcaatattatgtagaacagctgctgctagaatggcagttgcgatccgtctaagcctcaagcgacatgatgttctgaaatagcgttttttattttaaaaaatcatttaacaactttgcaatcgaaaagcgccgcttaaaaattccgagtgcatgctcaataacagaacggcctttgcataaggcagtattgaaacgcttctcggcaacagttttcggatcacggaaggngaccattagccattttttaatggatagccactatcaccaagtaaaatagaattcccggccagtcccgattcgaaatattcccatacatctgactgc

SEQ ID NO: 8291 - DNA, 2082 bp, Heterodera glycines
catttgtcatttcccaataattcattcactttttcttccgctgtccgtttggcccggcattcattttcagacgatattttgcattcatttggcccgtctttggtggagacaatcgcctaaatgaagtgaaattttgattaccttaaacaatgaaaatgctgttgccactcacccaaattcaaaaattataaagttgacattgttcaaatttttgtgctcccattgaaccgccgtcgtccccccaattgggcatcgcttcaacacccaaacgaaatatccatcatcgtttccttctttctccaattttagcatttcgttggtccgctcgttcaccaattcaaatgccccaatttcggttgattcaaaaagtttaagtcgaattttgaagcaggcagaagtggtggcacggagaaatggctaaacaattggaaaccgaaattaaatggcaattaatccaaataattttaatcggaaaccaaaagcataggcaaattaaaaatgattattccatttgccctatttgaaattgctgatccatttgtagaagttcctcgttacgtaatttctgcaacacaatcgcatcgcttcggctggccatcttttgtcggagtgtgcaaccattcaaacaatgcttggacaacagtcgcatttggaacatcggcaaacaaataattggaatggattgaattcaactgattgaaattagtgagaaatgtgggcgaaatgagacgaagcaaattgttcaaatgatgcccatcgcaaaagccaaaatgacggatgtttgtcgcaaaaagaatcaaaatttgtcgggaaaaacatgcaaaatcggctggacgtctcttttgtatgaccaaatagacaaatacaattcggtgtcccttccgtcccaaatttgctggttggcatggagaaatgagatgacggagtgatcaatgtacctgaaaaaggatcaacacacataatacaccaaaaaggtgctgaattactcaatccgaaggtgcttaaagatgattttgttgggcagcggacggtccggcaccgaaaatccttcagattggccctcgacaaataattttggcattttaatctccttgcgaattgtgatcgttctccacagcgtcaattctgttttgccatcaaaatgcgcgtccactaaaacttcaaaacgcggagagagcagtgccattttaagaccaatttgaggacgacgaaaaaacggaagaatgcccatccaaacattgctacaaatccagctgaaatgcgtaaaaaaacttaggtaattagaaatttttaagttaaaaatcccttacattttccttaaacgtcggttcattttgcggcaattaaccaagcacacttagaattaattagtcgtaaattatcggtcggggtcgttttcgcgtggctgttttcgcgtggccattttcgcgtggccgttttcgcgtggggacgttttcgcgtgagtacctgtttacgatggtcggatatgttccaaacatccatttttcgaatcccgaacccgaattcgaaaattttctttactttttttgtttttttatttcctgaagctggtaccttctttaataatttgtcagcgatgaacgaaaaaaaaataaaattttataaaaattcaaaaatttaacaaaaataacaaaatcgggaacaaactaaggacgcatttcatagtttcgggaaataccaatgaggaaattcttaatgttttcgggattcacattgacatttgcataattgtgatcattttgggggagaatgttgttattgatatcgttataacggtggacgagtcggagaatccgtgcgtcggcatctcacatcgccaaaatttcttaagcccatatgcgctaaattggtcgaaaacatagagtgcgccgtcatgttctaacttaactttgtttctatttgttttaatttgagctgctggttcatattgtaataattttaagtcttaataaatttatcaaattcacttaggtaattataaaataaattaaaactcgaaagaaaataaaagtcgaacaaattttggtaaaatatagtgtgtgtgtgtgtgtggggataatg

SEQ ID NO: 8292 - DNA, 4022 bp, Heterodera glycines
tggtcgcttctgtacagaaatttttgaatacataatcataaggtccataatcgggatttgttggcaacggatggtcctgcatcggaaattccacaaaaatttgtccttgttgtccttgatttgcataaatagtttcgcttttggtccaatttgctcgtcctccgtgtccttgcgaattgcgatggtcattccaaattgtcaattcgccttttccatcaaaatgtttgtccactaaaatgtcgaaacggtcggaaatcagtgccattttgagtccgagttggggacggtcaaaagatggcagaatgtccatccaaacatccgcacaaatccaactgaaaaattggaaacgaaaattttaatttttcaaaaatttccttaccgtcggttcattttggaggctcaattagcacacttttccctttaaaatctgttgttatgtaacttaaaaagagacagttaaaatgagaaagcaaagtacaaatcaatcaatgatgcataaggctgggaatttaaggcactaaaaatcttcaaaaagtcgactaaaaaagtcataaaaatcgccaaaaagtcacgaaaaaatggaaaaaagtcctgaaaaattaggtgaattaatttatagaataacactttgatcatatttaaaatatcttaattttaggccattgtcgccaccagcgaaagaaaaagaagaagcgggcaaaagcaacgaaaatgtcgtctaattattagggaatagaattacatggaaatccatatttttttcctggactgtgggaggcctgaaacgcacgaaaaacatgtttttagcttggtttgaagcttctaggaaggatttctatatccatattttccatatttttccatatttcgcgatttatgtccatatttccatatttttccatattttggcattttggtccatattttatgtccatattttggcatttttcaaaaaaacctctattagaacggcccccagcagctaaattagcttttttgagcccaaaacccgaaaaatttttcaaaaaatcattttttcgccaaaatttctcgagaatattgaataaatttaaattttcttaaaattaataaattatgtcaaaaataagcaaaaaagcgaaaatttcgcttttgttgttgattttgcgctaaaaaaattaataaattttagcttttatgttttttttcttttaaaatgattgcacgtaattgccgaaaaaattcgagaccaatttccgaatgttgaccgactaattgcaaaacgaaagccgtctttgtcaaagcgccttaccgagtcaaaaaatttggaaatgtatctcatatgcaatttcaaccaataaatttgaagaaattttgcactcaattttgaaaaatttatgtccatattttgacatttttgccatttatgtccatatttcgcgatttttgccattttatgtccatattttgcgatttttggtccatattttatggccatatttcgcaattttatatccatatttttggactccctactaattatatttgaggcatggccaaatctcactaccgtatttgctctaattatccccaaatctccattaatcccccaatatccaattatcccccagtctaggaggggtttgaaaaataatcccaattggaaatgaacttatcgcaccaattgaaaatggatttgatgctctcttttttctaagaaatgctttttgttgattcttacatttatttaattttcttttttgtgagagttttttggtgccaatgtcaatcccgcaaaacattctcagttttcccgaaacaatgaaatgccatttattattattattttttttttttatccgcccaactcaaattcctatttttaatattcatcgccaaaatggtcatcagaacagcaaacaaaattatcatcaaataaaacggtcggacatctctcaaattatcactccttcttccgctgatcactgggcccgggagtcgagaacactttttcatcgctttgatctggcggagacagcggcctaaataaaccaaatttgaaatgaatgaacatttaaagtactgtacggaggacactactgtaccctcctgtccatgctctattcaaaagtagagtgccacgggaccgggacctggtagcggacaactgagtacaattgagtaccaaggtcccctgggactattcccggttttcccaggcaaaaattcctgggttttcaacccgaaaaggtcccggtcccgggtttgcccaaaattcccggtcccgtggcactctattcaaaagtaaggccaatctttttgcttacccaatacaatcatgataaagatggaagatcactccattcaaattgtccaaattttcgtctttttcccattgaaccgccgccgtctccccaacaattggacaccgtttcaacagacaaatctcttcgtccttcgtcagtgtcaacttttcttgggtcatttcgttcaccaactcaaatggctcaacaatattcatttcgttagccactagaagttcaagccgaacattgtaagcgacagaagtggtggcacggagaaatgtctaaacaaaaaagggagcgtaaatcaaatggcgcccggaaaatgcgtcagtggaaaaagcgtcagcagaaaatgcgtcagcgaattttattgtcttaaaaacaagttccttgcgttttcgaggtcactgaccacgaatccggtatccattccggcctatttccgaatctcgaacccggactcgaacaaaaaactcaaaagtacaaaattttggcgctacttgcaaagagcactattttgaaaatgttttcacttttttttggaaaaatttttttttgttttttttatgcagaatttgtttttttaacatggaacgtattgcatactatttaataaactgaaaaaaacattttaaaagaaaatttagcgctagttaaaaattgacaaattttgagttttatcaaaaaccaaaccaaaggggggaccctattgttttgcaaaatttttttgagataaaaaatcgtgaatatattttttattcgccataattatgctgttaatacttaatattcatcattatgtgtcaaaaaaacaaaaaaaaatttttccaaaaaaaagtgaaaaaattttcaaaatagtgctctttgcaagtagcgccgaatctctctagcaaaacttgctcaatttatttcgaaatgaaattctttgcttatcttttctctttttgtcttgggtgatttcaaccgttttatacaaaatttaggcgtatatctatttaaaattaaatatttgtattaacagatgattaaagttttcattctcgtcttattttgtacattctcagtatcagccgaatacgatgactacattgatgatgaaatagaaggccaatcctcagcaggtatggaaaagtacaaataaatgcttattctctctctctccctttccctctctttctcgctcttttcattataatctctgttgttctctctatcacccgctatctcatttctgctctttcttttcacctttttaatattttctttcttctctttttttcattttttccctttctttatcttcactttttctttaactcccttctttcactgttttaaatgtttctccatttcctttttctcttcccttcctgttcctttctcgcgttttttcaaccaaaattgtttctgaaagaaggaaacagcaaatagtaaatatagaaaaaaaataattaaggtttaactttttaaatgccactaattgattttatttttattttcgaaaaatcggctgctaaacaggaactggatttttaaggattttttaactcctgactaatcatttatacttaatatataacaaatatgatgaaaattttgctttttcattttttactcaattcaatcatttcagttgaaacggtagtcgaatttttggcaaaattcgaaaccctgacagcatcagcggcagatggtggttcttttatgaacatcatttctttgagcatggtctccttt

SEQ ID NO: 8293 - DNA, 1787 bp, Heterodera glycines
gtattaaaccaaaaattaaaaattgaaataattttaaatattcaaaaatgaaataaaaaaccttttaaaggaacaaattatccctacttagctcaatctcaacgcctcagcatgggaacgataaaaaaattttttgggcttgaccaattaatctcaataatgaaactatataagagaaaaataatcggcaacaacataataaactatctaaattaaataaaaattttacaaagaagcagatgtattagctggccaatcgaataacatatatgaataaataatatatttttgttgattcaaggcatacggagataaaaattctaaaagaaaatggaatctgtcaaaaataaatgctattgaatactgtgggtccagtcgggtccatcatcatacccatattggtagcggtggtgttatcaatcatttattcaacaatattatacaattggatggtccgactcttctcgacttgcagtcggatcagagtctgattgcgtggagaagtggggaaggggataagagtcggattaaagggaccaccttctcgtcgacattaggttatgtcatatgtgattaggggtcgtggtgataaggtcaatgggttccaagacaattctgatgtcgttgagatacatctagatcattcccgtttcgaacaatgcaaacagtaaataatatcacatgtccaatatttagataaatctagatgggtatgaacacggaaagtgagtactctttgttaattgacattatattgttatcaattattgaggacatcatcaaatgtaaaaaaccaaatttcataagcgggctcaatcctaagccaaatattaatctcttttcaattacgatagatattttttcaacaataaaaattaattagttttttacagagcctggcgggaacgggattccgcgggaaaacacgggaatcccgttcccgttttttttgccggacgggattttaacaggaacgggaaaatggctggaataccgttcgggaatcccggcccgtcattttcgttttcccattcccgttcccgtaagttttttatcaaaaacgggaaaaaagtacactgtaagaatgggagtctgagtaaaaattttgaagggaattgtgtgaaaagagattgatataggtatatatatatatattagagagcggcgggaacgggaatcccgcgggaaagtgaaaaattaatcatgaaaattagtcaaaggaaaaaaattttaaaaaaataattaatatattctttaaaaggaagattgccaagtgtgcaaatggcctaatggctactctccttgactttcccttcttctttccccttgttcaatccctctacagaaattaaattattttgaattttttttttgtatactcgtgggtttcctataaagaaaatatgattcctatagttttttttaaattgatacatattttatcattttttaaatgaaaatcctaccaatttagcttaataatcccaaaaaccaacctttttttgttgaaaatctgttaacaaattgcacccaaatttttaaaatttcccccggcggcgcctatcggcaccgccggacccccttttccccaaaagttttttggaaaaagtgcgccgaaaaaagtgatgagaaaagcaaactgaattctgatattattcgatcatttagtccgaaaatgattaattgtttgaaataattaaagaaatttgttttaaaattttcattaaatttaatttagctttaacaattggattttattaaataaaaaacaaaatgaaaatttaatt

SEQ ID NO: 8294 - DNA, 5264 bp, Heterodera glycines
  unsure (1)..(5264): unsure at all n locations
attaatcttcgtcatgtgttaatgacaatcacgtaagttgaccacacagaatgttcattgngcatgtaattaatgctaattggttatgcttgttaatacggaaaatttttttcggtaattgaaaagtctaaacattttcctttcactaaatatatgaagcgtgaatggttttgcttaataaattgtgaattatgttataattaatactaaattaccagagcttccttttttatgtaaataatagatattttttccatggatttatttcttatatattttagcatttttatacatattttatttacatttcgcgatttttcttacataaaaaagaaagccctgttaattagacatttgaataagaccgaatttatatgtattcaaatattttttttgcaatttattttagccagaaaatatacatactattttagcttggttttaagcgtctaagactcgttttacttccatattttacatttttgtccatattttccatccagattttagtattttcaaaataaatttgaaaaatacacccataaaaaaacacaacaagaaatactctcttaagaccgaataatttgaaaaaatcaaaattaaaaaaaaattcactgttattttgttggaaaaattcgttttcctcaatatgaaggaaacttttttttttgcaaattaccataattatttgataatttcatagcttgtggtgcatcgataatgaattgcagtgactccgctaaatattcggaacttataaaagtgcgtcaaagcactgaaattgcttatgcattgttcagctgttcatttttaattttgtgcgcttttcccatgttcaaattggcccgagaacggcacactttgtacattctgatcagcaaggtgagcaacacaaacaacaaattttccgttttgagacagtttgtgccatgccatccacaggggtagagcgcaaacagaaaatcccgcgattgcggatacaatttgccacgaatagagaaatgttagggctatccaatgatatcaagaatgtttaagttagttgacactagacaaaatgaaccaagagaaaatttaagaattttggtaagcgaaccgactggagaaaattggaatttcgaaattctttggggaaaataatccaaatccataattctctaataaataattttctttttaaaaattttatccataattgccacaaactcccaaaaattcagcggaacgcggaaaaatcaacaaatggaaaaattttgacagaaaattattcataacgttgtccaaaatgaactaaattgttaattatttatatcgttcgatggccttaagacttttctaatatcatccaaaatttcaaaaaataaaaaacaaacgctaattaattaaactcatttctgttaggctatccatttagtagttaattatggtgctatgtcattatttaaaacatcattatgtgcgttatttaaaaaacaccaaaataaaaatttttgcttataactttgctctaaaacaaataaaattttcttaatgatggctttttaaataacgccctttatgatgtttgtttttttaaataacgactccgccccgttaattatgttagccacataattgcaaccaaaaaaatatctgaattcgtggtgtggtcaatgaagtgagagatgatcaaaattttgaccaaaaaaaagtctttgaatatacataacatgaatctcgaaattgagagcaaagaaaaatttgaaataatttatatttgcttatgttttgatgctgatcagaaaagtctcttacagcaacttgatcagatcacgcattattcatggcgaacggaacaacggcgggaaaccccaaaatatatgcaataaaaagcgaggaaatttccgaaaaaatttccaaattttgccttttagatttttccaacaattctctacctgttgtcaagtatcccaaccatgagttcagtcttttttctaatccctgccaatattcgtggattaattgtgaaaacagcgacaaattgcaaacaatttggctgggtcagcatgcgtttgcacattgttgcagtggctgcaaaccgtgcccatgccgtactcttcccgtttcattatgcacaaaaagtcacaaaaaagtgagacaaaaaacaaaaacaaaaagtgtgattttatatggccaagacaggacaaggatactgtattttggaacggtggtgattggtcaaatcccaaaaagtatcaataaggcaaacctaagaaaataatcaatggtaataattagagccacttttcctgaaattttcatagcaaatatgcaataaaaagccaagaatacacacctaagaatcgaccaaaaatttcagaaaatataaaatatacccctaaaaataatgctaataatttaagttaaattttcaatttaaatttttttccaagggcaatttatgaaaaaagagaaaaacatctaaaaatatgagcccattttcagcattgaagaattagtttctgacatcacatgaacccggatttgtatacaaattcaaattttcgtattccaattttcaattgtcttacattagcattgttgaaatttcagaaaaagttttcatttgaaaatcaaataaaaaaatacaataaatatgtataacaaaaatttggaacttttattaggaccgttaatcacacataaaaatagagaccggcgtgcgaaatttacggggtcccaatccgcaatcaggcattttttggcaattgcggcatttttgggattaatcccgcgggatatcgtttttgtttttttattttcaatttaaggacaattttcatccaatgtgtggtaatgcatctgttggccatcatttcagttccattttacctatgtaaaaatttattggcgaaacaatttaaattgtattttattttttaatttagatgtttacccctactcttggacctatttgattgtttcattaccattttatggggcaattgcgctacgtttggcatggattaaatgtaaaattatccacattttttacttggcatagaaattggcattccatttgcagcatgcattttttatttaaaattgaaaaaaaaacattttccttgtaattagggctttagttgcgcttttaaacaacaaaaaattccaactctttttattaagggtttgacaccaaaacaggaattttcttaatttttatcaaaaatgataatttttgctgtttgccccccaaaaaaccaaaaaaaaaaagtctcaaagccaaagcatcttgaaaatttagcctcaccggactctcaataagcacataaaaactgaacctacaattaaattaacacactattgagccggatttaccattgtacttctggacccggaccaaacgggtcgcctgccgagtattgaatttgccaaaagtcgggtccgactcttgaaaacccggggggtatccggctctctggacttggttgctgctttcaattttcagttaaaaatcgaaattggcattcggaagcggcacaaaattcggcatcggacaaggacagtgtgcgaatcactgtgctatgttttgccgttcaaattcacacactttgctgtgtgctatccgttgaagcagctaatacgaaatggttctcagaatttatgaattgtgatgagcatccaattggccaacagctttattttctctacatattgttcgccaatttgtattttgtgtcggatgaggcaatttttaattgacgattaattaagctaattgttgattaatttgggtgcatggatttaaattgaccactaattaagctagttgattaattcagctctgatttaaattgaatagacaaaacgggtctgaattattgttagtagaacattaattaagcaatttttcttgaaccggatttaaattgtcttttgtaattaattagccggaactctgactaaatgaccagtaattacgctattgattaattgggctcggacataaactacttgaaatagtgatttgtatattattaactcaaaatcaatcatttaaggttctttttatggcgctttgtagagatatgcgagttgaatttgtgcgaatgatttacaaaattgtgccctttttgaagggaaatgctccaacagcaacaacaacaataagaacaacacaactgatgtccaacacaacgcattacagtaaccgaatacagaatttcaatgttcgtaccgtaggagaaagtcgatgactatgagatgatgagatagtggttggccgatggacaaaaatgtaaaaatcaaaaatctgctgattactatgattttatcaacttttcaaggacatatctgagtttagcagattggataaagaaaatttatttaaaaaaatttgactatttattgtgattgaatgtatttttaatctttgtcatcttctaagccgtcgatttgaattccttttcattttgtgccatttactacaccaatcgcttccaaatgctgtcaaatttcatctgaacattttggaaaaataataggaagaatttgattttttcgaacccaaatcgataatgacctaaactttctgtgcctaattaagcccatggttttgcttactctcgcattgcatccgcacgtgcccggactagcaacataacagtcaaatggacaattgactttcagacagctctccgtcacactatcgtacaggcattgttctgaaagcgtaaaagggacaaacgggattattagcaggacaaccaccaccagcaaaagtgccattgaagaagaggggatcaaagaaattttattcatttttaattttaatttttcaataatggaggaatttttgggatttaatttaattataatttaaagaatttatcaatttataccaaacattcattgtgcttatttctatgacaaaaggaatgaaagtgcaatgaatgtgaaacaaattttgcgatgaaaaaaagcttttttttgtgttttaattaaaaaatggtaaaattccaccagacaagcatttgaatgattacaaagcatttttatcgttaaaactttttcttcgccattttggttttcatttttgattaaagaataagcattaaaaaacaattaatgcgacaatgaaataagtagtatatagtcccaaaaggttgcgggtgtttcccgcacgagcccgtgcctatgggaaggcgcagccctttgaatttgccgccccataaaaaatccacgatgggggggtgtttcaaaaccaaaacctattgaaccacttt

SEQ ID NO: 8295 - DNA, 2100 bp, Heterodera glycines
catggacggaccgagcagcagcagcggcacgtcacgccttgttgagggacgaagcagtgcaaacagcagcaggagattttaaaaagcaataatgccacgacccaaaccaattaaattttaagttttattttagaataaatttttacttttaataatttaaatctttaattacccaaaaatttatttattaactatgaacaaaaatgccaaaacatggtcacgacaatgttgagggacgaagcagtgcaaacagcagcaggagatttgaaaaagcaataatgccacgacccaaaccaattaaattttaagttttattttagaataaatttttacttttaataatttaaatctttaattacccaaaaatttatttattaactatgaacaaaaatgccaaaacatgtcaactgagatttcgactgaactatttgttgagttgagatgataagcaaaatttatataaaaatcgagtgcgttaaaactggtaaaaatcccaccgtcacctttcaaatctcggtttttctaaaatgtgctcttaaaaatacaaaatcgcaatcccaattaaattatttaatcttaagaggtccaggttcttttcaattctgctttgtctcgatttttcaaaattgatcttttgtttcttccccatgtatatagttcgcttcgctgttcatatggctggctttatcccatccctcatttgtccgctttatcctatccgccatttgtccgctttattcatccccatttgtccactttatcccatcccccatttatccgccttatccatccccatttatccgctttatcctatcccttatctgtccatttgtcctattgcccattttatctcatcgcccattttgtctgcattatctcatcccccttttgtctgctttatcccatctcctattttgtccgcttctccccatcgcccgtggtttcgtctcgctctgtccatctccaatattcttcccggaattgcttggactcatcctcgtttttttgcgcgcgtcagcccatccccgtcggcgttatcgacgtcaaacccatcggcgaagctgctgcaaattcgcagtttgtcgcctgctgaaatgcgacggccgacggacggaccattcgccgatcgatcggacacttttgatcgcacaataattgcttctgctccctcactgaatttcttcaaaagtttttttctttttttttgcccggggcgaaaacgtcacaaaaattgcgcgggcatttccgagcgcaaataaataaataaaaattgaaaattaccatcgtttctttatgcaccaattgctgtgcggcgcttcaattcggtcaaaatctgaagagcatatgcagtgaagaagcccaaatttgcatggtattttgttgcaaaaattacagattttgcacattgcccaaaaagttgtttacaaaatgcattaaattgggcttccactttcatgtaaattttttttcttgaaacgttcgaagtaataggaaaagcatcgtcttttttttttactttgttactgagattggaaatattgagatttagttttaaattaatttgaagaattttttggtatttatttaattttttgcatatatttaatgcaaatttttttacctttttatcacatttttaaggggtttttaaaaagcacaaataacaacaaagccatattataataaaatgtttttattaacttttgctttcgctgctttcattttcattttttctgtttacataatttatttaattgttttttttatcagttccaattattttgttgatttgagcccaaatcacaatcaatttgcagttaatgtacgttttacactgttttttcgccaaatgattctttctgtttgtctttttttgaacagtttaaagaatgaatgaattacctaaattcataaaatttatttgttagtttattatttaaatttttattttgcattttatgtaattaaatgggtcagcgccgctgcgttcactgccaaaccgcaaatttctgcacacgtcacaacaaaattaggcttcttcaccgagacaaactgaagccatgcatgtggtcagcaaaaataaataatttaaatttaaat

SEQ ID NO: 8296 - DNA, 1558 bp, Heterodera glycines
  unsure (1)..(1558): unsure at all n locations
ctgaagccatgcatgtggtcagcaaaaaataaataatttaaaatttaaataatttttttatatttaattttaggctcaacaaacacattcagtcgcactatcgtccgctgaatttgcnctggacactttgcatgcgttcaattttccaatggaacaatgaaacagtgaatgtaaaaaacattgaacaaattaattaccattttaaaaatttaaactaaacgagtttttttttaatagttttgattaaataaaaaaaccgaatttcaaattagaaaaatattggtctgaaaattttcatcggaacacaaaaattaactacattttcattataataaaatctaattatttttcattttaagcatttttgggtgtaaaagcttaatttttcgcttcattttggttctgtggtgccatactgtcgacgtaggaaaaaatttaatttctatgattattgttatttgatcaaaaaataataataaaaaagcataggtttggagccacctgctcggcttcgtctggttcgtctacctccaatggtgggccctcaatgaatcgcttccgtcggtgaacgcgccgattgcggactattgggtgatgggcacggcaatgctgtgcagtcaggtgaataattaccatgttaattgctttccaattaatagaattaatatttgaataaaattaatattttttcatttaaatacaaaaatgttatgcctaaattgcatctgttcaaaatctattgcagctctgtatgcttctctcctctgcttaccatattttcgggtgccattcgcctcagcgccgcaaacaatggtaaaataaatttttaaaatatttttgtaaaattcaaatattttctatggaaaggcttcgggccgaccttttcggcgtgtcggctggactcagtggactgtacatgaccggactgtacacttcattttaccattttccggttagttcaaaaaaaaaattatcagcgatttatttgctatttttggaccaaaaattaaacctaaaaatttccaaaatttaggagcttcaaaaattttacggcactctgatcggtgccatggtggttttaatcgccatttacgtgccattccgtcgcttctccatccagtccaaatgtcgctttggtgtgccggatgtattgtatttgtcaatggcactgatcgcactatacccgacttggcattggacccaggcaaatgctaattattaaggctggcattttgacttgatgctaatatgcattaaaaacgcatttggattgatttatgttgctttttcatgccatttccggtgatttttgagacttatatttttctgtaacagtttcgaaagaaaaacgaatttggccaatctattgtcattttgcgctttaatattcttgaaatttttctgcttatttttcaatttttgagtctttttttgtcatttgtttacgtgcttttaaattctttagaataatttttatttttttagctacacggcggcttaagcaatgatcatgtccgccaatgtatgaaagagtcttttcgcactgttcgcgctgctt

SEQ ID NO: 8297 - DNA, 2637 bp, Heterodera glycines
agcctgagtaagtcttttgagggaaaactatagggctgatggccaggtttgaaccggcatatctggcttaaggacagtgcttttacggctgaactacagaccgtgccctgtacgacgccccacgcgatcatataagatttacagcgcctcttgtgatcctttacactccctctcgggaaacctacgactttatgccaccatggcatgctctggtatcagggaatgcttgtcttgtctgaatcgatccaaattgggcaaaattcatattcgaagagtcggtcgagaaagttactctgacattgagacaaatgtcgatcatttcaaaaaaaaaataattgcgtcgaccaccaatcctttaggcaaattcgatgtgatcggctgctcccaccagtggtggcatttgctaatcctcgccgcgttgacctattcccactggacgggcatccaactgctgatcacttaccatcgcacggcactgatcagacagcagcctctccatacggaccaaatgcttcttcaatctgccgcttcgccttttgtgccagcgctttcgtcgtcgggccgactgggaacgaatctcttaaatcacaccgcgacatcaaccaacggcggatgaccacacaaatcataacggagggcaaaatggaaaaacaatttcgcatttaattgtatttaacatgcacaatttcagatgaaaaatatttttgaaccaaaaaaagggctcccggaaataatgccaagggaaattgcgtcagtatactgtgtttctaaaataaatttctgttgtattaagtaatgtaataataagttcgagattgtgtaaattttgtaaggtccgattaatataattttgaaaattaccgtaaaaaacatactgtagtttgatttccttttggggtcattaaaaagtactcttatatttaaattaatttatgtatatttttcaaaattttgaagaaaaaaaaacttctacatttcattttttcgatataagtcgtttttgtaaattactttaatagaaaaaaatacaaaataatttaaaaatttcctttcccccaattgattttatttttctttttgaatatacgtaaatggtaaattgattttttcaaagcattattgaaacatacataaacgaaactgatttattatttttacaaatatttccatttttcatttttactttttttctaatattgggtgatagataatataaatttggcaccatattttttaatgttttatttctttaacaaaaaaaaaccaactaacaaataagcaccaagggatgttgcaagtttcgctttcgccttttcgctttttattttggttttttcgctttttatttttctctttgcaacatccctgctaagcaccaaagaaaatttccgcttttatcagatttaaggccatgtttggattctacagaatgaatttggccataaatataatttttggcatgatttaatttgttaatttttgcaataaaaaaatcgtgaaaaattatttgtttatctttaatatatattctttattagatggaaattccaaaaacatttcattactgcaaattaaaattggtaattaatttggtcccgctttagggcatatattcccattttcagttataaaacactaaaggaatttcagagaatcgttaagccaatgtcttttttgttattgttttctattatttatctacatagcccagcaattattattggtagagttttaaaatgcaatacgaatttgataaaaattaatataatttatcaaaattctatttttttattttacgagtaaaaagcatcataaaagattcattttcgagattataggtggtaaaaacaaagatcatttcgctgaaaaagagaaatgttttgctattttcaaaatcaaacaaatgcacacaaaagtggcaaaacactcaccaactttaaaattcgaattcaatccgaatgaaaagccgacggttggccaagcgattaatgcccttttgccgaccaattttggcatgccattggcacaagcgatggcacagtttgacttcaaagtggaaatccgtgaacgtgccattgagtgtgcgctggtgtttgtcgactttgaccaatgggagaattcatttttagaacatcacggagtgtacaaagtgttgctttacccaaaatcagggtaagacggaaaggatacggtactcaaattaaaatcattgtctgattttacaagttcagaaataatgtacgcacaaatgatcaatcgatgacacaaccgtgggcaacaaacactgatcagaaaaaaggtaaattattaatacaaggaaaaataagaaattttttttagctgattgtgaatttcccataatttatcgtcaatttcaagaaattagaataattagggcaaaaagtgccaataattaagaaaatatccccgcgttattcttgagtttattccataatttagatcataataaatacaatggtgaaattttgttcacaatgacaaatttcaaagcattttcggagggacgaggaccaaaagaaaattacagtgacaaagtgataatcggcggaatgccatggaaaatttggattatatataataaagacactattggattttatttgtgttggacctgca

SEQ ID NO: 8298 - DNA, 1508 bp, Heterodera glycines
tttgaatgccgtttcgagtcggtcatttgcgctcttcgggagtgcccctccttgccccccccccctccccctgtgactttcccatccttcccttcccttcctttgcccctcggcactttcttcctctccgtttttctttgtttgtgtttgttcgaggccaagctaacctcttcggaattaatgatacgcaaataggagaagcagaaggaagcggagaggttgcatgaatatgcccttcccaaaatgccaaatggcaaatggcagggtgtgggagctgctgactctctgctgctgggagaggggggaggggagggcccttatctgaataataatccccttgtaacgagaaatagagttaataataatatgaaccagatcaaatgttcatcaggccccgcattaaatctgcagtatttattgtgccattatgatgcacgatatgatttttaaaaatcaattagaatttatttttgctatggaaacctttttatagtgaataaaattattgaaataattttgtttttaattctatctttcgacaacagattcagccatatcaattaattttctaaaatgatttaaggctttgtcgtgaattttagaaaagagtaaaaaatttgaatttacctggtccttcgtttttaaaaattactttgtaacgagaaatagagttaataataatatgaaccagatcaaatgttcatcaggcgccgcatttaatctgcagtatttattgtgtcattctgatacacgatatgatttttaaaaatcatttagaatttatttttgctatggaaaccttttatagtgaataaaaatatagaaataattttgtttttaattctatcttcgacaacagattcagccatatcaattaattttctaaaatgatttaaggctttgtcgtgaattttagaaaagagtaaaaaatttgaatttacctggtccttcgtttttaaaaattactttgtaacgagaaatagagttaataataatatgaaccagatcaaatgttcatcaggccccgcatttaatctgcagtatttattgtgtcattctgatacacgatattatttttaaaaatcattaagaatttatttttgctatggaaaccttttatagtgaataaaaatatagaaataattttgtttttaattctatcttcgacaacagattcagccatatcaattaattttctaaaatgatttaaggctttgtcgtgaattttagaaaagagtaaaaaatttgaatttacctggtccttcgtttttaaaaattactttgtaacgagaaatagagttaataataatatgaaccagatcaaatgttcatcaggccccgcatttaatctgcagtatttattgtgtcattctgatacacgatattatttttaaaaatcattaagaatttatttttgctatggaaacttttatagtgaataaaaatatagaaataattttgtttttaattctatcttcgacaacagattcagccatatcaattaattt

SEQ ID NO: 8299 - DNA, 3086 bp, Heterodera glycines
gaagaaaagaaagaacgatagaattctgccaatgggagaagagggggaaaggggaagaagaggtgggaaaaacgatgcgatgcgatgggatgactaactgatgacattcgatagggacaagacaaaatggagggggggggccggggacacccccgggggaaaagcacaaaacggcacaaaaggggggacactgccgaaattatgagttttgaccaacaaattgaaaaaaaattatcagtattttagtttttcctaagcaaaaaagacagacaaataaaggcgggcgaatttagtgaggaaaggcacagccaatggacacacggggagaggaaaaaggggcagggaaaagaccgccccttcctcaaaaagaccgcccaatcagccccccccccctcacaatgcacgcgaacaaaagcttaaaaaatccaagtttaaattgcttacaaaagatttaatgtcaattaattaacttattttcttcgctcattttctcctctccttttactctctgtcccccattctctcgcctcctttcattcttctcccctactctctcgctctctcttttacactgttcctccattctctctttctcctttcattctctcctactctctcgctctctctttcacttcccacattcgctctttcttcctttttctttccctgctttcattttgcttctttacatcctccaacaataaaatgaataaatgtgaatgtacggtgtccacacctcctcctcctcttcgctcccgcggttaaaagccgtcgatctcttctcccccccccctcatttctttctcgaggctttctctcctccgctttttaagtggcttgttaacgcaaacaaatgtcgtgtttgttgaatgagaagaaagggacgacgaatgacaaaatgaaaagagagggggggggggggatcagaagcaaatgactaacagcaactgctaacacgcaatcatccaatcagtagtgattcgaattaagtgagaaaatgaaaaagcaaatttatagcaatcacaacgacgaagcattgtcacagttcatcaatgaacaaatcgtcatggaaaaagcgccgaaaaaaatcaacttcgattttcatgctcagaatctcacaaaatgcttatttctatcaaaaaaaaatgctcaaattgatcatggaaaaccaaaaatataacatttgaacattttaaacgtgttttgaataaattttgtaaaatgaggcttttgaaaattttgatctgggagccctgtttttaaatcattttaaagctattcggttcgatagaaaaaatcaattgacttaaatggcacgatgacatttcgcctactggacatttcgcctactaagccaaaatcggacgtttcgcctactaagccaacatttgacatttcgcctacgaatttttgcctactgaaaaaatgctagagaaaagaaaaaaagagagtgaaagagtagaaatgctttatttttcgatcaaataagttcgtgaaatacttacgagtcttaaaaagccaataaaaagccccgcattcattgaaatgaagacagtgtactgaatcttgagagtgcagccaaagaagcaaatggaaaatgtttctgacaacgatttgaacttagccaaaatgcggatcagggatggcacggaattccgattttcgacatttttgaccaccggaattccgattttcgaaaatttttggggcctcggaatgccatccctggtgcgggtccttgacgagaccgactttgaatcggacgaaggattagcaagcaccttgcacctgatcggactcgttttcagacctttatggaggggcttcacatccatggaaacaaagagagtgatgaatagggagtccaattatatggaaatccatatttttttcctggactgttgagggcctgaaacgcacgaaaaacatgtttttagcttggtttgaagcttctaggaaggatttctatatccatattttccatatttttccatatttcgcgatttaggtccatatttccatatttgtccatattttggcattttgtccatattttatgtccatattttggcatttttctaaaaaacctctattataacggcccccaacagctaaattggctttttgaccccgaaaaaccggaaaaattccgaaaaaataattttttaataaaattttctcgaaaacatgaataaattttaatttccttaaaaatcttaaatttaggtcaaaaataagtaaaaaaaaaaagtaaagtttcgctttctagttgattttttgctaaaaatgagcaaattttagatttatcatatttttttcttctaaaatgatttttaataccatatttagccatttttgaaagttttactttaatttagcgaatttgaaggaattttgaaaatataaatgcaatttcaactaataaattcgaagaaattttaaactcaattttgaaaaatttatgtccatattttgaaatttttgccattttatgtccatattttgcgatttttggtccatattttatggccatatttcgcgattttatattaatatttttggatgccctaatcatcagtaggataatccaaatctatttgctcactaacggattgtccagaggagtcaggcaatagctttgatctgttgcaattataaaaaataaaactaatttttatatacatattcaatgaatattataaaaaaaaaattattttttttaattaagaaaattctatttaaatttgaaaaattcatcataaacgacgataattttactctaaataaaaatattttatttaaagaaataagaatacgaatccctaaaatcgaatttttctataattttccactaaaatcgtagtaattgacgtcaatgaaaaatattaataaaaaaaaacatagcagaaaattttataaataaaatgaaaacccctttatatagaaaaattagacctaaatttttgaaaaaatcattaaaaatgacgctttcaacttaatttatgttttttcctgcttttcgttaattagaagaaatagcaaaatgatggttaatttgttgttgatctcgatatggttcgaatgca

SEQ ID NO: 8300 - DNA, 1149 bp, Heterodera glycines
agtgatgaagaagctaatgatagagatgcacactttctgtgttctttgaaaaatttatttgctttttttggctaaatttcattagcattataaatatagcgaaatatatgtcaaattagaatatatatttggtgaaatttgctgtcgaaagagctaggtattttaggttagtaggcgagatattcaataggcgaaatgtccagtaggcaaaatgtcagattttaggtgagtaggcgaaacgtccgtatttggcttagtaggcaaaacgtccgaatttagcttagtaggcgaaacgtccgattttggcttagtaggcgaaatgtcagtaggcgaagtgtcagtaggcgagatgtccagtaggcgaaacgtccgcacaccgacttaaattcctagccctgcttatcaaaacaaaaagcttttgtagtgaaaacccggtttaacgctgccgctgacttttcacattatactttttacccatttttgtgcctttttaagccttattggtaatcattaacactccaagctccgtttacaaggacgggtataccgatttgcaaggacataatggggaaaattcataaatccaaggacatttaaattttttctacaatgaaaaacggttaatatgtatttattcaaatggcttgtatttttcacctgaatggattaaatatggaaaatatggatatagaaatccacccggctcccggtaaattggacaccggaaaattggacaccgaaaagtggacactagaagattggacactaatggaaatttggacaccggaaaattggacactatcgtataaaaataaataaataaaaaataaataaaacaaattttggtttggccaaaagattttatttagtctgcacatacttatgttttttataagcgtaataaaacggaaataaataatgtttttattacataaaacttcagcaaaagaaaacaaccataacatccataaaaaagttttcttttggataggattcccatttttagtgtccaaaattccggcggtgtccagttttccacttgttgtccaattttctgatgtccaattttccagtgtccaatttagcggtccccaatccaccctagaagcttttaatcaagctaaaaacatgtttttcgtgcgtttcagg

SEQ ID NO: 8301 - DNA, 3320 bp, Heterodera glycines
  unsure (1)..(3320): unsure at all n locations
ttttgtgatattttgcgctattcttttttcgtttttctaaatgtcaactcagaaatgcncaataccttcacaaattctttctgttttccttggcaatataaacttttaaattcatcaaatctttcaatgaattctttctttttctgttcataaaaactctttttcatcattttatttttatttaaattcatttcttttttcatttgtatattttttttttgcgattttgcgcctaataatttaccaatttttgtctcaattctgcttctgttttcccaaagatattttccaattgccttcaatttctctttaattgcatcaaactttgtgataatttgtcttttaatatttatacgaaaatgattttatttgataatgtattgcatcaaatattatttaatttaactataaaaaattcaataaaaataatttatacatggcattttttaatgccatatgacaccgtcaaaaaataataattttaaatttttataatatgaaaagtttgaattcattttatttactcagccattttctgccttttaaatattttattaaaatccagcataaatggcattcataaatttgtttgattagttgtattggtaattctcaattatatttcactttcattaatttcatcatttgatttaaaatttaaaaaaaatcaattttattcaataaaaatcttattgtgataataaatgcattatttttaatttttttatttatcttaatttaaagaaataatttagcaatgaatttacttcaaattttcttatttattgttatgataaacgcacttggttgttcaaatggtattaaatttaaaataaaaaaagtaaatattaatctttctttctagcccagcttaaatgcagaagggatacggtagggacaataaacggtgttggcttgaagatgaacttttccgaagaagaatgcgagtcaacatatttctggcaatcggcatacaaatattgttatgcttcgcattgtttaagaggtatgactttggttaaataagaccaattaaacgaattgaaaagggtaattataatgatgaatgttaattaattttaaagtttgacggttccctggagcacgactcaatttaaaacccaaatatgggtcaaggagtttaattactacttaaatactgagttcacaactctgttcttatttatatcccacaaatatggatttaaagttcaacctaatgcttcaagtcttatctaattagagttcctccccgatcttaggtggaagaaatgtatgggctcataaacgaaaatacttgaccaaactttttaagaatgactcgaaaattaagaaatgtcatgtatgaaaccatcataatcctcttaaagaaaaaaaaggcttttttggaaccgtactattatgcttggacaatcaaaacagaggtatggaacatgtgacttaattactattaaatacagagcctacaactctgttcatcattatactataccgaaaaatttatacgaatttgacattcgaacccgtatcagttaatatgtatataaaattaggattattctctccggtcttaggaacaaaacaaatctcttagactaaatttttttaggacgattcgacaattttgtggatggcatttttagctcgtcataattcactttatcaaatattttaaggaaatgaatggcttacgcattatgggtgtgccaaaagcccggagaaaggtgcatgtagcgacaatgttgagaaggagatgaaagatttgtatggccttgctgtgagctgttcattttgtacaattggacgcaaaatggacgacatgagcaacaagaatttcccgctgtacaatacaaccaatgttgtaatgccgccatcaggacgaggtgaaacatttaattaattaatatagttagtagagcctggaaatttctaatttgcggatcgagttgcgggatttgaactaaaaatcttttgtctagaggggatcccgcgggattaattccgcatttcgcaaatccactatgctctacacggtaaaggttgttttaatgtgattgtacagtcaccgttcggaatgtcgtttgtaagctatcgtggcgcattacccatctctgtaaaggattttttgggtgctagtcgctttgtaaaactgccaaacttacagatttttcgttactttttaacacaaccaaattaaaaatctacatattacgatagctctgggcttgctctattagcataaaatttcagaaaatttcattgagttttcagaaagtcataaccaaaaagcaatctatgcgctagcgtgtgataccaagattaaaaaaggcaggaagaaattgtaaaaattataaaaaatgaaatttttcgttaaatataataattaacaaaatgaagaaatggaaacaatttatttggtagaacattggaggtgccaatgagaatgtgccgtctccgaaacattctttcattcgatcagcccaccggccgaagctggccttcatgcgttattttaggcttttgttttttcgtatcaatttgacgattcattacctaaatacaaaattaagagaacataagccaaagcgaaaaagagtaaatgaagaattaaatccggctctttgatagacttcgtcagaaaaattataacgatttcatcatttctacctcctccctacatggcgccaaatcggtggcgccaaaacgttttggttgttttaatctattttagaaacaaaaagagaattttgaaattttttattttcgattttttgttcgaatttcggctccgggttccgaattggtcgaaatggatgcctggttcgtgagcagcgaccctgaaaaccattggaagcatgttttcatgacttttgaaaacaaaaaaattttcttcaaaaaagggggcaaccaaccatcggcagtattaccttcgcgaaaaatacgtttttttgttgttttacaaaatttttaaatttgggtgttttcttttttttattatagcttggcgccaaaacgtcggcgccaaaacgtcggcgccaaaacgaccctggcgccaaaacgtcggcgccaaaacgtcggcgccaaaacgatacggacccctgcccaagtgtgcaaatggcctaatggctagtctccttgactttccttcttctttcccctggttcatccctctacagaaattagattatttttaattttttttttgataactcgtggggttcctataaagaaatatgatccctcatagtttttttttaaatgatacatattttatcattttttaatgaaaatcctacaattgagcttataatcgcaaaaac

SEQ ID NO: 8302 - DNA, 1538 bp, Heterodera glycines
cagggtcgacagtgttcgagtgcacatggaagaaatcaacctgagcttctcccaccgttttgcggtgatgcccgacaattgtctctccatgtaagtttggcattttgtttttttttgacaaatcaaaattgcctttcatttctcggatgggaaattggggaaattgacccaactcgaaataactactttttcttccatttttatagcctcggcacggagctgctgggagctgttggctttatcctaagcttacccgatggtttgggcattcgtgcggacatctgtgcagcgaagtggttttaaaccgccctaaattttggagactatcttttttttttgttagcgaaactcctcaaactccgtccatttcgttttcgcaaaaaatgtaagttgtatggcgttttgtttgtttttattgcttttttatgcattttcattttaaaggctcaaagctgttttgggtgaaggtgctggtgactcggggaagaagaacgaaatggtgtacgttgaatttaatccggataaaattggtcacagttccattcgaatgctattcggtcatccttcaaaaaccaaattagccaaagactcattcctccaacaaattttaaattcgaaaaaagtacccaatttattgaatttctatccctgaaaaagtgggacagtaacatgcgttaatattcgatactttgtttatgttttttattacaattaattaatttttcccaatttccataaagccttttggcattttgatgactgagttttaaatatctttttcatttgaaggatcgagggaaaagtcaaatgggcgaaatttttgacggaggatgagattcaacgggagatggccgacacaatgtagaaaggaggacgaatgatcggagaatttaatcggaagaactttttttgtcgtttcgatttacaaaattttcgaaaatatgttttgttatttggaaaaatgtaaaacatattcctattatccttaaattacataaaagataaatgaattttgaacaaaattcggcaagcacatataaaggatctaattttttaaaatatgtatgtaaatgctgtaacttttaagttaattgtaagcattaaaaaatttaaccaaacgccgctcaagcataaaaactagagttgagcgggaccgggaccggggcgggaaatcccggttttttcaggtcccggtcccggtttttggaaaaacagaaatcccggtctcggttttgcctgtcccggtcccggcgggactaaataagcactggtaagaatgggggtctgggtgagaaaagagaagggaattggtgagggatcacaaatttttgataaaaataaattaaatatttattttcatttatagcatttgtccatatcataagtggtcaagtggataaacgtttttactttcattatttgtctcttcggttcaattccctgatggaacagaaaattttttaatattttctttaccattattttaattgaatttaattaataaaaaatattttaatttaaaattattatttttttca

SEQ ID NO: 8303 - DNA, 2130 bp, Heterodera glycines
cggcgatccttcttttaggcaccgcagcagatgaagctgcttttcgaatcccgggattggtttgtcgtccaccgcccgttggaagtaggcccaaaaggtggtccaatcctccggtttcccagaaaacgtcggtggctgcaatcgaaccgtttcgaaagtcgtcaatgtgtctgctcgagtttccgaacgatggtgatgtgagggagctgctccctaagttcggaggcgttcccgactgggatgctcctcccttcgaatacgggcatgatgggatgcccgagggaatgcttgtccctggtcattgagcgtaagtcgctcaaatcgttgctgttcggcttgcagcggttgctgagcttgtggccgctgttgcgccgggggttcgttctctccccctcggttccttgccatccattccctgaccgggttgttcacccgaacactggccactgatggggcatttgagcggcgttggatgagcgcagccatgtttggcatgacgggtggggccacccggttggcttgttcgaatctttgtggcgcttggccaacttgtccagcctggaaccgcgccaagacatccctgaacgatgtctcccactctggcatgcttcgtcttgccatggtgcgtgggagctccttcgatgggtgactgtcctcggtgtcgactgatctgctcgatcgggagatgctctgctccctttcttcgtcctcaaatgtttgcctcatcgcctgcagatcaccgagatgctcagccgcaatttggagcagttcggcaggagttggatgctcccgcagttgcagatacttcgtcgaggctggcaagggggcggccacgaaatcatacaagaaatcctgccgctcctcgggtgccgcacccgcttctgctattcccttatcgaaatgcccttcaaaaatccgggtgacctgtccaagtccccgttccattgccatcagccgcgcggcgtgctcgggcgcttcgcccctcgtgaaatccgagtccatcagctcccgcgcttctgcgattcgcgacgagagtgtgtcagccgctctctcaatccgatctcgggccgacctcaccgtaattgctccgctgcgcaaattcttcgatgccgcgggtgtaacacccgtttggcttgtccccaggccttgcgcgtccatccctttctttgttttggtctgctgcgccgcattcgctcgttccccgtcctgtcggtcggaggggagatccccctgatttccgttcccgtttgccgcttcctcatcgagcggttcgttgttccgttccattttcgtttcgctctggttagtccgaggtgtagcgggaggtgctcccggttgctggtccttgttcgtggcagaaggccccctgctaacggcaccaactttgtttgtggcaaaaactctctgccgatttggcggggagtttctcccttccttctactccaatccactcctcaaaattcggtctcttttctctctctctctctcttttcgctgccgctcggtctcttcccaagggggtggaatggagagaagggcgggaggcaaacaagaagtgggctgttgtttgaataacggcaccaccgactcaatttgggggagaagccggtgctcccaggttcaaccgcctaagtccgagctcttcagtcagcactccggacgtgccaactcttccgatcgctgaagacgggagtttcgctcccgtttctctctctcgtcgttcgcgtcgccgtccaatcaccggggatgattggaaaaaggatggggggggtgggatttgaatgggcactcctgggggtggagtcccgtttgacttgctggatcgctccgaaatgcccaggcaacgtgggccggagaagaaagtgatttgagattcgggagacggctcccttttgaccacccgcccaaattgatgaacacaaataacagaaaaaatagtttattgatgaagcgctcaaacttgggtaattaaaccgtgggagggggggtgggcaaaaaagtgacaaacgggaaaaatgaggagtaaaaagtggatgccgggattgagtggtgaggagagagataaaggccaaaaaaaacaatttcttttcccgggagggaagggaacattaaaatgaacaaatgaatgat

SEQ ID NO: 8304 - DNA, 2083 bp, Heterodera glycines
gcgcagcattcgctcgttccccgtcctgtcgtccgaggggagatccccctgatttcagtcccgtttgccgcttcctcatcgagcggttcatgtttccgttccattttcgtttcgctctggttagtccgaggtgtagcgggaggtgctcccggttgctggtccttgtttgtggcaggagccccctgctaacggcaccaactttgtttgccgttagcacaattcgtttgttgtgttggtcctcggcgaccgcttgtgttgttggtcctcggcgaccgaagtgttgttgcttggttccccctgctaacggcaccaactttgtttgtggcaaaaactctctgccgatttggcggggagtttctcccttccttctgctccaatccactcctcaaaattcggtctcttttctctctctctctcttttcgctgccgttcggtcccttcccaagggggtggaatggagagaagggtgggaggcaaacaagaagtgggctgttgtttgaataacggcaccaccgactcaatttggggagaagccggtgctcccaggttcaactgcctaagtccgagctcttctgtcagcacttccggcgtgccaactcctgtccgatcgttgcgctcgggagtttcactcccgttttccctctcgctgtccgattcgctgtccaatcattgggggtgattggaaaaggagagaggtggggttcgagtgggcactcctgagagttggagtcccgtttgacttgctgaatcgctccgaaatgcccaggcaaaggggccggagaagaaggtgagttgcgaatcgggagtcggctcccttttgaccacccgcccaaattgatgaacacaaatgacagaaaaatagtttattaacggagcgctcaaactcaaacttgggtaattaaaccgtgggaggggggtgggcaaaaaagtgacaaacggcaaaaatgaggagtaaaagtggatgccgtgattgagtggtgaggtgagagattaagaccaaaaggaacaattttttctccctggaggggagtgagacataaaaatgaacgaatgaatgatgtgacggacaaattagtgatgaaaaaggggggggggatggtgattggtaaatattttccccccggggttcggcccagataaatgcaaattggacaaatgagcaaacgaatgattctcaaatatgcgataagaaaagggaagagtcaaaggccggggagagaagctccctggcacaaatcgtaaacattgtgaatggaaaaatgcgaaaaatgtgaatggtccaaagtttgaattgacaaaaaacaaagggacaaaaaatggggaaaaatcggagatggccggaggagaagtgtcggccaaagtgaggacaaaggcaaattcaaaaataaatggcaaagcggcggggcaaaagggggagagcagacgcagatgtgaaaaagagaagaaaagggggcaaaattgaaatacgacaaaaattgaataaaattacgatagcaaaatgttgagaaaaatgggaggaaaaagaaagaggtgaaaagtagagaaaattgggaagaaaaggcaaattccaatcattttcttgacccctctcgctctgtccctcaattgcgacgggaagtgctcccgttcgaccatttgtttcttttccctctcttctcccggcggggaaatgccaccgggtgatcgagcgcaccccctccgaaatagtcctcctcctcccgtgacagttcccggggctttccatcgtccactccgaacactagaaaaccttcccatgaatggcttcctcctttggcgggagcagacctcccgcccgttttggtcatctcgtcgcttcttgcgacaaaatgagtgagaaaaaatggacagacaagaacagagaaattagaaaataaaatgtgcagagagaacagtagcaaccatccagagacagtgagtgcagcagaaagagtgtgttgtatcggcgacaaagaagccagatactgacagacaatacacacttaagagtgaaaagaaattggtactcttgcactttgtatccgctttttttttttttcgcatttttcaattttttttacttttt

SEQ ID NO: 8305 - DNA, 4053 bp, Heterodera glycines
caggtctctttctctctctctctctctctctttctctctctctctcttctacagctttttctggccgttgacgtctgcttgggctataaggcagctccgcatatttattcttagcgatgagtgttttttgcattatttccagccacaatttccccgacttcggcgcacgtctgtctctctcattggacggaacttcccccactctctcgcccacaccttttctctcgctctttcctcttccttcccatcatcttgttcttttcccttcggcatgtgtctttcacttaaaaaatatctgtcttttcaaccctttcctctctctcgctctctctctctctctccatctccctctctctctctataccctgtcggtccccaaaaacgtctgtcccttccctctcctctgtctcttattaagcgctgtaattccccccccccgcctctcccccagggcgtacgtcgcaaaaaacgtctgtctgtcctctctgcgcctgtttctacctttttgcccactctctccctgccaccagtctcgcccgtctgcaatcgccgttttgtttgagcaaatatattcgtctccccggctcattcacttcatttccctccccattcatccattcattcccccccccccctccaaagtcgtataatcgcaacattcccttgaaaaatgcctgcattttaataccaaaaaatccagcatattttcatttaataggcttcaattacgaaaaattcactttaaaatgtgaaatatttcttattttctccattttcaaaaggaaaaaaggaaagtgatcactttttcatttcatttctcctccgattatcgctgcttctccgtctttgccattgccattattttattttgttttttctttcgatttgcttttccctttttctctgctgtctcttccttcccctgttcttcttcctccccctccgttcgcctcactttggccggacacggcccagtcgtggtccgactgctccagcgtgttctgacacggctgctgaggtattggatcatgactgaaccgttgtctggcgaactgtccccagcagcagcagacgaaaaatgaatgaacaaatgaatgaatgaatgaaaatggccgaattgagcagggaaaagggacggacggaaggcattggcatttcgaggcaaatggggaaagggacattggcattttgaataaggaacaaacaatggcattggcattctgatttccgattggttgtccagcccaatgagtgccttccgcttataattgtctattgcttcaattactaatgaatcatttgtcactcacttatatttttattccttttcagagtcgcaactttcgcaggctttgcaaaatcgcataaacaacaaaaagatggaaagaaaggagcgattatttcataaatgtcatatttatttgagaaagctctgccgatggttttctaaatttatgaattattccacgtcaatggcaccgaaaaattgaatttgcaacaatactttcaaattttcaaatccattatataaatttgtgtttcctcgttcgctattttttgcctctttttcagctgattcttacgcgcaattaagacaaattaataataggagtaaatgatgtgatgatgactaattgcattcgtttgccaattcgtcgtaatccgtgcgccgatgtgccaattatccgccgattgccaagcccatccattggcactgataagagacaaatcttattggatttaaatgacgggaaagccatgatcggtgatcaggagatctttaaaaagataactttccgcttacaaaaacgcgtcattccgctgatcagagtgatcagttcacttttgccactgattcatttgccctttcttttcttttgctaaaatttgtgcgttttctgtggcttttccctttttattctcttctattaccatcattgttctctccttccattgattacttcttttattacccaatgtacataataaaatgttcatgagcaaaacacggccattgggacgaacggtaaaatcagtgccttttatgtgtatgtatttatttttacataaaattgccgttcctgaattattaataaaaaaaaaaatcactctcaatttcacattcccatgggcacactctcattctctctctatctctcccgctgatcactcactctcattctctctctatctctcccgctgatcactcactctcattctctctctatctctcccgctgatcactcactctcattctctctctatctctcccgctgatcactcactctcattctctctctatctctcccgctgatcactcactctcattctctctctatctctcccgctgatcactcactctcattctctctctatctctcccgctgatcactcactctcattctctctctatctctcccgctgatcactcactctcattctcttgccccttcattcaccctaccatttgctctctcccgctgatcacacactctcattctctctctatctctcccgctgatcattcactctcattctcttgcccctatcattcaccctaccatttgctctctcccgctgatcactcactctcattctctctctatctctcccgctgatcactcactctattccctctctatctctcccgctgatcactcactctcattctctctctctatctctcccgctgatcattcactctcattctcttgcacctatcattcaccctaccatttgctctctcccgctgatcacacactctcattctctctctatctctcccgctgatcactcactctcattctcttgcccctatcattcaccctaccatttgctctctcccactgatcactctcggttcactcactctctttttttcgttctctttctatccctccctctttttcactcactctctttttactctctctctctttctttctctttctctgatcactctttgcttttcttttcttaagttttatgattaacattccctttcaattttgctgctgcttcctcccctcttatgctaaaatgccttttcttctgctcaaatgcttttcccacctccctttcgtttccttcccatcctttcaatttcattttccatggccctctcccaaaattattgggtgggcagtgatcttttgctgttctgtcggctaatgtgattgaggggggggggggcaaagggatgggcgggggaatttattttggtgggatttccccattaattgccccgctatgcttttcccctccaatgcgtagaccatcatcattaacagcgacacaagacgagcttattggggggtccacaaatgctccacccaaaaaaaattttggcgcatttttgcgaattcctcggattatcgcaatatgatcaccgaaggcccaagtgatgtgttcgtgtaaggtgtattattttgtttttgataatctcattcgactatccggaatttatttttggacagccatcagcgaattgagtggcggatgggtcgacgatttgggctgagtttcctcaagatgagcgatggtcgaggggggggggggggtaaagagggggctaccggaatttaagtgagttttttgtgagtttcaagtagaaaaccccttaagacattctccccaattctgctgacaaatgagcggaattctgctttatcccttctctgaaaatctctcttcatatttaatctgatgctaattacctttttattccctccaaatgttaacacattcattcactcattaactgtccaatgaaaaatatgcccaaaatgccttgggtaataaatacgcggctaattgactaattgatcgaccgcccgggggatgcattcattgtctgcccaatgaacatcccgagggctgatcaatgcgtcgcgacactcttttgaggtggcgtcagatgaattgcgcgcgcgaattttggaaatgttgcgctcgtccgtcccgatttgtcgggaccactgaccgaccacgatataaattcttttcttcatcaattatttccatttccatccaaaacaaacaaattttggaaat

SEQ ID NO: 8306 - DNA, 3324 bp, Heterodera glycines
gagcagaggcgggggggggggggggcggtggtcaaaccgatcgacggacggacgccggaggatgacggaattgggccgactcattgacccctccggcgcacccatcgacggggacattctcttccccgcccgaagggccactccaattcaattctcacacaaactcagccctcccccccccttcccaacccctcgggggatgtatttcccccacccttctcccgaaactcacaaatattctcgcggttcgacaatcgatccgatgcaaattctccgccgtcgcgcccacaaaatgcggccaaaaagccacgaagagttggcttattttgttgtcagatcatttctcatttcatacactttctcaatttgttttttttatttgcggtcagttttccctttgtccctttcctttgattgctttcccccctttttccccttttttccctccgttgatcattttgttttctttccttccgccgctgattcatccaccgatcccttctcattcttcggccaaaaaactcgcaaaatgtgggaaaatgcgccgccattgcgtttccctcgccaaatgaccttcacggcgattaatcgcccaaatgcgcttaaaaagtgacttttgcttgggaaatgggccattctccgagtttttgtcccaaggaacggtccaaaattaaaagtccaaaaagtgaccaatcacttgggcattagtccgttttccgcaattcgcttcggtgcttttccaagtgattgttcgtgctaatcccttcgaattcatttgtccgctctggtccgatcagatttgctcccggattttgcagggtcggttctcccccccccccccattatccctccccctcttccgttactaatttgatcaacccaaattttccacccgtaaatgccgaaaagcctttaaattatgccttaagggcatttcaattaagagttcaagcgaccacctgcagcaaaatgttagacgaatttttactttcctatgaaaattagtcaaaattccttctcccctcgcatttgatgagtttcgccgattccgtcgcctctccgccgggagattagcgcggagattaggccaaaagagacgaaacaaaagtcacgccaaatcaaaggcccaaagggaacggaggggagaagggaagggaccagtctctgctgctgcacggaggtcgcgcagaaggcaaaagcaaaccatttttaggttcaaaaaaattacgatggaattccaaaagtggcgattgaccgtccattgagttaaatcactttgaatgcatagccgctcaaaaaaaaataattttaatgaaaattgaaaaagatactaatggcattagtcaattgccaatcggagttggcttggcacttcccaatgccatgctcttttcctcccctcatgaatccccccaattcctttcattttttctgttctttcccttctgatcgatcagctgttttgtccctcagtcgccgatcacttcgcttacgccaatagcaaattttaacgaatctttgagctttttcttcacaaaataacgacattctctcttttattcgcttttctcggataaaatttcagccgaatgaatgaaaattggaaattgatccgattcgatccgtcttccattcattttccttttctcatttctttgaaatatatttttgacattccttttttcaaatttttttaatcattttttaggttttatttttaaggaaaggcattcgacgaacgaatggcatttgttgggcatcccattttggcagtaagtgttgtcaaataaatttactaagttcctttcccattcatttcgctttaggacattcgcaagggtttccgtcttcggcccactcaaaccgtggacaaatccaagccgatcattcaggcggaaggggagcagctgaccgaactgcttcaaaaccgttcgccttcccccgcggagctgccccaagcgaaagccaacggagtgccaaaggcgacaaaggcaccgccgccggcaccgccgatgactcagcaaaagaatgaggcaaaaagacagcagcagacgatgacggcaaaggtgttgtatagaaaggactaatgaaaaatacttttaaaatttgtgacagccatcgccgaaaaacattggcaacggtcagtcggtgagtgccgaccaacggcaaaaaatgttggcacaaatccgttccggcggtgttcgtctgcggcacgtgcaaacagcagataaaagcgggctgattttggacgagcaacagaaatgcacaatcggcacgcgtaacggcgccgcgtcacctcagtcgttggactcgcaggggtgagggagcaaaacggggccaaccaaatgccaagcgcaaaacgcaccggtgaagcgtgccaataaaattgcatacctttcgagagtctcgactttcatgaacaattcatttgattctactaacaaatcttagccaatatttagtcgccctccccgcgcagaatctcaaaaataatttccgattaaattgtattcgactgatcaaacgcactaacgaaaaagagcgaattgaaagtgcaataaatagtcattagcacattaattacgaattgcttatgtatgtataacaataagccaaataaatgttttggtcatttaaaatttataaaagtgttggcacttttttacaatttccaataaatatttaagaaagagaattctttcttccaaatatcttttcccaaatcgcttttctctgctttatcttccttcccaaatctctttctcccttttccttttcctttgtcttttttctctttcttttctctctcattttctctcccatttgaatttcatttaattttgttaaacatttcccttttcttccttccttttgggctctcttcgcttttccccctttttatttttgcttcgcaaattgcccccttttccaccagaaagagtccctctccgcgcaccactccgtcctcctcctcaactccgtcctcctcctccgcgtcggccttttcgccgactccgatcagtgcgggaaaccgtggcggttgttggcaccgctcgccgtccggtgattcgtccgattcggtgccgttggccaatgggtgcgccgctgtgccgctgagtcatcccccgacggagcattttggccaccatcctgatcacactgatcactgctctgatcacttccatcaccatctttcacctgctgcttctcttctgccccctccgctcttttctcttccctctcctctctccgtctctttttcttcgctctctccccaaaaaatgcccgttggccgcgtggcgagtcccctgccaccagcgaaat

SEQ ID NO: 8307 - DNA, 1396 bp, Heterodera glycines
ttgaattattggggcccaaacgtgacggccaaccgtgccggcccaactgagctactccgttagcgtccaattcacaatgttaccaacaatttatattaattagtttagtacaattaaaaaataaacagagctttgattatatgtatcaaggatttactgaaaataatttaacttaatcggaattagaagaaaacaacaatttaattctttaaacatagttaaaattggtttttctctttcattttcataaaaattttcgctaggtatgttattttgtttaaaagtgtatcagtttgatatgccgtttttggataatatatccaaattaaaaactctgatttgcgaaaatggaatttggcccagaaaatgatttggtgctcaaaaaaaaattgattattttcaatattttttgaaaattggtatatattttttaattaaaattttcaacttaaatgatttacgggacgtgccgtttcgacgccgtaagaaataatttcttgttttattatctctaagaaaacatatgatttaacttattttaagtggattggaagctttgacctctgattaagaatttgatcaaagaaaaacaccctttgtattggttttgaatgcattggcattttttattacgccaatcattttttgctgcttttttttcttttataccgtccatgttgcggttttcgcgaaacgccctttttgtgtcgtcaccatttttgcggttttacgaaatgacgcggcacctttattttgcgactttttcgtccataatccggtcccgaaatattaaatatactatttttcattttaaattaatttatttggcgatatgatatctcaaatcttcttcccattttgtcttttgacatgatctttcttttccagtctttacttttttgaatttgtgatattgtgtcagcaaaacagccttctcgtttccgacgatttatttggattgtaatttcatcttcggatttcattctaatttgtattttgtttccgcattaaagtaattagcctaatcgtggtgtttgctttggtgcgtgttcgttcacctgcggcgaagtgaaaagaaaatattgttgtgcattacgccgaaataggcacgagaaaggtgaaaaaggcacaaataattgaaaaaaggcaaaaaaaagcaaaacaaaaacaattttcaaaatagaaaaataagtgcaaactttctaatattttatttcaaaaatgaagtaaattttaagaaaggaccatgaaaaatgaaattttatggcttcttgaatttttgtgaaaattttcaatttttatggggcgcattttttaaaaaatttggcccattcttagggttgtattttttatttttaaaattgtccgaattttttaacattcatttgcttaaaat

SEQ ID NO: 8308 - DNA, 1493 bp, Heterodera glycines
  unsure (1)..(1493): unsure at all n locations
tttatttttaaaaatgttccgaattttttaacattcactttcttatgatccagncatgaaaaagcccgaaccccggacgctttgtctagcttagagtgcagcgggaccgggacctgaacacggacaactgagtacaactgagtaccaaggtcccggttttgaccagttttgaccgggaccgggaaattcccggctttttttcccggttttcacagccaaaaagtcccggtttttcaaccaaaaaagtctcggtcccggtcttgcccaaatttcccggtcccgctgcactctagtctagctcgaccccgacctagctgaccttgacaaaccccgaccccaacttttctcatcatgaagaattggacctaccctggcaaagagatgggtgagttaggtttggctcttttttaaattttggccaaaagatttgtagatttgtagcaattcatgcattaactgctctatttcaaacatttcaatgcaaaaagttaacctataaagaaatacactaaaacttaattaaaatttcatgcttaaaaaaactatgaaaatctacagtaaccaaataaacggctggccaattagtagggatgggaatttaagtcaaatgacttttttttttgcttactttaaatgaccttaaaatgagctaaaatgtgttttacactttgtttcaagcctcatagccaatagtaattaggaaaaaaggaaaattaaattttttttcgatttaaactcatgtaattcgaactgataactgaaataattgaaattaattgttatcaattatttttttatgtctgagtgggtccatttttattaaattaacaaaatatgtgtcgaatgatggaaacgtgtgtcgataatagggatgtgtgatagtctcggttctcgattcttgactcgggaaatttctcgggtttttcgcttctcggtctcgggtttttagtctcggaaaccgagaaatttttacactgttgaggatgaagaagaaaaactattgaaattttgaacaatttttcttaacaaattcattaaaatcccaaaaaattttcgtgtcggtgcctatcggcgccgccaacccacaaaattgccccaagatttcaaaaggcgaaacgtctgattttaggtgagtaggcaaaatgttgagtaggcgaagtgtcagtaggcgagatgtccagtaggagaaatgtaagtcggcgaaatgtccgattttgggctagtaggcgaaacgtacgattttgggttactaggcgaaatgtccagaaggcgaaatgtcgtcgtgcccggccggaccctcttgctccccaaaatttttgaaaatagtgaaacgcaaaaaaagcatttttaaaagcaaaaaaaggtcgtcaatttgatgttgagactcctgcgcataaattccagttgacctaccctttttatgtgtttttgaattaaaaaaaatacttttacattaatttaattaagatttctcgattcccgagtcgagaaat

SEQ ID NO: 8309 - DNA, 3190 bp, Heterodera glycines
cgagctcgattctcggtaaaaatcatttctcgcacatccccattcgttaaggcggcgccgataggcacgataagcgccgacgcgaaaatttttcaaatttaatttacaaattttgcaaaatattattttaaaactttttttgcaaaaaatataataaatttatattgttttttttgtaagatgtgtagagacgttatactatttaaatattttccaattttaattaaatttaaataggattattttttgaaaagataaaaatattatttcaaaaatgttgacttcttagcttgggaacctaacagagttatcctggcaaaaataaaatttttatttttttgtggtttacaagcaaattaattttttttttaaattttaatttattcattcttggttattgcccatcttagtgacttatttttttgaaatatattttcatgaggctcgtaattttgtagccaaaaaatacgaagtttttgaggttcgaagcacgaatcttaaagttcacacagccctggtcctgatcttgactttatcatttatttcgttagtcatgcacaaccttttttgacggctctttaatttcatgaaaagaagtgaaaaactcattaaaatttagatgtttggcaattaattggtcgtaatttgttgacactttgtccctgtcatattttcactgacaaaaaaagcgtgtgattttttacataagcatgcctgtaaatttgtatttaataatggggaaatttgtgtaaattttgaatgatttttctgttcccccataatttggtttgacttattataatttctatatatcagttgattaaaaacgtaattttaatttatttttaaattttgaaattaatcaacgtatgctaacacaaaaacatgaacacaacgacaccaactgacactgagcagtttcttttgttcctcggcggtgccgttgaactgttgataaattttgttggcattccgttgtccattgccaatttgattttggtggcacgcacatcggtcatccacccgaacatgaaagccattctcatcttccagagcctctttattatcttggtaaattaaattcaattaaatcaaagtatttaaataaaaacaagaaatgattattattctaaatttaagcgtggttcctgtcgttttgtcatctgtctgttcaaattcttcctttgggacccaattggtgccgaatctatgcaatttttcccggcacttttgaaaatatatttcatcggcatttatgctcgtaattttgtgccccatgttctgatcgttgaacgcattttgtccactttatttgtccgaacatatgaaaagaaacgtggccatctgttcactattctgtggacgccttttgcggtgagagtaatgacaattttattagccaattaaattatatttccagaaatgcctaaaaaacttaaaattattagttttttcataagccaaaaggtattttgataatgttgttaagcataatgttaagatgcatttaccgatgaattttatatgccaaatctgtttttttctgtcctatgtcactctaattcgagagatgattaattcttattcgataagatataagcgatcaatttttatttacagttgatcatcccaatttatattgccaccacaacgccttcaccacatgatcataagcaaccaataacgaatctgatcacaactgccgtccaattgctgctggtcggaagcattgagttaggcattttttacaaattaagccgatacaattccaaaatttatcaaaaaatgttccaaaatattggctcgaataatctgtcaattcgttatcaggtaatacatataaattaattatataatcattatttattttgaaagctctctgaaaacattcgcattggcaaacagctaattccaccgctgtttctgaatttgggcaacattttcgcggggacaatgattttattatgggactttcttgatttgccattttatatttatatattcaatttggctgcgattatcaactcaattttcggccttcttatcgaatttttcattataacgtaaacaaatgtaaaatttaaaatattaatttaatttaaaagttttaagatgccacccatttttgaaaagggatttatgccattttttgaaccgtattggcaaaatgtttggatttaatcttttggcctataatcatcgaattgctgatgcaactgtaaaagttggcacaaataatactgctccatctttgtctgctgtcaatggcattgctcaacggaatttgatcagcggaaaagcattgattgataaccaaacaaaaccagaagatcattttgccatgctgaaagaagcatgggagaaggggccgatgaaatgacaaaattaactgaaaaactttttgactcattctaattttggttgagaattaatgctttataaggaaaaaaccgaatcatttgggatttacatgaaatgccataatttgtgttataaattatatgattttgcatattttttctacgcatatgctatgaagaaaggggctcaaaaataccattactgcgttaaaattttggatttggtgaaggtttttagtgcatataaaagcatattttggggttttcgagaataaatgcatattttgccatttttgcatttttagagcatatttcggtcatttttggcaaattttaataagaaaaatgaaataaaaatgaaaatacaccccaaagattgaccttttggggaatttaaaaaatatagccttgaaactcggaaaattttgaattttttgcaagaactattgaaaaaattgttgatattagttgtttaagcatatgataaaaattttaaaaatctgtattttacacaattttggcatttttttgagggttaaagccattttgggtaatcccaaggcatatttgggcatttttccggtttttaagacatattttggggatttttagtgcatattttatgcgcatatttggcatttttttagtgcatacaactttgaaccctactcataattaataataaaatccataaaaaattaatttatggaattatttgccattgttctctttagaaaaataaaaatgaggaaaaattagaattttattattgttgcttcagctgtttgaattcttttgtaattcccgaaaattttcttccatctgtcaat

SEQ ID NO: 8310 - DNA, 1387 bp, Heterodera glycines
  unsure (1)..(1387): unsure at all n locations
gaattggcatttggccatttcttgggcccctttttcccatccttttttcaacagggcaaaaagtttttttttgtttgtttggttatcaatcaatgctttgcggctgatcaaattccgtgagcaaatgccatgnacagcagcaagaaggggagcagtattatttgtgccaaatgttacagttgcatcaccaattcgatgattataggccaaatgattaaatccaaacattttaccaatacggttcaaaaattggcacaaatccctattcaaaaatggatggcatcttaaaacttttaaattaaattaatattttaagttttacatttgtttacgttataatgaaaaattcgataagaaggccgaaaattgagttgataatcgcagccaaattgaatatatgtatataaaatggcaaatcaagaaagccacataataaaatcattgtccccgcgaaaatgttgcccaaatttagaaacagtggcggtattagctgtttgccaatgcgaatgttttcagagagctttcaaaataaataatgattatataattaatttatatggattacctgataacgaattgacagattattcgagccaatattttggaacattttttgataaattttggaattgtatcggcttaattggtaaaaaatgcctaactcaatgcttccgaccagcaattggacggcagttgtgatcagattcattattggttgcttatgatcatgtggtgaaggcgttgtggtggcaatataaattgggatgatcaactgtaaataaaaattgatcgcttatatcttatcgaataagaattaatcatctctcgaattaagttttttaggcatttctggaaatataatttaattggctaataaaattgtcattactctcaccgcaaaaggcgtccacagaatagtgaacagatggccacgtttcttttcatatgttcggacaaataaagtggacaaaatgcgttcaacgatcagaacatggggcacaaaattacgagcataaatgccgatgaaatatattttcaaaagtgccgggaaaaattgcatagattcggcaccaattgggtcccaaaggaagaatttgaacagacagatgacaaaacgacaggaaccacgcttaaatttagaataataatcatttcttgtttttatttaaatactttgatttaattgaatttaatttaccaagataataaagagactctggaagatgagaatggctttcatgttcgggtggatgaccgatgtgcgtgccaccaaaatcaaattggcaatggacaacggaatgccaacaaaatttatcaacagttcaacggcaccgccgaggaacaaaagaaactgctcagtgtcagttggtgtcgttgtgttcatgtt

SEQ ID NO: 8311 - DNA, 5975 bp, Heterodera glycines
tttttgcctcagattccaatgttgtgctcgagtcgtccgtttcggaagaagccaccaaagtggtggagcgcagcaaaagcacgcgcctttaccacccaatcacttccctccgccgcgcactcaccgattggctgccgcaattttaccacggcccggggcccgccattccgccgctgagccaacgcgaaacgcaaagcattgcgacggtcatcggatcgagcgcgatgagagcatcgtcagaagtgccaccgccacagatcagaacatgcgaaggtggcaaaatggcagcaaagggcaaaaacaaaaaaaaaaggacacggaaaaacggacttgggagaggaaaaaaaccgaagtagttcgtttcccccctcccctcaaaaaattgaaggaaaaaaacaaactgaaatttttcaaaaaagtcataaatttataaaaaattgcaaaaaaaaaaactgaaaaattttccaatgcttttccaaagtttcaaataaattgttatttttaaaaaatttcctatattaagattttttctgtttgaaagtttttaaatttcgggggggaaacgactcgtgggatacggtggaggaaaaatgaagtgcacctaaaaagatttatccctggcaaaaaaggcctcggagaggtttcccctgacaatttgaccactggccaatgcttagactgtctatttgctcccttaaaattttggaatttgaaagtaactctgcaggcaatgagctgttgaccgatttgcccaccccaatttacacgtcgccaatcggaagtgcaaccacagtgactgtgcaggcgtttcccctctccgaagcgatcattggcgtcgtcgaggcgcacgacacatcttcgacctccaaagagcctcaaacggtcaattcgctcaccgtaaattataacgaaccgatggaaattccaatttccgcgaaaaaggttggcctataaaaggaaacaatcaactttatgtgggcaattaggaagaacggcggatgtcagtgacgggaaaagccaattcaatggaaatgggtgaggaggagccatcttcaagaacgccggaggcagcaaaccgacaaataggcggtgaaacgcaaccaatgaccgatttcaatggcccgaccggcggcgaaatcgacttggaaaacttggcactgtttgtggacatgttcgtgccaattaactccgaccagtttcatcagatttattattcgctttcagtttctatttaccattcgattacggaaaacggggggccgggcttttcaatgagctgaaatggctgtacgaaaatgcccaacttttgcacaccgaagggcccgagagcagcaagtgcgaggaatggcatcgccgtttcaaagagttcagcagcacggccaaccaactgacggagctgtacaaaaatgtcattcgcttgccgaacaaagtgtggtttctgccttcccctcccccttctctcttctgtcctttcatttctgttcttcacttttagagtcttttgcaagaaatttttccatatttatgggaggcgcaaggacttttgtctgttctttgcgcgttgctcaaatggatgcgcaagggaaaccttctcattgcaccgacaggtcactcaatcaatcgtgggtttaatttgcattttcatatttcagaatcggccacttggggactcgaagacgtcgactacgactcggagccgtgggccctcggcggtggtcttttgcccgacatgcaaaggctcgtgatctcttcggccaaagttggcgaaattttcacggttaaatacgcgattccgctgtccctcacttgctacactatccaacccgtggatttgctcagtttggacaaggtttcctcatccccccctctttgaattttccctccgttcagtcgctgctcttcgatctgttcgccctgtccgatgagcaacttcttgccaactccgccatttctctgcccggcaattcgtcgcttcgtcccgaagagtttttcttcgacctcaacttcgccccgttccttaaatacggtgccccgtcccatcacttcgctgccgaatgtgcggacggaggagaggccgacgacggagaggcgaattcaaaaggcctttgctcattggcacttggcattctgaacgcgtcaggcctcgtggaaagcttcaattccgaatgtattgtcaaattccggcaaaagtattacccgtctctctcaagtgaacaacaaatggaggacgactcttcccagtcgcccggagatgtaccaatggaattaatgccattctattttaatctttccattcactcagagcacgtcgcttgactcggagattgcccataggttatccgttccgttgcgtctgaccagcgactttctcgcctccttccccagcctcgtcgagattcgctggctgatgggctctaatgaggcggtctccgtccgtcgtctcctccactgcgtttccgcctctttggctttgaacggtcagacaatgcccatttaaatattcgtttgtttgtttcctttccactttaaaggttccaacgggtttttcactatcgtcagctccgattgtgaggagcgtgtcgaattgctcacccgactcggcctccaaccactagtccaccgcgacatcgacgggttaatggatggatttgtggtgatgggccatgctctttgattcgccatgaaggaaaagaagcagcccacgttctttctctcccccccccccgtttttttgacactgtttcacaaatctttaatgttaaattgtacctttcctaattatgtttccatataatcagtcaaaactaggctttctctgtttgttattgtccaaaattccgcatggccatcggtctcccccaagatcattgttttgaaaacttgaaatggaatgccaaaaacacacatggggttggactttcaaacaaagagcgtagccaggcccttgagcgactaccatgtttttacttttgtgtcaaattttaaggaaatttgggcccgaaggtgctgataggcgtcgcttgggaaatttgagatttttgatgaaatttcttaaaagtggtacttttttcgagtttccaaattttcgttaaaacacccttttttcgaactccccatgatattaaaaatgttcactgtaccgaaatgaatgcctcgatttccattcgcttctctcatttccaattccctcgtccctcccattcgctttgcccttgtctcacctatcacttaatcatcaaattaatacctaattaccaatggtcgttgtcaacgaataaaaaaacaaccctcattaatttcctgcaattcgtctccattgtttttaactatcattttgagtcatccacaaacccacacaaatatttttatttattcaccattttttgtattatggttacatcacattttcgtgataaatttttatgtattcccgattaaaagggccgtgatattggttggtgaatttgatttgaaaattctttggtttatagcctttaatctcttattcaaattcatttagctttcgatttcattttttggtttcagcgcgtttggatgaaatttaatccgtcgcattttccgtttcgattgatccctcatggttctttttgccaatatagtcctcgggccaacgatacatgctcttcggcattcgacgatcctttcccaacaaagccttacaggcgaaaatacggactcgttacggaaacagctgatctattcagcttatgctcctttactaatgctaacaactgctcatctgtatgacatttttatggtatttccatttccccaggtggtgacagtgacactcattagggcgatggacggggccaaagtggcgaagaagggtgcggcatttttagaaaaaagctaaatatttgtacattcctacgacgatgacgactacttctcgaacgacggaattaattgcttgtgcttctcaatctccactagtgtttatttcggtttctgaacgtgtttaaagcttgaaaaggcaaaattaattagcatacaaagtaatctgaatggactcgggggatgcacatcagatgcgggtaaataaaaaagggtcgagattagcggggacagagctagagcaccacaaaatgagaatttggactaaagtattgaaaagtcaaaggccgtttcctcattgtctgcgtaaaccgtcttcacagtttcagtgtccactgcttcacattcgagtcttggccaacagtaagcagtcgattgtcggaaagccaagcaactccgttgatggcactcatcgaatgggcaccgcggatgactagcggatgttcaccgctttgttgcaagtcccaaaccatcacattggtgtcgagagaacccgtggcgatgtaccgactgaagacaaagagtggccactttatttgaatgcattgtttacccctgcccatgaaaaattattatttaactgatttttaaattccttaaaacggattcgggatttgtaattagttggaatttatgttcttattcataatcagcgaccccaaagatcttcgtaatttttgcaaagggaggacagcggtcaattttgcgaaaactcagccatgtaaacggacgattttttttttgcttaaaacccgttttgttgcggcgctcttttttaaaaattttccgggaacgccggtatgaaaaattttagtaatttttgatgaaatttgttaatagatttgtccaaaaatttagtaaagttttttcataagtcagtaccacgccattaacatataatcaacctgttgctggaccaggcgcagcagttgatccgggctgtatgaaaagaccattctttttcagatgccactttgaaaccgtcgtccacactgtaaggcaccacctgaaggcaaaaggcagataatgacccgaaagtgccaaagtgtccacttttctggcaatgtccgtggccaccaaatacttcccatttgggctgaagttcaccgaggttatggcacctgcatgttgtaatacttttttctcaacaaatgcgccgccgttggtaggcaaatcgtacaaatgcacgcgactgtcctaaaggacaaaataaaaataattttttttgaaatttttacatttcctccaactgccaaaagaattccattggggtgaatggcaacagaagtaccttcgtactttatatcgataacgcttgattgttttttgtcggtgaaaatgaaaatggagcgatggcatgcgaccgcaactctttccccgttttgcccaatgctcgccacaccgcgtggttgggaggacaaacggtgggaaagcgactgaacattttctaaaagaatatatgtaaagaaaagctataaaaaccaaaaccgaccaatggaaggggaaagggcattttcaatgaaagcgaccgaatcgtcccatccgatggaaatgagcaaaccgccgctggtcaaactcagcccggacacttgcgacttgtgcacttggggagtcactcgttcagaagagccatccgagacattccaacgggctgagttttcaggttagaaaataaatattaaattcctaaattaagaagtttcctcacttatatgtccctcaaagtcagcagtgaatgccattcgtcgatcttcggacagcgtcaacgcggtgatggatttgttatgtcctctgagcactcggcagactttcagtgtctcggggcaaatgtaattgatgaagccgctcaatgagacactgacgatccaattcctaagccaaaccacggccaattgttggtcttctatggccgagccgaaggacaccgtcctaaaaggaatgtcaaatatggcattatttggaatggcaacccaattagttttcgtccaggcacatcccaaattttgatggttttgtcgccggaagcggtggccaattttatgccacccgaatgccaattcaacgcgaacactccgccgctatgcgcggctgcgcctttgcacgtttcgtccaccaat

SEQ ID NO: 8312 - DNA, 1747 bp, Heterodera glycines
tgttaattacgccaaatgcaaattaatgtcaaccgaaacggactgattgtgtggttcccaaaaacggattttgcccgattggtctccactggcaatgtaaaactcagagggggaatattttgccacggttgtcaaagtcgcgtgctccgtatacacatcacaatcggcaatattctggaaaatggaatttaaaacattgaaaatgaaccgccaaccaatccgaatcacatacttcctcgtctctgatgaacacgctatttccattgcagtaaaggaatttggttccatccgaattcgacgaaacaaccaaaggcattccacgcacagtgcgcggaagtgaggcaaaagtgcattctgaaaggaacacgtatataaattgaataaattcactgattgttgttcgtttattttaccattaccttttttaaattcttcgtccgaagatgtcatttgtgaatatttttgtttgagattctttttaaccctaaaatatgtacatacagtcatggtcaaaagtattgcaccaaaaaaattttttttttttttgaaaaatacgattttctcaaaaatgaatcgtgtgaaaaaggttgtattttatttactaccaaagaaacgttattaatgcactaataaataccaaaactgccccgatgactttctttgccgtatagaaaatcggtcatgactcaaacaacctcccctttttggggtacttatgcagtttaggccacataaattttttgttttgtttttaattataaaaacgtgtttccaggggtattcggggccgctttattgcccaaaaacgattaaattagactgaattgaatagaaaataggggattcatggccattccatgcatttgaatagtttttgggcaataaacgtggattttggcgaaaatgaattttcgactttgattcggattcgggtttttatgtttaagtcgtagacccatcatctcggtgagaattttgtcctcctctttctgacagacctactcaaatttccaaaaaaatttccctattttaagtttattttggggtgttcagatcactataaaggagtgatctgacggtccaaaagaatttttgatcaacatcaaaagtagtttagaggaatttttcgaccgagaaaatcaacttcaaaaaactatttttatgcatgtacgtatgaaaaatttttgaataatatctcaactcaagaaaagtcaggttttttgtctccaactcggtcgttcgggaaattttcggtctcgaaggcacaaagaaacgtcaagtgactaatcaaagaacttaaataaatgacgaaacccaatgcaaagcacacacagccgcttaaaagctgtttagccgaacaaaatgaatcaaaatcaattgaccccctcgcgactgagtaaagagcattcacgcaatcgatacataggattttcaattttatcaaaacatttatgtagtgaaaaatggatggataaattggttgtaaaatgcgggatcattgttcattgttacattcgtgaaaacagatgttttactaacaaagtctaaccacccaaggtaataaaaaatataaatattaatgatacagactgaaaccgaacataggtataatttgtcccatcaaatgacatttacaaggcccaagggttattttgggtggctgactccatacattctttcgagccacgataaaaaaaaagatatcagaaagcaaaatttatatgccttgcagttaaaaatctcaaga

SEQ ID NO: 8313 - DNA, 3702 bp, Heterodera glycines
tgatgtaataaaaaatatattaattttattttttttataatttttacttagttttaattgtcacataaatcactgccccattggatgctattccaatcgtcccaattatacaaaatgccagcgcaaaagcaatgaacgtccaacaaggatgttcatccatgtaacgcatgtaaagctgaaaagcgaaataaaaaattgtaaggtttttacaaagaaggtcaaagggtactgtatttttgagtctgatcccaaatgagaaggacataaattttcaatttttgaagtataagccgagcttggccgagaccaataatgtacaatcagatggctgacgaatattaaattgaaaatttaccaaaaaaattccatatttgtcattattcattacggtacaggcatctcacggatcgaaaacaagggcgatctcggatgtataaaacaaatccgttctactcccgctaattttagttgctcatctatgacatgctaactatttttttaaataaattcaaaaatgtgtaccgaatatccaatagggtccaccgcagaaaaattcattcttttaaaatttcagccgacaattgtaaattcagggctttcaaaagttgaaataatgctattgtgatttaatgtgttcatttgacgcgcaatttaattattataattaaattctcgacagtgcgtttctgatgagtgccattaaagcaaataaatgtttatctaatacataaagcaatttacggttgaaacaactgagataaaaaaccaagaattcagaagagaaattagattaatgtattttgtttggtgctgttagttttcgacaatactattgcgatttaatttgtgcatttgacgaacatggggaaaaagtgccaatgaaatggcatttttatgcgcaaaaatacataattgttattattaataaattatgattaagtcaaataatattcaattcgatttaaagtgtaactgagacaaagtatcaaataagacagagaagaaatttgctattagatttaataatttttgttgcgctattttccaagttttgaagcgtttcttcataaattactggcatctaataaaattttttaattaatgtcgctgtgaattttagtcaaatgacttttttctgattttaaatagccttaaaatgacttaaaaagttatctactttgttgatgcttatatctagggccccgacttttagtgacgaaaaatcgcaaaatatttagctaaaatagtgacgacaaagtgccaaaatagtgaaaaaaatccaaaatagtgacgaatagtgacataattttcagccaaaaattaagcaaaaaatttttttattcactgattgcagttgcaaatgaagtaaatttactttctaataatttcgtggcaaatattgaaattttaaaccaaaaattttgtaaagaaaaaaaaatttggtggatgaatttttaagaaaatttttaggtcgattcttaggggtgtattttttgtttttttggcatttttgttaataaattttactaaaaatgtcgaaatagtgaaaaatagtgacaaaaagccaaaaaagtgaattttcactattttaagtgacaaaactccaaaatagtgatttctagtgacgaaaaatgacgtccaaatgaaaaaattttaacgcagaaatgcgttttttgagctcctttcttcaaatcaattgagcaaaaaaaaagttttttcactagaaatcggtgccctacttatatcatacattttttactttttgagatttttatgaattttttaaattttttaaattatgactttttatcgtttttatatggctttttcatactttttgacgatgaattttttaatcgactgttggcaatttttagtgaattaaatacagtcctattaattaattcattttttggatcgctagaaagttgcaaaaaaagctcttttttatcaaaaatgaatagctcccggtcgtttcgacagcaaaggaattttcgacagtaaacataaaaacaaataattcttattaaaataaattatattacttgtcagttttactaaatttcttttaaattaagttactaatatgtattgcttgttaataggaatatgattttacgttttttacctagaaaaacttcagaaaaatacacccttaagaattggcccttaaaattttaaaaacacacccctaacaaaggagggcccccaagtgaatgtggagtttcgggatgaaacttggtgggtgggtagatttaccccggtttgttatgtgaattttttaccgtttttgctgaatggacatgttcgccgagttatgcggcttttccttttttccttccttatataatttgcaaagaaaataaaagcaatgtggttatgcctgtggctttactttttccccaaaaagttcgaatcccacgattttaatttaattttttttgttcacaattaaatattttttatcagatcattatcaaaatacattgttttgatcaaattattatttttttaatttttgctaaagaaattaattcattttttggacgaaaaatgtatgcaaacaaaaatgacctagttcgcttatcagcatggggaaagtgctttcggtggaccttttatatcataattcagaacaaatacctcgagaattccccccccccccccaaaatgccaataaatccgacaaatgtaatccatttaatggaagagtattatcatggtaatgctccaaatccatcgccaatcactgtcgaggagaagcaattggcagaagattttttgaaaactttgattttttgtgcgaataaaagcggcgaaattgagattagcgaagagctggtgttggatgattttgccaattttcatcaaaaggaagatcaggcagtcctatagaatcttcatcatcaagctatgccccctctcctaaaaaaattttcaatactgatttcgcctaattttgtggtttgagaaaattttacgatttacacccccttaaatttgaaacgaaacttaattactttttacagtcgaaaagtcccctcctaaatttataatatttctatcgaaaagtcctttgctgtcgaaaagtccggcgcccaaatgaattgctgcataacattttttagcatcaaaatgaaaaaacaatggttcttttcacaatataaagtaatgcatggaaaatgaattcggaaaaacagtaaattctaccgtatcttcacaaatgagtcctttcaacaaaagtacagtttggtgaacggattgtcattgtccagcggagtgttgcagaagggacaaattttgtgaaagccttgtccgccatttgggattagtgtctttgaccaatgtctgtatgtaaagatattgattgttacagtagtaatcgatgtttatatagaataagtccacaaatatgatcatataacatgaataaaatatgcataacaactgcaaacaatggccaatgattgaatgaaaactgccaaagccatcggaaatgccaaaaaacataattaaaaataaaattgtgcaaaataaaaatgagcataaagtggtcaatacaatttattatttttacaattaatcctgaaaatagactaattttagaactttaatatttgtcaaataaataattcagaaatatttttttgataagaactttaggagatctttttgagaaatataattaattttctcccaaca

SEQ ID NO: 8314 - DNA, 2597 bp, Heterodera glycines
  unsure (1)..(2597): unsure at all n locations
aaaatgttattcaaaatgnttcttctgagtaantttttaganaatattttttacccaattattnaaaatatgaaatgatgagttacttcaatttgnttgttttccaggaagcaattctcccatttaccaggagagcgcacttctcttttcgagtaaatgttgccgttaacggacactaaattaattgacttaactttttttacattaattttaattttaaatttggcattatttaagcaattctgaaaaaaatgagaaatttctcaaatttttgaattatttttttcaaaatgatgacaattaccttctttccaacaatttggagaaatttcgctgtctgattcattttcatcatcatcattgtttgaagaggaagctgataaataaacggaggcaccctgaaaataaaaaaaattttaaataaattttctctgtttctcttttacctcatcgtcattatcattgggtgaaagaattagcacaccattagtaaccaaaccatcaaattgaccatttgacttttctattttatttgcgtctgggcccaaaaataactgaatgaataaaaataaataaattatgttttaattgttttgttttgaaactctaaataaattttataggttgtccatttcatcaaatttacagcattttagtgtgtattgtcaattttgcctattatttacgcataaaaaatatctctaaaaaatttgtgtcacaatcagaatagttttcaggacaaaataattttcaaattttatttcttcacttccaaaaatttttcataaaaaaaaactagaaaaatccacgtccacatcagaaaagttatttgtgcaggacaaatgtcttttaaaaattaaaaattaattttctttttttttaattaagacttctgtctgaacgaatggagaggaataataattttatttaaattttttaaaatttaaataatgaagccatttatgtacatcatttgaatcgtcaaagccagccgcgtaaatgtacacattgttgggggcattacgctcggccacaatgcgacaagcaaaccgagaaattgtcgtaaggtgatcaatgacgaagtcaatcttttcgctattttctctcccaatctttatttaattaagttttaagaaaattataacatcttttaacagatacaaggtcagagatcacggatttggaaaacattttggtggttttgggggcaaaataattgttttagttgagagttttgtggctttttattaattttgcttttataagctcataaaagatcatcaacagttttcgaatgatggctaatttttcaaatggattgtgggatacaaatccattctcaccgtgatttgggtgatctctgtttctgaattattttcagataaaatcaattttttcgctattttctctcccaagctttatttaattaaattttaaaacaaattataacagctatttaacagatataaggccagagaacacggatttggaaaatattttgcgatttctggaggccaaaaaaggtattttgcagctattaaaaattttatggtttgctaagctaataaattcattaataatttttgaaatttttaaatagaatttcggattgtaaatctcttgccaaaactaattagagctgctctctgtccctaattattttttgatgaaatctcttcgacctgaaacatatcccggtttgggtcctgactgtattgagcaatcacttgttgtatgtcgctgaatgagaatgttattgagtgtgtggtggtgtcctcttcatcattggcactaattggccatggcatcggataatttggccattggttattggcccgtgcagttcttccgatcattgcagatgggttttgttggatgccatttggctcggcacgctgatcaaagttcattttcacgccggtctttccgaccaaaattaattggccgtagctgatcagtggttggcttacggaagcagcagcatctggtttcttcgcattgtatgatgggactttaacgaaaatttaaaattaaattaaaaaaattaaatcgaaaaatttcaattgttttttcattataataatttgtaataaaaaaaattgacctgacaatacaaacaaaatgagaagaagttgcgaaatttgagagcaaattttcatttctaacaatatgtgtaaggtataataatgtgcacagataaaaataatttttattttttttattttattgacaagaaaattgattttaaatgctttgaagaaatgttggcaaagggaatacgaaatattttcatggatataaaaatatatttgtaatttaggtaattttaaaatttttttacatttttatgattaagaaatcttcatttaatatcattaataatcgaatattcttatataataaaacggaagatttcacctttttttttcgttttaaccaaatataaaaatttggacaataaaaattatataaatttaataatgaaaaaatgataggtaatggtgcaatttccataaataaagcaattaattgttgggtttccttcaaatttatcattttttctaatctcttttaaaggggatcgattctgaaagcgg

SEQ ID NO: 8315 - DNA, 1769 bp, Heterodera glycines
tcaaaaaatgaaatcatttcatagggatcgcacaattagggatggatacattttattttgtctgtgggacaattgacaaaattttaacaattctcatataaattatgcgcacaaaagttcgccataccttcaggccctgaatgtcccccttgacgacaagaagttggggcaaatttcggaagtcttgcaacacctgtggtaaataatgaaagtataataatgacatgactaattagtggtaaagcataatttgatcaattccttaaccaattttttctctgctcttgttgtccccgccccttgcctctctatccccttaactttgtctatttaaacgaatggctttatgcccattttttgtggaaaatttttgaaaacttcagtaaattaaagaattcgtttcattaatttcgaaacactgaacctattagtgcctacagcaaaatcttcgattaaatttcattttgataaaaaaaaacatcatcagcacctcataattgcgacagccgtgcacaatcattttctttaaacgcttgtgctgcgacaatcgttccacagtgactcggttgatcttttcaaggtccagctcgcgcaaataaacaaacttttaaaaatttaaaatgtcaattaagaggattagaaatagctcaataaattctacataaattgaaaaaacaactatttttatatcctcttttaaaatttagtttttttttcataaatttcgacaaaaatacttgaagcgttaatattcttcaacatcttatttttgattctaaaataggctaaaaccaaaaaatgccaaaaagttgcaaaaaattgagtagatttaattttgatttgtaaccaaaaaataaaaataaatttcactccaactgcggtagcattcattataaaaaaaaatgttcacctctaactggggtaaatggttagccaaaaagccaaacagcgaatcgggcaaaaatgggtagtccaatggacggtccaccagacagactctctcaattcgatgcttccactgctccatcagtcgaagcaagtcgcgctaacaaataaatgttatacagaatatggctgttttcatttatttgttaatcctgacatttttctgtcaaattatctccacaaaaaatttctgcaaagttattgtttttaaaacaatttgtatatataaaaaataataaaaaagtttcagctaaaaacacaaattttataagaaaaaaagcgttggaatattttttgagggggggggcaataattccataattggtaactccgcgccctacctcatgtcgatcaaaatggcatgagcagcaaaaaacatagagaacgcgacgactccaaaacacagggccatccaagctaaaaaaataaatattctttacaccaattttgtacacagcaatgttaatacttctttgaaaaaattctgaacaaggttcttacatatgaattttagtattacataaaattttcttttttgataattttttaaaatttatttctaaggcgaataatagtgaaaaccaaaaaaataataattgttttgggtgggtgattaatgtcatcgaagattggattaatattttaaaaaaaatttaaatttatttttattattttgggtgattaagtcatcgaagatttgattaatattttaaaaaaatttaaaataattttattttatttttttctatgctttttccaaccaaaaatatgcatagttaaaaaaaaagtaaaaaataaactgcaagccgcaggattcgaacctg

SEQ ID NO: 8316 - DNA, 3226 bp, Heterodera glycines
  unsure (1)..(3226): unsure at all n locations
tctcaaaaccgaaacaaaaggacggtgatcatgacaatgtccatttcgcccaaagagtatgcttttacactaaaattctgtgggtcttaggctgattatttaaaaaaaagaaattttggtcaaacggtgccgacaaagggatttaaagaaattttgaattacgagagaacaacaatttgatcaatgatcacacaacgaataataataaacgtccgactagatattttgattcatttgaggattatcccgatttgaggacttgctaaaattaaaaaactcgtgaaaacaaagaaaaataactttcccatggaccaacggattaaatataacaaaaaacactccttattgggtcgtccaagttttcaaaatcagtcactatcaaactaaaattcgtatcacgaaaatttcaattaacgacattacgcaatttcagatacgattttggacacattaagcaattttccctccattttgggagccgtgccgaccctttcactttcgtaacttttgacgatggtaaaatgctttttctttttttcttttttaattatttatgcttttccttccaaggaattcttttcaccaacaaaagtgaggatattcttccgtcaattttccttcggactgttccaatgggcgccgttttgcgcgattttgtcggcctttggatgttgggcttggacattttgccattcagtcacctgcacgacgtcgaactgttcacctacaggggctgcaactgtaccatggacgcctgggttggacaaaacgatgattggctaattaattaacaatgaaaagactgttatgtgtcaaaaatttttggactgaagggaggggtcaaccatcttcccctttttctccctctcactatagcgcacgctctctctcttccctctctctcttcactctctctctccttctctctctttctctctccctcactctctctctctcttttttctctttcattctctctctccctctctttcttcacctccttttatttttctctctctctctttctttctctctctttctctttcccactctatctcaccagtctctcaccagtctctcactctatctcacctgtctctatctctccatctctctctctcgttttcttttttctctctctctctctctctatcttttcacctccttcactttttatctccctctctctttctctctctctctttctttctgttttctctatttctctctccgtctctctttctctctctccttctctctcttttcacatccttctcgatttctctctctctctcactctctccccgtcctgtctctctctctccctctctttctttctctctctgtctctccctctctctttctcactctctctcccgtgtctctctctcgctctccctctctttcttcctctctctctctttttctctttctctcttcctctctctttttacctccttctctctctctttctctctctctccatctcactctctttattcttctctctctctctctctcttttccactctttctcactcttcctctcactatagcgcgcgctctctctctttcgctttctttctccctccctcaccctctttctttttttctctctcacttcctctctctctccttctctctctttttcttccaaacacatataaattttttttgggcacattattttttagtgatcaactaaccgtaaaaaatggttaggtgccgaaaaaattcctatagagctggaaaaagctcttgcaaaaaatttatgacgagcaaaaagaaaataaaatttccacaaatttcttttaatttttagtgtgacttgtaagcctaaaaaactaacaaattaattaactcaaattaaaaataaaatgtaaaatgccatttttaaaaagttcaccaaaccgaccgactcggaagagccttcgatggacgattttcacatttccgctggaacaaaaaattgcaattattcaattgaacaacaatcattcaacatcgaagcagtggagaaataccacagcaaagattttgcgattccaatcatagcattaattgatgaaaacttcagcgaaatcgacgtgaaattgacaggtcttccgacaccaaaaattatttaatttggcattaaatccaacagaagatttataatattatgggtgaattgtttgttggcaaatcacattaaaagtaatttcctctgcttttaaagcagggttcgatctcaaaattttgaaatccccatttcagccataaaaaatcctcatttgccactaaaatacctcaaaaaacctcatttggaattaagttctcattttttaaaacctcataaaattgcgaacaaaatcagtcaactgtcatatttttcgtttgaaacaatcacggcgcctatcagcgccgccggacctatttttttttttaaaaattggcccaagaatcgcaaaatttgtaagttttggtaaaaatttataacaatctcatttaaaacgaccaaacaaataaaaaattcgatttttattgttttaataaattgacaattctcttaaattttttgcttttaattgcttttttgtgcgtggtttttccaaaaaaaaactttttgggaacgttgggagggcattgccgataggcgttgccggaaaaaatttgagattttgagtgcgatttgttaacagattttgtcaaaaaatgatttgactgagggtttttcgaaaaaatttttaagatttgaagaaaagttcgaacattttgccaaatatacctaatttttcaaaaaatcatgcgtttttgtcactttttttttatcaaaaaaccacaaaaatccgcaaatcctcattttaaaagcatttttcagatgcaaataacagaagtttaatggaatttcacattggcacaaatcggtctctgaatgtcacatttcccgacgtaaaaaatggaaaaatattaatataaaatacataatatttatttttttattttaaacattattttaaaatataattatttttaataatattttaattaaaaaaggtgtcgccttatgaccaaaatttcgcaacattgccaaatggaagtttcacaatgattctgtgggtggcactgcgcaagaacagttacgaaattatgttgaatgacacggcgttggacaacagacaattttggccaaatgattggtgngaggggtcgggacgagagaatgtcacacatatcgtggtaaaaa

SEQ ID NO: 8317 - DNA, 2682 bp, Heterodera glycines
  unsure (1)..(2682): unsure at all n locations
aattaaaaacgtgcataaattgtntgaaatgttctggtttttattaaactaacaataaggcttttcaaagtctaataaggctttttctttttattctttttgtaaatagaaaaaaagtttttctcatttattattactttttaaaaccaaatcacaattattaaaatttataatatttttattgtttatttatttatttaagttgagtggtaaaatgctattacttgaggagccaataacaaaccaaattgaggttaaaagctataattagtggcaagaaaaggaaaacgataattcagataaaagaacctgtaaagcttacttacaccaaattctatcggaaaatatgcaacggcgtacagtttacattccgcctccaactgcagaatgaaaccgaccagttcaaaatcagtttgttacacgacagaccggaacaccacgacagaagtgatcaaaatttaaattaattaattattataatccattaagcaaataaataataatgtaataattcagttggctcaacagtttttgaaattgaagtcgcactaccaagcaacttcactttcgtcgttcattatgtgaggaaatgggttttttacttaaattcttaccaatataaaattgattttcaatataagagaattggaaaaatgttatgaggctttggcctgaagcttttccttacaatttcaaaaaatataaaacaatttttagtacggtattagaacatctaacaatggaagcctaaccttaaatgtcgacgatcagagagaatatgagtttaaactcattatcagtgacacatataaattcattgtgaatagaactttgttttacgaacagaacacaagcattacgccggcttgggcaataaattttgtccgggtaattaacgtactaattgggcaattaacacttttattgaaaaggtggaaggcaatgtgaatctactcgaagagccatcagtgaacatttcaaaggtaagttttaattttatgaaaaagtgtcaatttcttaaatgattatcgactagccgttttgacaactttttctttgagtttagtgcagaaaatcggaaaaaaatgccagaacaatggaactctcttcagtgctaaactacggagatgttgtgacaatccaaggaaagtttaataaactcaagccagaactgaacatttatttgcttcacgaggcagcggaagcggacacaaaaagtgagtgacgagaatttcgtaataaaatttatcagtgaaatggtcgcaagtgtcagaaccgaaaagcctggaaattattctgagtaaatttaaattttgctgaaaaactcacataaccagcattcgtcagtggaagggggcaaattggcggcatgtccgtgccgagaaaattaagacgatagaattttatttgagttgataaaagctaaaaatttaaccaattcgagaaatatggttttattattacataagtacaaatcttttaagcggctacggatgcaaccgttggtgacgtgctgttgcatttgcattttgattttaatactacaaaaatcaaatgcgcccataaaatatattcggtgaattttttcctaataaaataaaattaaattaaattttacattcaaggaaaaaaaatatgttgatggaaagaacacattcttaactgacatattattgtacgaatctcaaccattcatattgcaaattctgatggctgatgatggcttctacggaagcatttcgagatcggattataccaaattttgtgattattacgtcgcccaaatcaatcatgagaaagcaataatgccctttccgccttttgccattgaccatattcaagtaatattaaaggcgaaattttaaaaattaggctggaggcttttttgtattttctgagactttttattaagttggaaaaatattcaaaattgcataaaaataccaaaaaatacaacaaaaaaaaaatcccggggcttattgataatgttagattaaaaacttttttatattattcaaaatttgaaaatcaattccacgtccaggtccgagcttttttcaaaatgtcaaactcaaataaatacccatcaatcccttcccctcccactttcagatcgatggcgatttgaaaccggtaaaaggaatcaaactgattcaagttattctgcctaataactcaacacattttttggatgacaaaaataaaacgattaattgtacgcccctcccatacaaacaaatcaatcggaccgatgggcttttgaaagtgaatgaaagcataattgtgatgatggagttgaggggatttaaccccggggaaaagcaagaagtgggcgtgttcttctacaaccaggcaattggctaccacgacctcagtgagtggtgacaatttcattaataaatgccattaaaaaggggcggggtggggcttaaagcaagcaacagattaaatttgaaaatattttttaattcagtgcgaatccgaagatggcatttcaatggaactgtattctttgcttaattatggagaattagtgaaaattgaaggacgagtggatcgtaatgccacagtaatcaaaatttatttgtttcatgaagtggcgcaattcaccgaaatgagttaattaaattcaaaattaaataatatatatacaattttctacattctatctttttatttatt

SEQ ID NO: 8318 - DNA, 1098 bp, Heterodera glycines
ccccatttacggaatgatagcgccaaccctaacttttccggaatttctttctgggcgagtttgattgtgaaaattttggaaaaacgcctatgtctttttttgctcaacactctagacaatttcaacaccccattcccccccccccccccccccctcgcatctcggttttcaaaagtcaattctgcaccagagaagattcgggagttggaaccaaaaacacttaattgaattgattataaattaccaaaaactcacaacaaagaaaattggaacaattatccaaacaatgcagagttatcttttaatgatttttttcatacagttggcaaaactgtgctgaaaatattactgaccgataaacagctcatcttcagccgacattatgtgagtaaacaactgtttggcattctattttatttaaaaaattgttaatatttaattatttgcgaagaaacattacatttagagttgcacgggaccgggacgggcaggaaatcccggtttttgaaaaaaagaaattccggtcccggtttgccagtcccggtctaattaataaaaaatattttaacgtaaatattattattttttcttttttttaaacattctaaaaccgcaaatttaaccaaatatttggtcaatttttggcaaattctgttaacatatttcactcaaaatttcgaaaatttccggcgccgtctgtcggcaccgccgcccccgccccaaatgtacccaaagtcttttgaaaaaacagcgccacaaaaagaggtatttaaaaaatttaaaagattgttaatttattttaaaaaatcagaattttgagactcagaaaattccaagattccccgcacgaaatgaaaacttttaaaaattttccaatgaataatggaaaaattcttcgaattcctcccccaaacgaaaaataaaaaattttatgggtacatttttaaatataggcaattttcgtaacaaatgcgctcaaatttgcaaatttttttcaaaaaaatttctcttgggaaaattcccggttggtcccggtcccggcttttctcgcgatcccggtctcggtcgaaaaacttggccccggtcccgaattttctg

SEQ ID NO: 8319 - DNA, 3069 bp, Heterodera glycines
ttctatatccatattttccatatttttccatatttcgcgatttatgtccatatttccatatttttccatattttggcattttggtccatattttatgtccatattttggcatttttcaaaaaaacctctattagaacggcccccagcagctaaattagcctttttgagcccaaaacccgaaaaatttttcaaaaaatcatttttcgccaaaatttctcgagaatattgaataaatttaaattttcttaaaaattaataaattatgtcaaaaataagcaaaaaagcgaaaatttcgcttttgttgttgattttgcgctaaaaaaattaataaattttagcttttatgttttttttcttttaaaatgattgcacgtaattgccgaaaaaattcgagaccaatttccgaatgttgaccgactaattgcagaacgaaagccgtctttgtcaaagcgccttaccgagtcaaaaaatttggaaatgtatctcatatgcaatttcaaccaataaatttgaagaaattttacattcaattttgaaaaatttatgtccatattttgacatttttgccatttatgtccatatttcgcgatttttgccattttatgtccatattttgcgatttttggtccatattttatggccatatttcgcgattttatatccatataattacacgccctagtaataatcggatttcaaggcaaaatccgattacgattatccgattccgattatggcccaaaatccgattaattgcgattccgattacgattccgattccgattatggcccaaaatccgattaattgcgattccgattacgattccgattcggcacatccctgctttgtaccccccccccctcccctttttggaaaagaaaattttcaaaaatttttttcgaaataaagttgttttatgggttttctgggtcgaagaattcgattcttatatctatttcggcccatttcgaaacactgacccggactcgaacaaaaattcgaaaattcaattttcgaaaaattctaaatatgcaaccaaatacatgaaataaaaatgagaatcgattcagaaggcaagataaaggggtcggggtcactttggcgcgggccattttggcgccgcgaactttcaagtgttataacttttttcttatccaaccaaataaaataattttgataccattaaataggcctaagtgttctttattagcctgcaaaatattagaaaaaataaattctgtttgacaaaagatatagcgtgcggcgccaaaatggccagaaaaagtcagttttttgaggttttttggccataacttttttgtgtgtcaattaaattttttgaaattttgcaggctattaggtactatcaagcgctttaaaatgatatcaagcttatttaatttgaatgagaaataaaaatgttatagcgtttggcgccaaaatggctggcgccaaagtggccggttcccaagataaagtatttcgtgcatttgaaccggttttgctgcatatttagaattcgggcaccgaaccgtcccctaccgcactggggcgtacccatagtgttgaattcaaattcaaattttcaacgcttatttttttgaagctgaaacggaccattcccgagagatcccaactcacatgctaatttgactcatgaatttcatttttgaacatttagaattacaccatagttgctcttgaatttggagatggctaaacagacgcgcgacgagggaaagttcgttgagttggatggtgccgagatgggaaaggtggtggtgcgttttccacccgaagcaagcgggtgagtgaatgttgttgtgatcactgatcataaacaaaacaaggggagagaaatgaaagaaattttaacacttccaaccaaaattcattgttttttacgcggcgacaagcacgtaatcgagcggaaagaggggagggggacttcgtaatcaaaggcggcagaaattaatgagaaaaaaaatcgccagcgatggagggggaggggaagaggagaactattgagataaagaaccctagggtttgacatttttcggaaacggacagaactgacggacgagttactaatttatttcagttatttgcacattggacatgccaaggccgcactgctcaatcagttctaccggcaccaattcgaaggtcggctgattctgcgcttcgatgacacaaacccggccaaagaggacgcacacttcgagaaggttttgtttcacatttctcagattttggggggtaccatttcaaaagcattaaaaatctttcgctttttcatcacaatgcttaaacccaatgcttactaattcaggtgatcgaagaagacctgcgcctgttgcaagtcgagtgggacaaaatgagtcggacttcggaccattttgacgcccttttggacttttgtcagcaattgctggtcgctgggaaggcctacgtcgacgacaccgaagctgagcaaatgcggaaggaacgcgaggagcgggtggagtcgcggaacagaggaaatggtaactttttgggtttggcaccgtacgaaattttcaagaaaaaaatcttagaaaattctatggaaacaaaattttttgaaatttttgtttcttcgaattttttcagaaaagtttttctaacatttttttcttgaaaaatttctgtttgaaaatttttagaccttattttgtgccgaaaaattttcggtttttcctttatgatggtatcccttccaagactcttttacccaaatttttccaaaaaccaaaacaaacttcctggaacagtccctgattcagcggtcgagcagaacttggcattgtggaaggaaatgcaggagggcagcgagcgtggacagcagtgttgcgtgaggatcaaaatggacatgaagcacaacaacggggcgttgcgcgacccgacaatttaccggtgcaaaggcgaaagtcacgtgcggcacggggacaaatacaagtgagtgggaatgggaaaaattaatttttagtttctaaaaactcccaaaatagttgctaaaaagttccgaatttaggggtgtaaaatcgaaa

SEQ ID NO: 8320 - DNA, 2413 bp, Heterodera glycines
cttttgtcagcaattgctggtcgctgggaaggcctacgtcgacgacaccgaagctgagcaaatgcggaaggaacgcgaggagcgggtggagtcgcggaacagaggaaacggtaactttttgggtttggcaccgtacgaaattttcaagaaaaaaatcttagaaaattctatggaaacaaaatttttttgaaatttttgtttcttcgaattttttcagaaaagtttttctaacatttttttcttgaaaaatttctgtttgaaaatttttagacctgtccatactcaaaattttggaagaatggtattttgtgccgaaaaattttcgggttttcctttatgatatcccttccaagactcttttacccaaatttttccaaaaaccaaaacaaacttcctggaacagtccctgattcagcggtcgagcagaacttggcattgtggaaggaaatgcaggagggcagcgagcgtggacagcagtgttgcgtgaggatcaaaatggacatgaagcacaacaacggggcgttgcgcgacccgacaatttaccggtgcaaaagcgaaagtcacgtgcggcacggggacaagtacaagtgagtgggaatgggaaaaattaatttttagtttctaaaaaacccccaaaatagttgctaaaaagttccgaatttaggggtgtaaaatcgaaaattttcttcaaaagggtaacaaaattattccaaatcagtaaaaaacatgtttttcgtgcatttcattcaggctacggggagctcaggaaaaaaatagtgaaaaaacctataaatcgtatccctttcattaccttttgacagagtgtacccaacctacgacttcgcctgtcccatcgtcgacagtttggaaggagtgacccacgcgctgaggaccaccgagtacatggacagggacgagcagtacaacaccatttgcgactcactcggactgcgaaagccgtgcatttgggcattcgcgcggctgaacatgacacacactgtgatgagcaaacggaaggtgggcaaaagtatggcaccgagcattagcaatgtctgtttcgttcagttgacctggctggtcgagcagggcttcgtctccggctgggacgacccgcgaatgcccaccgtccgtggcataattcgccgggggctgaccgtcgaggggctcaagcagttcatcctggcacaaggaggaagtcgctctgtcgtcacgatggaatgggacaaagtctgggccttcaacagaaaagtcatcgacccggtggcgccccgctacaccgctttggaaaacgcttctgccacgctcgtgccggtgacggttcgccaatttgtggcggaggagtgcgggcaggtgccactccacccaaaggtactcacttggccagtctcgcccatgctgaccggacaattgcacgtgtagaagcccaacggagagtccaaggaaatttggttcggcgccgatttgctggtggagagagcggacgccgaatgcttcaaagtcggcgacattgtcacctttgtgaactggggcaacatgaaagtggcccaagtgcggagggaagagggcgcggaggggggacgaataacggcggtggaggtcgacttggacttggacaacaaagtgagagacggaccaaaatgccactcatgtcagaccacagggcgggaccataagctaaaatcagtcacggcattggtcggacacatttaacttagtcaatgggggagggagggcacgaatttcaagttcattcccctaatattgagtcattgtcttccaggactacaagaagacgttgaaagtcacttggctggcgaaacgtgccgaaaacttcgcggtgaaaacggtccgttttgatcatttgatcagcactccgatcattggcaaggaggaggactggaaggagttcgtcaatcgcgacagtgaggtgagttggattgtgcccattttgttttgttttacaatttttttaaatttcttttagcattttggcactttgttggccgagccggcacttcaaaaagtgaactgtggagacattttgcaaattcagcgcaaaagcttttacatttgcgacgcgaagacagccaactcaatgacactcatcgaaattccggacggcaaagagacaaataatgcagatgtggacgacggcgaaatgccaacattttgtgccaggcttttaccctcctgtgacgacagtgaaatggcaacattttgtgccaggcttttgccctccggtgacgacagtgaaatggcaacattttgtgccaggcttttgccctccggtgacgacagtgaaatggcaacattttgtgccaggcttttgccctccggtgacgacagtgaaatggcaacattttgtgccaggcttttgccctcctggtgacgaccagtgaaaatggactctaga

SEQ ID NO: 8321 - DNA, 1676 bp, Heterodera glycines
  unsure (1)..(1676): unsure at all n locations
gggccagagggaaaaagagacgaaaaaggaaggaaagnagacgaagaaggcaaagattgttaatgnagacagtgtattcatgtggaagtattcgcaattgttttgttgtttttatttggtgatttctggtgttgattaaaaagaaagaaactgtactcaattagcagcagtttaatgcgtcaaaaccaaaataaaaaaaatttttaataattttttaaaattaaaaaataaaaaaagctttgctaaatgtaacgaaagaattgaaaaatcacgggcaacaaaatttaatttttttttattaaatttaaattattttaactgagttaaatttcaaattatggaaaatttctctaaattgaggatccctgctctgtgtgttgtgaggtgtttgtctctttccgccgtttgagtctcgtttttctgtttctcccccctcccccctcttttccgcctgttccaacgcattctctccctttcccttttccccctcaatcggcggttgtgtcttcaaacacatttaaaatcgcttttgagacgggagaaaatgaaaaagtgacggatgttcgtcctttccttttcccttccttccgtccgtccctttctttggccttttcttcgatttgtcgcccgtttctccaacttaacaaaaatcgccaaaagtttgccttaactttggttaagctaaacaaaaacaaaggaaagagcgacggaataaataattcggcttttcctcaaaagcattttaattatttattttatgttttttttcgccaccactgttaaaaataaagagaattaattgccaacggcgatggatacaaattcattttctcattttcatccttttccttccccccccccgtaccaattggaatattcattttaaattgaccataaaagcaacgaaattgggaaacggaaaaacatttattgtgtgtacattttactggaaatttattattaaagataaaatgcgctctgtaaaaaatgctcgacgcaaccacaaaatttcaacttggaaaaataggccaaaaagaaaaaataatgcgcgaaaaaaagcgaacaaagcaaaacaatggcaaaggaacagcggaagagagagaaggcaaatattggagacagaagggaaacgagaggaaggacaacagaaggagaagaagcggataaggacggaaaaggaggaggagacaatgagggcggggaaagcatcggcaaaagatggcggaaatggcaagtgagttgaggggagaagagggggaagggcaagggaggtggaagagggaggggagggggaagagaagcgcatgggagagggaggggattctccattttctagagttgtacgggacgggacgggacctggtactgaaaaacacgtacaactgagtatcgaagtcccggttttgaccaattttgaccgggaccgggaaaagtcccggttttttaccggttttcccagccaaaaagtcccggttttttccaaaatcccggtcccgtacaactctaccattttccaatatttgtttttcatccttttagcaatgaaaagtgtgtgactgctgaggcacttaaaaatgtacaagtgaaatcaaaaacacgaaaaaggagaaatcggttggaagaaaaggagaaaatggggcagaaaagagaagaaaccgaggaaaagaaggggaaag

SEQ ID NO: 8322 - DNA, 2142 bp, Heterodera glycines
agaattggggacggacgcagacaatgagggatattatttgcagttaatgacaggcatttgtgccatttttaattcaaaaatgaaatactcgccatttccccgccctccccctcaccccactgtcgttcctgccaacctcccgcatcgcttcttttatgtcgtactgttgttgcttgtcgggctgttgctgctcaaaaagcaccaatgctttggtgctgctgctttgcacatcccaaaaactgtcccccatttccgagccttccctcgacccaacggttactgttgacgccaaatgaaactaaaacggtgagattataaataaattaacgacttttattatttgtaaattcatgacataaaaagatacttttgagtcggtgtcaaacacaattagggaacagtcgtcctcgagcaggtcactggaagtggcgtgctggtgttcccaattcaggacattaaacgcaacacggacaggcttctcgaacagatcgacaatatcacttaaaacactgcactaataaagttggatcgaccgataattattcttcgattaagaaatttaaatcccaaaagctgacattgagcaaaatccgacggtgtcgccttcttcggctcgccaactttgccctttgattggcaaaatgcggccaaatgcgatgattccgtcgcgaaggcacagaatggagcccagtcgaatgccttcgtcgttcggatcgatgacaacacttttgaggatgccccattccataggctttccgaaagttgccgaacgatggaggggcggagggatggcggaacggaaaacattggcaaggtcgtcatggaaagaacagacgtttgtcggaggctaaaaatattaatacaaacaagtaccaatgccttattaaggtaaaaatttaaaatttaggtcgacaaattgatttccctaagttttttaaagataggacaaaaagaaatgatttgtaaattctaattaaagacctaattattcttccatatttttgggaggttaaaagaatgagtgtcccgactcttttggctatcgctctctttttaaaaatacattttgaatgtcctccacaaaattgagcgaccattgtggcggctttaccgtgtttcccgactggacaaagttgcttaaatagaagtgttgattctgcttcttaataatgtggaccatgaaaagaaacttgtgcccctttttcaatacttcaattattttttcaaaaaaaaatcgtataatataaacgcatttacaattagaagatgacaggccgtgactagaaaaaaaaatcggagggagaacccgaaaacttttctttttattattcggtgaaaaatcaggaatttgtagttgtttttcgccaaaaaatgacgccaatttattgccttttttaaacggaaaagtacatcgaaaatatacaattctctgaaattccgtccagtttctaataaacatttataaaaataggggcacaaatttcgaaactaaaaaaagatattataaaaagcaacaaatgtaacttaggtaattcatccaaacatacaaagtgagaaaagcgtggcaatgttcagtttcacggatgcccgagctggagagttgtttcaccaaatttgcattgactttaatggccgatttcagtcgtggcgaatacaattcgatgttcaatttttcgtctgtcgaagcagttttgcatttccgccatttgcagtcaaaaattgtgaggttcggaacacagaaaatcggaagacaaatctaaaatttacacgcatttcccattttgagtgagattggctaagattaattatgcaattatcagaaccaccttaacagattcgttgtgtcttcccccatttgtccactccactcgttttgttggcaatatttcgtccacttttttccaattttgctctccacattcattaatttcgtattggtaccaatttccaattcgggcaccgctaaattcagcacgaacttccaatgcacttaaatcgtcgtcgtagaccaaaaaacaggtgttatccttgacgccaacacaaagagcaaaacgacataaaagaatgctcatttaaggaatgaaaataagaaatgcgctagaagagagggttaatgcgaaataattaatgtctaaacggaaa

SEQ ID NO: 8323 - DNA, 2407 bp, Heterodera glycines
caataggaaaaaatttttttcaaggacaaaggtttttctttttctctcatttgggcgtactatttccttgtctctaacatataaaataacacatgaatcatttatctgccaataaacaatttttttaaacttttgactaacttagaaatattctccagaattttcccttcaaaatgagcataaaatggttttaatttctctagtattcaccaagttataagctaaaaaaatttcataaaatcaagggtaaaatatagtgtgtaccttttactgtttgtatttgttcttttggcgttctgtatttattattattttatttatttgctttaaaaaattgaaatttatacacaaacacaaggaggaattgaacttgagaccccccttttggtgactaactcacagaccactaagacgaaaaatccagcatatttgtacttggagcccaaaattgggccgctgtgtttactaataactagggatgggatttttaagggtgaaaaagtccaaaataagggcgaaaaattcgcgaaataagggcgaaaataaggtcgaaaaagtttcaaatttagaggtgaaatttttcaaattgctgttttttacatgaaaataatttaaaattaaggcaaacaattttattcattgattgcagttacaaataaggtacatttcaaaattttcgggggtaaaacgcatgcgattatcagctaaaatggttttgtaaatggaaaaagatcgttccacgtcgcaagatgtcaatggagcaaatttgtaaaaagggatgaggtttgggggtacatcagattcagtgtttttcccagacagaatctggcaaaattgggatattttttcaattccattgttcttggccacaatgtccgagaattttttgcgaatttcggttgccttttcgccataaacactgtccatttgattgtgaacgccagcgaatacatccatggcatcaaaaatggtcattccctgtgtttccaattttgtaattgcagcagataattgtccaaaatttgaatggatgtaagccaggtcctgccaaactgaattgttgaaagacaattgacattccttaacacacacagcatcatttgcattgaatgaattcactacctaaaaaatacaaacctttactacaaaaaataaaattatataaattaacgcttttaatgcctcaaaatgctcccaataaaaggacactgccgttatccaggtagtccaacgagtcaaaactggccgaggggggatggacaattcagggcacatctcacgatatacagaaaggcgatgcggtgctttcagaaatatttgctttgttttgcttatcaatttgtccacttgcgcaaactcgtcacgaactttttcggccacgcggtgcaatgcgtgacacaaacatgtcacatgcaacaaattggtgtaaaaaacctgaaaaagagaaaaaatttatttgaattttcttttttctaacttttaattgtcttccggcctttttcatgtacgcagccccgtccgtaaccaaaaacagcactcgctctttcttaatattagcagaaaaactgtctaaaattaaaaaatatctaggaataaaagctaaacgactaccaaggccttcattaacaaaacgcgccattgctccactgtccaccttttcaagcgctttcacagaaattaaatgcggggggtgccattttttgccatccaatttgcctaacaacaaattggcgatcattcgccccgtaaccaaaaacagcactcgctctttcttaatattagcagaaaaactgtctaaaattaaaaaatatctaggaataaaagctaaacgactaccaaggccttcattaacaaaacgcgccattgctccactgtccaccttttcaagcgctttcacagaaattaaatgcggggggtgccattttttgccatccaatttgcctaacaacaaattggcgatcattcgccccattttatccgtagtctcgtccactgaaatccagacaaatgcttcaccaatgtcttccttaatttttgtcattgtcttaaaatcaaaattgaaaaaattttttgaacaattttggaacctcagaaaaaagttggaccaaataattttttcgaagagttgactggtctggcacggcgcgttgacaatacttttccaaaaaggaacacaaaactgcgttgttcagcttaaaaatggtatgttagcagacacaagtgctttgcaaaggtcggcagaaaattgctcttgtttattttcatttgttgtcaaaaaaggctgatgctgaatgcttttctttttcgaaaatcgatccaaattcttgcgatgttttgccgtttcattgtgttgctttaaatcccaagtattgcgaacatggaatctgtgaaaaatcgtcatgttgct

SEQ ID NO: 8324 - DNA, 934 bp, Heterodera glycines
  unsure (1)..(934): unsure at all n locations
tttttattaatttttacttattattattattatctagcaatttaattttataattttattaatttttaaaatttcttatcaatttaattttattattttgcaaatataactatttattatatatatatatatttttttttattattattatttaaattttatttccttatttttcaatttttatttattttattttattttttattaattttgttttattatttattattattattaatttaatttatttttatttaaatttttgtgtgtgttaatagagagagagagagagagaggaatagaaacaagagagtgagtgaatgagagagagagagatagatagagaaatggtcagttttcgcacatttgctttttgtggccctaatgaggaccgtttggattatattgatccaaatcaaaaaaaaaaaacaaacacaaaatttgatcaatatttggtcattcattcattccttctttcttttcttttcgtcactctgggctaattttttcaaatagtcgcggcgcacaaaaacacaaacttaacttttttttattcattaatattttcgattgtaaaaattaataaatttttacgacatttattttttagatttttatttttaaatatctaattaatttttattaatttttatttttattttaacctttctttttccccataaattgctcaataattttcttctcttttttctctctttccttttttttcttttctcgcatttttttatcggcgagaattacgcgttgcacatccttctcataaatttgccgccttcgtccccctttcgcgcactttgtttgtgccaatttggcacaacctccaatcggggcattttctttgtccccttcctccnnactctccctcctttttctctcctctatactatccatccaaatgtcagaggtgtagtcg

SEQ ID NO: 8325 - DNA, 1656 bp, Heterodera glycines
  unsure (1)..(1656): unsure at all n locations
agaactctaaaaaacaattttgacctaaacatggagacattaatagaaaatttaacaaaaaaataataaaaatttttatatatttttcttaataattgaatgcaacaaattattaacaatcatgaccttatattaataaattactgattaccagaatgcactccaaatgcttgaatggtgtcaagaaaatttaaataaaaatgttttctttttaaaacgttttttgaataatattattaaaactagaaaaattaaatattcaaagcatatgaatatgtctaatttttaaatgatttcgcacaaaaactttcaaataaattacaaatttatgttataacatatatttttctgtaaataaaaacatacgtatgtcatgataaataataaataaaagaatttgttaagaaataagtatataatttatgcaatttaaaaaaatttataatctattatatacatattttttattctgaatgaaagaaacagctgatttagataaaaaataaagaattaaaaaaaattttgaaatatacaaaaattaataaattctcattgtaaattttagaaataatttaataacaaattaaattattaaaagattatataagcgaaaatatattcagagtggccaaaatgtcaccttataaggcatttgttatttaattttataagttaaaaattttatttattccaaaagcatctcgtatttaataattataatatttattcgttaaaaaaacttaattgtttaaattcatatatccaaatggtgcacaaaagtacattaaatggagaagagacaataaatgactggataaaagatcttaattattataatgtttattcacaatgctcaatgaatcgttcgcgtatggcatgaaataaattaaaactattttaattacactacaacaattattattgataagataatataaaaataataatgatgaatgaaaggatctaattaattaacaaaaggacacgatagatatacaataaaataattgtctgatagcatgaaaaaaatacaatttaattcataaatactattctatttctgctgaaaaggacgaatgtattaattttaaggattttaatattttaatttctgatcgtccaatttcgcaagtctaaaaataaaaataacaaaactttgttaataccttttgatatatattgtgattgttttatatatttcacgaattgttatcaaaatgattgattaaatctttttcatttaacccatttaaatttttaaattgttttagttttataaaaatttctacaactgtataactcattttttgcattttatttaatgtgctttgattacaaaccaaaattgctcatttttgtaaagttaataaatattttttgttatacattttaatattcttattcgcatagtattttttttataatgcctataataattattctctattatatattattttgataataattttgttaaaaatttcaacaaacattttagagtaaaatttataaaatgacttttttgaaagaaaattttcagggctgatattattctagnatatattttgccaaatttacttatattaatataaatttgtaaaaaattaattctaaaattaaaataagattaaacattactttctttttatagttttt

SEQ ID NO: 8326 - DNA, 1529 bp, Heterodera glycines
  unsure (1)..(1529): unsure at all n locations
ttctgctgaaaaggacgaatgtattaattntaaggattntaatattttaatttctgatcgtccaatttcgcaagtctaaaaataaaaataacaaaactttgttaatatcttttgatatatattgtgattgttttatatatttcacgaattgttatcaaaatgattgattaaatctttttcatttaaccccatttaaatttttaaattgttttagttttataaaaatttctacaactatatatttcaacaaacattttagagtaaaatttataaaatgacttttttgaaagaaaattttcagggcctgatattattttagattatattttgccaaatttacttatattaatataaattgttaaaaaattaattctaaaattaagtaagattaaacattacttcctttttatagttttttggctgaagcttaagtggatataccctttcttaggaagactattttttgacattttttgaatccaaatttttgtcccttatttatcattttgtttgtttttttattttgaaaattactgcttttgtaattgaattttattcatttttattttggttgtattataactaccttttactttaaattgtttaataatcaataatataagaattgtatttaaagtttaaaaatggttttgttttagtgataatctgcaacaattaatattttaatcaaatgcaatttaaaaaattgatttacacattgaattctaaattcccccaatggtttaaatatacaatttattaaagaagctgcatttcccagggctacgggagaaaatgtgtccaaaagtgtatgctatggattatacgaccgaatactttttcaaaaaatatcaatgaaaagggcgctgatgaaatttgcttcatttaaagttacaaaaatattttacatttaatagatttgcatgtttttttttacttattttaaaagcgtggggtaattaattttttaaagggcaggacaggatccagcacagagaccttatgattagagaccgactaaaaaggcacgaaaaatcgcgaaaaaggcactataataggcaccaaaaattgaaataaaggcatgaaaaggcacgataatcccgaaaaagaaaaaaggcataataaaagtcaatgtagaagcctcaaatgtattatttttgcttgcgcagaaaaaaaaaagacatatgcctcaaaatgcgagttctacttatgatcctcttttaaaacagaatattttaatttttagtaattttataataatctttaaaaataatgacaagccgggaccgggacctcgcttttcgtccggcaccgggaaccaggaattttaaaaattcaaattttgatttatttcaagtgaaaataatacaaaattaaattttattttgttttttattttataaatcaaaaagttaaagctaaattaaaataatgaaaattttcaaatcaaattttctttaattatttcagaaattaatcattttggaatagatttttttgtgttcgttatacttttgccgttagaattt

SEQ ID NO: 8327 - DNA, 1557 bp, Heterodera glycines
aaaatacattaattatgggaaataaaaataaataatcataattggtcgtttagttcagattatgttgttcgatgggctattttattaaaattctattacataatttttaaattaaggaatttgttttatttattgcatttattttgtttacttaaaaaatttattctacctaataaaattgctgggattttctctaattctattgatcataacggttgactttgtgcttttagattttagatatattgagaatgctattttatttattttatttttggtatatattatgaaaattttttggaaaaataaatatgaatgaagattataattgtgaaaataaattcaactatattattatttaagaattaaaattaatttaaaaaatttaaatgttaaaagctttttaacttctctcataagcatcaattagatggtgttgagtccgttatatgaaaaaataatggggtttattatttaatttaattatgcaatttatggttaaccattaaaattctaattttttttacaaccttttttaattttttaacttaaaaaattttaatatattataaaatgctcgcttattcaataaatatgttgcaaagtgacatgagattaattaagtagaataagaaatgtaaaataaatgtttaaaaaataagactattcattcttaatgaactacacaaaaacaaattcttatgatgattaaatttaaaaataaatgtaaattgagctaggaatcaaatattttaaatatttaatctcaaatcttagaatctttcgggcaattattcattatggcgttctaagaatcccagatttttttaataaccgctagaaattggacaatttccatttttattttttcttaataaattttaagttatagatcattatttaaaaaatttcttatagaaaaacgaaatttctaattctattataattaaaaattaattaccaaaattaaaaaaaaataaaaatttgaaaatattgttaaattaattgtcactaacgaaatgttaatacggatatgaattctgctggtgatactaacatataaggggagtgaaataattccataaaataaattgaatcaaataaaaaacaaatatattctttcgcctaatcaaatagtcgagcgatagcactacgtgtttaaccaaattataagctaaatttttataatatcgcaaaataagtcagaatatgtaaaaatctaattaaaaatggcagtgatggatggccaaaccatgttataaaaaataaatctaatttatttctaagaaagtaaattaatttctttaaatccaccgaaattgaataacataattgctcaaaaaaaaggtctaaatttaaaaaaaaataaaattattttcacccaaatataaaccaaaacaattggaaaaataattaaatcaaaagggtgctgtgcaattttgaaaaaacaaatgagttttagtcaagtgattaaacgcaaaattaatattcaaaatataaaataaatattcgtggggaggattaaaattattctattatgtaaacaaatttcgaagg

SEQ ID NO: 8328 - DNA, 4060 bp, Heterodera glycines
  unsure (1)..(4060): unsure at all n locations
taattggtagtgctgttcgagaccaaaaatttcccgagactcgagaccgagactcgaccccgagacccgagaccgagaccgaaaaccccgagaccgagacccaaaaaacccgagactcgagacttttttcaaaaaattttcctattcgcttaaaaatcgttaaaaacattttttgactctattcttaactaattttttgtttttttttaaattttgattcaatttggtacaatatttatcatttcaaaaacgcacaaaacgaaaattcattaaatttaagtgcaatttgttaactgatttagtccaaaaaatgaaaatatttcgaatttaattgttaaaattatgattgaattcccaccgaaaaatgaataattttgaaaaattagaagaaaaacaactacttggaggggaattactttttttaaattttcttatttcttaaaaattatgaaaaattactattacgtttgaaataattgcatttattcaactgaaaaattatgaatcaaaagccggcggtgccgatagtcgccgccggggaaaaattttaaaatttgagtgcaatttttaagattctgtccaaaaaatgtccaaatttttgcggtttttagccaatttaaaaaaaaaatagcgttttgggtgccggcggtgccgataggcgccgccggggaaaatttgaaattttagtgcacattgttaatagatttagtccaaaaatgacaatattttatgattttaaatgttaaaattttgattgaattcctatcgaaaaaggaataattttgaaaaattagaagaaaaaacatttacttggaggggaactgatccaacgctaaaatgaagaacataaccaagagaacaacccaccggaccacacctacgagtaaacaaaatgaagcaaaaaattaccaaaaatatattaattttaaatttgtaaaaagccaatcattaggggtgtaaaaaagtctcggtctcgagtctcgaaaatcgagaccgagacttgaaaacccgagaccgagactcgagaccgagaccaaaaaaacccgagacttttctcgagtcgagactaccgagagtctcgaacagcactattaattggagacggggtgattaagataaagggatttttttcaaactaattcaaaagaggtagcttaatggaggcgggcatataattagagaaaatactgtaggtcgtttcataaaatgcgccattttatttgattataagaaaatcaaagttttacttttgtacatattttggactttcggcattttttcctaaatttttttgagaatgtttgaaaatttataaaatttcggaaaaaaagaaaaaaaaatttatttttgaaaatctttaaaaaaaaacgttttttacaatcaaaaatatttttaaatatacacaaaagtgatttaaacctattttggtcatttttatggtattttgttctatttcaccctttacgaagaattttttccaaaaaataaccatttaaaaaattttatttactagcgatttttcatacaaaaaaatcccatccctataaattacattttaatattaattaattttaaatattattttttcattattttaaccatcagtttttccccatccggcaacaaagcttgtcccatttttgaatcgttcaattgaaccacaatgtaagcagacgggagggagttttgacgtgaattcaacatgttcatcgggaatctgaacaaattttcgggaaataaaatttaatttttttaattgggccaaaaatgccactttgatcagtgccaaatcataataactttcgccaagaaattcatttgtcaaatattttgggtgaatgaacacattcgaattgctgcgcgggaaacgagcaagaaatccatcataatttttatcatcgactttgtttgaggttgaattgaaccctgaaaagaaaatttttattttaaatatttattaattttaattgatttgattttttttttatattgtacaaaaattactgtagggcacttaggacggtgctaggccatttcgtaaaaatgccaattttacagatttttcgagttcagaatatttcattaagttttcagaaagttatggcaattttttaaacatgtttggtcaaactttttgaaaactcaatgaaattttctgcaatttttatggtaatagatagagcaagccgggagctaccgtatgatgataccaagcttatttaatttgatagggtttagaaaagttatgatggatttttcttgaaaatcggtaagtttttacgaaacgacccagcaggctttaggactattaatctgaattaaataattgctgaaatccactttttcaaatgcattattacacttaaatagggttaatcagtgcccagagtacattaatgcatgttttatgtccttgaaaagtactgtgaatttagtagtgatgctcgagaccaaaaatttcccgagactcgagaccgagactcgaccccgagaccgagactcgaccccgataccgagaccgaaaccccgagaccgagacccaaaaaacccgagactcgagactttttttcaaaaaattttcctattcgcttaaaaagcgtttaaatttttttttttgtttgaggagattcattggatgagatagcctttattaaaactcggtttaatgtcacctttttgtcaatttaaattgaattttaaaattttgctcgttaggttattgaaactaaatgggttttatgtaaccatgaatagaacctttattttaattttaaagattcgacagagtttttgacaattcaaaattacaattagcagttaaatatgttttttagcttacgtatttcctataagctcactgattctttaaacaactgactaattgttgcaaatttggccactgttgttacttggcaacccattctaatgaaaatctatgagtttgtactctagtaaatccatgcaataaaatttaataaatattatcattttcctgtttttttcattaaaaacaggaagaaaatcactcaaattccgccaaaaaggattagtgtgacctagcaaataaatatgctttttgattacaatttgccattgtttcttggcaatgcacgcacttccaaagtctcggtccctgctaattgtttggccgaatacaataataatataaaaaggaaaagagaaatactgtaaagaaacaaaaaaggtccaataaatttacaattgcgtgatttcataaagatatctacaattttgaaaaatatgtagttgtcaaactgaaaatctttctatgacattataacaaatgttataagttgagctaaagttatgatttattattcagtaaataagatttaataataagatttatttatttatttgttggctcacttttctaaatttcaattgaaattttcacaaaaataccttgttttggcctattttcctgcaaattttcaaaaattttgcttacatttaaaagatttataaaaattcactcgtcaaaacttaatatgttggaaaattggacttcttgcaactcctggcctattctaaatttttgtttgtcagaaaaatgccaaatttgactgacattttttacggtgtggcacattccctaaacctgcatcactttcttagaccaaaccaaatttaatcttttttcgatttttgtattttgcaaaaccatattttattaaattcaattgtaggcgaaataattcaaaaactctctgcgtttttaatcaaaaattaataaaatttttagaatcagaaattttgatttagaaaaaataaattttgaaattttggcaattgtattcttcgaataattttaagaggatttttctgatagtcccacaaaatgccaaaataagcacaaaataggcgcaatggacaagcacaaaaattccgaaacagacgaaaatcggcattaaagtcaccacagaagctttcaagctanaaatagctttattaaacatattaattgcacagaaattttaatttctttcactanaaatcccagtcctatactcacaaaaaatcttttttgaatacaatt

SEQ ID NO: 8329 - DNA, 1798 bp, Heterodera glycines
catacagtacccccccccccacggtaatcaaagaagcgaacaagccatttctcgcttaggctaatctgggttttcaggcgcccttcttcaatttttgtttctccgcagagatttcaaaaacagaattctttttttctcagggtttttccttgttttcgaccacagttctggtggtttttaattcacaaatttatacacatatgtagtttaaattcacttcgttttccattttaataaataattaattcattaaaagaaagaaagaaaaaccaaatggggggaggagagcatggaaacaaatgggtggggtgacaattaaaaaggctgcttaattatgattaagttttttttttgattaatttcaaggtctgaaaaattttatttaagttcaaaatttcaatgaatgcaacgcctaacgatcaaatattcaaggtaagataaatatttataatataaaaaatacaaaaactaatttaatttaaaaagctctgttcgggcaaggatcaatgctggacagtgattatttatgcttttattgtgacctttttgactattggtggtgttttgtttaatttttctgttattttcattacaattcgaacaaagtaagattttttactcataaaaatatatttgtaattaaatttctggtgttattttctcttttcaggtcatttcgtggcaccgttaacattttgttcgcattttattcattgtgtgaaattgtccatttgggtggcaattttctgtcaattttctcagcattttctggccaatattttatgccgtataaaactctcattacttttgcttttgcccctataatttgcggcacttgcgctgtgattttgttgcttttcattggcattgaacgcctttccgctgtgcttttcccgtttaagtacataatgtttttcgctaattaataatttaattgttttttgattttaaggaaaattaatcaaaatagttttcttgccattgttttggtgttcaatatcattcaaatcattatgctaacaatcatttattcgcattgtgaagacacgcaacttgactcagttgaagtttttgccaattattatgaagttgccgttctattttatactgtccgttttttaaatattttcccaatattttttaaaataattacactgattaagagccaatgctctacttctggtctgtttgaagcaacaatggtaattgtgtgttcagtggttatttatgcattaattgcggtaacactttactgtcgcaaaggtcggtatttctaagaaaagaagaaaaaaattacactaattaaatgaaaaaaactgtttgaagatgaaaaaaaaagttaagtagtttttaaaattattttaatttaatgttaatagacaaaataaattttatttttaatattttaaagatacaaaacaacggaaaaatccattaagccagcattttttttaaatttaagtaaaattttttgttatcaaattttggtggggcatttacgaaaaatgaaaggttttgtgatactctggcatacaatacttaattaaatctagtaaagaaagaggccaaaaactgacgaaatattagtaaaaattaatcattaaagttgcggactaatactattgtgaaaataattaaacaatattttttttaattgttccttttttgtaaaaatactaaaaatgaaaaaaaatttaatttgtctttttttttgcattttcagaccaaagcaattacaactcggcccaattcaacaatagaatattccgttcacttttcacaattgtcgcagtgaata

SEQ ID NO: 8330 - DNA, 1540 bp, Heterodera glycines
  unsure (1)..(1540): unsure at all n locations
tgtgtccacatgttattaccctttcttctcacaatgcctctagggttgaaantaatnngnnngangaagaggnaattctttcgaagaggagaangngtggtatttttggngaattgngaatttatnggnattgtttnattagggtaaatttttgagagnantnanataaatntnggnntatttnaggagtaatttaatatggatagntttaagttgaaaagtttatagtttgagagtgtaaagattaatttgaatngttgaattngnnggaatgaatanggnaaaatgtttgggnaataattatttgatttggttaattatnnggagaagnaanattaaataatgggtaatattgtgttttgtgttnaaanaaaagaatgtgttttgtttgttagtatttatggtagattatgngnggattatagggtattttattngnngagggataaagtgangataagnnaatnagtnggngaagaatggnattggnattgggantangnatttantntgttngtgttnnnaanaaaananagntganaaangagatgggagggngggnggagaanagaaaaaagaatggtnggagnaaatnntaatggaattttgggtaagggatgttagtttaaaaatgttaatttgnnaataatttgttcttcctctttttttctaaataaatgaaacataatgtactgagtaaaagtgtccatttggttggttttctaaaaaatgttctcgacctatatgttcgaggtttcttgagtttcgtcatatccattgtccttcattttttaatttcgtttttaatatataatatttctttaatttattttttttagaagactcgagaaagagtatttgttcaattcaatcattttatttaaaattctcacatttttcatacaaacaaacgcatccaatctcaaaaattcttttttgaagtgtgtgtgtgtgtttgtgtgtgtgtgtgtgtgtgtgcccgctcactcaaggactatccaattgccaattccccatgaatgatttctttttgggcaatttgaccctggcactaaaaaatgccaatttttattccactaaagcttgttttgtgctctttccatcacattgttaagaaaaacctcctctttccggtggcaaaatgggccgaggggagggcatcgaatgagtctcacccccccctttcccctaaagtcggtgccttttaatgcattaaatgccatcatttacacatggcactgcttttgcccgttcctttcgtcgctcgttcggtcagccatctgtcacaaatttgacgcaaaaaatccgcaccaaatgctggccgtctgatttgccttctgcctcaattggcctaaggcaggggcgctgtatttattaggcccatgtgttcaggcgatgttgttttatttgtatttcgctttatttacaggattttttatgtgcttcattgtgagttaattacttttatttacctcaattagtatacattaatttttagagtttttagatttggaaatttaaattatatctaataattttt

SEQ ID NO: 8331 - DNA, 2040 bp, Heterodera glycines
tacttaaatgccgacccagcagtaaaagtgtcgtcatcattttatttcgccattgttttgctccaaacactaatcacattacaacaacagatcgtctcaaacgcagcaaggcaaaattattgaaaatttaaaaactttttaaaagatatattttaagtacatccatcgatgatggaacaaaaagcgccgaatatccgctggaacaaatgcaacgaaatgcaaagcgaccgcccatgaacggcacgggcggaccgtcgcgtgtgctgatcggcatttacattgaatcaatgggcaatttccaagcagcggacatggtactgatcagattgaaagaagcaaataatctattcggaaataatatgacaaaaaatcaacaaaaagccttttttcaaaagtcattatgcgagcagagagggcaattttggaagagtcgtgggtttgagtcacaccagtcgggtttctcggggttttcaacaatcttagccctaactaagtctcgaaaatctgtttgtctcatctgttaatacaatagcaagtttattatataaaaattttcaaaataaaatattcaacaaaaaaagttctaaccgtttttttgttttgtttaatgagatgaagaattttttataaaattgaacaaatttatcgagaatatcgaaattaacaaaataaaaagaaatccgattcaaataataaatttttaaatcttctaagatttaattataatgaatgcctctgcctcattaaactattactattacatttggagtaaaattttaaaaataataaacagagtttcgatgtggatttgtatctgtactcacattggcgggacccttcactgaaacacaacaacgacgattatgtgctgatgaccgacccgaaagttcgggaaagaatttggtgaataatttaattatttcttaaaaatttttaaaattaaatattttaaaaaaattattatttatttttttaataaaggcttcccgacctgtactttgcaaatgcgcggaccagcaaattccacgatgtgaccattcccaactttagtctgttcattgaccgggacgggaacattgcttattcaacgaggcataaaactgataaattgataaatgaccggaatatttagggcaatttaatcaaaaaaaaaaatggtcaaattttttatttaaaaattttaaatgagttttcaaatttcagagtaacactgaacgttgcatgcaacttggagctagtgaggagcaaaaaataataaataaatggccaataaaatccaatatctcaggcgaattatccgatggatagccaaacgtgcggtatccgaatggtcagctgtgagttaattcatattaagaataactcattctaacatggcttgctaattatttttgtattgagagacaaatcccggctttttccaaaagtccatcaaattcggggatttgttacacttttagttcgcaaagcagttttaattttaatgaaaatatgtgcaaaaaattggagccataaataatcagaattttttttttaatttatctactataatttcttcgcggcttcttttttgcaagatcaaaccatcaattcccttagaatttttcaatttagccaaaacgcccgggtaaaatcaaaaaatgcaaatctcccttatttttttgggtgctagatcgtttcataaatccgccaacgtgggcgttttataaatcggccagagggcgtttttttcatgtagtggcgggcggatttatgaaaggcccattttggcggattttatgaaacgatcttacgcgattttttgcgtggtgagccgaagtgacaaaagtatcaatgttcgtaataattaaatttaattattattttaatttaatttgataaataattaatcataacttagcttcaacttagtcaaattattgaaatttggtacttagcgacagctccaagtatcctctactacttatataatttttaaaaaattactaaatttacaaaaagttgtaaccaaaaaagtacgaaaaatttgactcgacaatt

SEQ ID NO: 8332 - DNA, 2596 bp, Heterodera glycines
aaatagtaagttaatctaattattatgtacattgatattttttcacttcgtcctagcactttttgttctttttcttcaaattctaaaaacatgcttcacactcatcagatgcttatgtggccagccaagtgaatgtgagttggttcaaaatcggcgccacccgctacaacccggagattgggctgcccgagttcaaaattgtccagctgacgcccgagtcgtgtgacggctcctatatgtacgccatcatgtcgggcacgttcaaatatggtaacaaataaaattttgaaaattctttttcataattttgaatttcagataagttcagctgccttgaggcagtgattcatctgaacagacaaattggctaccacgtggtccaatcattcatccccaccgggcttattgtgatgatctcttgggtttgtgttagtcaattttattaatattgtaatttcgtatggctaattatattcaagtaaataattcataaaaaataattataaaagaataatgttacatcaggtagtttgtgagataaaatgcggaaattggataaaaaataaaaggcgaattcgagaaactttaaattaagcatttattccttaaataaattttgtctgggacaatttaaagaaaagcccaaaaaatatgagaaagcgataagcgagaggaggaacatcccctaatataaatgtctaaagtgattaagataaacaaatttcactctggcaaaataaaaaacttaatcaagttttaaattaaaacttttgaataaaaatatttcaggtgtctttttggattgatcgaaggtaattaattaattttttaatcattaaatttattttctttttagagcagttcctgcgcgggtgacactttcattcacaactcttctttcactttccacactcgtgggttttacaatattttcaataccgtaaatttaaatgtttacggtatatttaaaaagatattctacagtatattaaaaaaacacctttttagggaaatggcttacgcttcaacttgccacaggttgcctacgcaaaggctatcgacttttggtttggatgtgagtagcaatttcgaaatttgaactcaaaaattggaatataatttttaattttttttccttaaatttaaaattttttaattgggttaaattttaagtttttaaagcctctttaatttatggtgtatttttttaatggttttatcagaaagcatttaattttggaatttttttaaatattaaattttttaaatttaaaaacttatattaactttcgcgctaataatgaaatctcaacctctgtttttgatcagcttgcatgttcttcgtgtttctgtctctcgttgagtttgctgcagtgaattcgtacatgcgtgaggcggagaaatatgagcggttggccagttatagtgccaaaaaaggttttatttatttatttatttttaatttaaataaaaattaagagatgacaaatgaggaaggaaacccgtgggtttattccgagtaatatttttaatttatatttttaaatataaattaaaaaataaattttcaaatatttctaattcataaaatcttagatttttctgataccccatataattattaaatttattttcgcttactgaataaaatatatttgaaaaagcattttttacatcaatttttgccatttccacaaacattcagtgatgatgacttctcctcgaccagtcgatcgcccgttcttccttttccctcgtcacaccaaaaaaattcgaagaaaaagtcgggcaacaagtcgccaatattgagtgccaacaacaaaaacgattacaacaacaataataaaaaagatgagcaagaaaatgagacgaaggcaattggtgccaaattgcacaattggacgagcaatgccattgccattccgtcacgtttcggccgatgcgccgacggcggcgccgcaggggacaccaaacgcagcataacaacacacaatcagcagcaacagaacggaacaatgcgaatgatcaggcggggcatttcgccaagattattcagcaaattccccgcaaatagtccaagttttgcaaatgagaagcgagaaaataaccaccgatttttcgaataagtaaataaccggttgaaacaaagtcggcaaaaatttggaactattttctcaactatttgattagtaatttttagaacctggaattgaaagatcaatccggaaaaaccctaacaaaatccggtattgttccggactctagtaattttatatctcaaagttccatttttaccagtatattttggaaccaaccataagtgtcaggcgggccatgcatgaatttactttttgccttttttgtatccgtataagacacaacaaattaaaaaaactgttaaattcctaacaatgtttgtgataaatgataaatataaaatgctttcaagttttcgcatcttagaaatttttactgaaaaaaatacaacttaaaattggtttacagtacgctttttcaggcatccgaccattttggctgaacgaattcttacggtagaacattttgagcagttggcagagaagcgaatgtccaacag

SEQ ID NO: 8333 - DNA, 3298 bp, Heterodera glycines
aattgccgcggccgcgcatcgcgcaaaaaaaaaatgccgcgaatcgcggatcgcggtcgcgctccagccctggtgtccaatttaccggtccccattcttggagcatcaaataataccaagaatattacatttggtgattaagcaattttatgattacattttccattctattacccctttgcgggttttataaaacgactcttgttttggaatttttcaaaacttattgttagagcacttaaatcataaaagcatttaaaaattatatttgtttaatcttgtaatcttttttgagttatttttttattcccttgtaattgaaaaagtctgcccatttaattcttctcacctccattagcaaatggtcgtccattccatttgctatggttttttccttctcttgtcagcgcagcttttcccatgccacacgactttcaatgtgccgttggcgtcaatgtcgaataccacttttgcacctgcagagatgacaaaaaaggacgttaaaaaaatcgtggaatatttttattttttttaatggcgagaggaacaaagactcgggatcccgatcgatcccgatgaattgaaaattgctcggaacggaccccgaagtcgggatcgagattttttaattagggctaggagaaataaacaaaattggttaaaattaaattttcttcggcagcatccttggccaggatgaagcttcccattgaaaattttatttaagccttaatcccccaccttgtgcaaaatgagagagtgcacttggcattctcacaggcggcacgaacacgaaaaaatgcttcagggctacagctgagcatgtacccgtgctgacgcatgaattccccaacgaaatgatcgaccggaaatgccaaattttaaagattgatgaaatatcaaaataaggactagataactgcaaccgctttttttgcgacgcgttttttcaaaaaacttggggagggcacaaaggggggaggagtcggcatagccgataaccgcagtcgttttaatgaaatttgctaacagatttgtgtccaaaaatcgaccgaccaaccttacccaaaatgacaaaaattctcgctaatttttccaaaatccataaaattataatacaaatctgttaaaatatggtcaaaattctcaattttcagaaaagaggtcgtcgcctaggacgacgtacccccatgtccagacatttgcgccgcctatatccgataacgggtttaaatttgtgtttttttcaatcctttaagtcataaacagcattagttttggactaggcgaaaatgtccggcgcaaaggcgcatatgtcgggtaaccggtaccgtcccccacccccccccccggccaaaaaacgtgactggacaatttgacagtaaaatacacaaacagatatgaaaacaccgtcgcctatggcacaatcggttccctacggcgctgtccgattattgcgggcccttgttagttaggatatgttttcaaaaattgccctgatcagtctgtacatcgagaaatcctccaggacccaaccctcttccatgctctttcttccttaccattcgattggtgaagtgatcaccctcgacctgagatttaaacaccgccgttgtttttcaaaaatggcgaaaatattcttttttcccaccttggtcattgttgatcgacgcgaagtatccattgcgaaaaacgccgacacgagaagcgctcgtgccatgaccgatgccaattgcatttgtatttttcggcatttttttatgcgattggaagtttggtaaatcttaaatctagtttaattttttaccgttggttgataaaagttaatgatttgtttgtttatatttgtcttgacttattcggtgagcatttttaatctttagaatgactatgatattgaaatagaagaagaaacaatagaaattataaatatagacgacgatgaagtatcagactattcacagatatacaatctctagccaaatgaataattcaactcttagaaaaatgaaacaacgaaaaaaaaagaatattgatcaaaaagagagcgaaaagcaaaaatcgcgaaagaatggctttaaatcgttaaatttttgtagaagaaagtcaggtagaaaagcaaaaaaaccgtgaaagaatggcttcaaaacgtaaaaaagaattaaatggaaaaattgaatcttatatttgtgcagatagtttaagtgttacaaaacacaacatagcttttccgattatcattagggccgggaattaaagtcactaaaaatcttcataaaaatcgccaaaaagtcacaaaaaagtcataaaaaaggcaaaaaaagtccaaaaaagcacgtaaaaaatgcaaaaatgtcctgaaaaattaggcgaaagttaacaaaatcccatttttaataatttatagaataacattttgatcgtatttttaggcacttaattttataaataggtaccacctaaatgggcataaaaaagagattcttccaacaattaagaaaaaattcatccaggtttcattgcctttttatcgatcgaaattttatttttcggcattttcttcgctaaaattcaaattttgcttcagtaagcctaaaaaaatcacgaaaaaagtcgcaacaactcaaaaaagtcataaaaatcccaaaaaatgcgaacggtgaaagtgacagagtttttcccaatgagtaaacaatctctggttgtaattatgcattttttcagcgtcaagttccgttctcagatttacgaaatggtggtctgataaatattggcgactataggctcaagccataaatggtataattaatgctgaaaagatgggaagaaaaaaataaggttttcttttagataggattcccatcttttgtgtaattttagcaaattgaccaatcatcgccctttttcgtgcattttttgcacattgatctatcatcttacttgttgaatgcctgatctactctaaatgccttaattattatccatttaccctacacaaatttatttttcaactcaattccaggatttattttaggaatttggtgtccagttttccggtgtccaattttcctttggtgtacaaaattccggcggtgtccagttttccgcgtggtgtccaattttctggtgtccaacagggctggagcgcgcacagaaaaaaaccgcggccgcgcaccgcgcattcaaattgccgcgggcgcgcatcgcgcaaaaaaaaaatgccgcgaatcgcggatcgcggtcgcgctccagccctggtgtccaatttaccggtccccattcttgcatgatcaaataa

SEQ ID NO: 8334 - DNA, 1450 bp, Heterodera glycines
  unsure (1)..(1450): unsure at all n locations
aatttatatagatttttacaatgtattgtattataatacactaatcttttatttataaatatgcaaaaaactcatataattgttcaaataaatattttttacaaaggaaaatggtaaaaaaactaaatatttaataagaaaatttattccacaatagttttaagtttaaaatataattttataatgcaaaaaactaacaattttgaggcaccttttttagcaacgcagaaaggtaaagcttgcccgtcattcgtaaaagattttaaataaggaaaatgtctaaaaaaataaagaaaaagttcgatattaaaatcgccattttttggagggtttgctgaaaaaattatagttgaaagataaaacccccctgaattacacccccattttgaggggggttgaaaaaccgaactctcggtggttctagtaaatacggtattatgctaactaaattattctaacgtactaattaagcagtttcccattaatataggaaattgaataaattttcaaatttattaaaattaaatgatatgaaaatactagagatcgacattttgaaaaaagcctggacctggacctggattccatgttggacctggatccaggcctggtggacctggattttttgaaactcatcttaaaaatcaaaaaaaggtttgaaaaaattaattaattgcttagaaacacctaaaaatatctaattaataataataatgtatttttaaattaatttaatctttttttaaaaatttaaaaaaacatcggtcacttgaaataataaattctaaaattttgtccaggaaaattcaggtttttcgtgttttgcctggacctggattttttttcacattggacctggacctggatttcctggacaaaaatccaggaaaatccaggtccaggaaaaatccaggttgccgaaaaatgacctggacctggatccaggaaaaatccaggcctggatccaggtccaggccaatctctacaaaaaacatccgaaatttattgccttttcatcacaataacggcaatggagacattaaacaaatcaatttactaggccaaatcagcattgagataaataatttttaaaaatcttaaatcatgtcatgaaaaataaataaataatttagaagatgaattttttagaaatttttcatttcttagtggtgcattttttgtttttattttgttaagaattttgggcaaaacgccaaaataggtcaaaaaggctttttcaaaattttttagggtttaggttctaaaaataaaaacctagaacaaaaaaaacattttttgcgtgctttcaggtcacagggagctcacaaaggaaggtccccaggtgtccgtgggatttccgaatgaaactttgtgggtgaatagagcacctatgggttcttaagaaaaatggtttcaatttctgccanaataagtacgggtgccgagttat

SEQ ID NO: 8335 - DNA, 2271 bp, Heterodera glycines
ctgtggcaaatgcggcgacggaatcggctgaaatagggaaaattgaaaaaaaaacattttttttatcaaaaagaagaaaaatagcaatttaaaaattaaaaaaaacaaaaaagtaaaaggaaaaaaatcgaaaaatcagaaaattgactcaaagcaaaacgagacgaaaattaaataataaattagccaaaacaccctcccacgataaacttttttttcgcacattccttcgacccatggaaagaaaaataaaataaaaattgtaattaattttttgacagaaatttaacgagcaattttttgagtgcctatttgaaacggttaaacctcaatttccgtctgttcatcgctttccctttgctctccgtccgcccctccgccggtgtttcgaatgcgtcgcaatttggcaaaacctcaaaaacaacaaattgttattttttctataatcgcaaatggccagctgaccgttctcgagcagaacttgagtctgttcagggagaagaacggccggaacatttggcaattcggtgaccaattcatttttggggcggtggacggaatggcaaagcaaacgaaattgtcgaagcagcaaatcaacgcctaaaaagcaaaagccctttttagtacgactttttttttactaaaaaataatttaatttttgttcctaataaatttatctgttaaagttttagtgaaatttagctttttaatacttttcttaattggaaaaatgggtttaaataggtttatctcgtgcatttaaatgagtaccatcaaagacagcaaagttcgaagagccaaaatcaaaaatttcaattttgcgtttaaggcccgactctgcgcgcactttgaaattggccaacacatggacgacctcttgaatacgacctgtgacaattgttgcggctacttctgaaaaataaaattcaattgcccttccatttggttcgtcgtcctttgcttctcaccccctttttcgtcaaaactcagtgccacggagtgcggctctgtccgttcttcgtcctcctcgtctttctgctctttttgctgttcgccttctgcactatttgccaatatttgctggccatcgtccgcctcatccgccgaagaggacggcgaatgttgcggccccgtggcgtcctctttcgcctcctccgccccctctgagtcatccgcgcgacgccgaattttcagcccatttttgttgcttcgatttatcttcctcttacgaatcatttgttgaaaaaaacaatttgcttcactaaaataataaattaagaatttgtatacagtttaacactcagcttttgtcttggttcaattccctcgaggaatatgggttattggcattattataatggcgctctttcaaaatattttccatttcttttattcatgcgcttttgttgcgcaatcatacagtaaggtgcaaaagtatggaagcaacgcttttttatgcaaaaccgcttctccagcagatgagtgattgaatgaaaaaattgagtaccatagcaatactcaattttgattatttccccttgaaatactgtagaaagcagtcatttttgccatgccaaattttgccccctttctctgtctcatcatcagcgggtattcgtcgtcgaataaccattcaaaatgcaattcggtagagaattagcgaattttgcgctctttctgataggcttactcattttttagagaaaaaatttccaaacctcctaggaccccgattttcagtgttttggggtgttcaggtcaccatgaaggagtagtcggatcaagttggtgcaaaagacttttttgatcagaatcgttagacttagtaggaattttttcaacaatttttctctatttaaagttatctagtttttgttcgattgaattgcttccatactttttgactgtaaatttttcatgttttttagaagatggttttttctattattgcttccgacaattggggcgaaaatttcccgagactcgagaccgagacaagactcaaaaacccgagacttttttctatgagaccgatacaagacataaagccagcccgttttcgtacgggggtcgttttcgtacgagtgatatccaaaaaaatatatacctaaattaattaaacaattgcatttaaattatcatatactaatgtttaaataattgctttttaacgttttgagcaaattaggtttttaataactacaaagatgatccacgcaagtaattaaaacaaaacgaaacaatgagaagttggaacatgatggtgcatt

SEQ ID NO: 8336 - DNA, 1226 bp, Heterodera glycines
atttggttcgtcgtcctttgcttctcaccccctttttcgtcaaaactcagtgccacggagtgcggttccgtccgttcttcgtcctcctcgtctttctgctcgttttgctgttcgccttctgcactatttgccaatatttgctggccatcgtccgcctcatccgccgaagaggacggcgaatgttgcggccccgtggcgtcctctttcgcctcctccgccccctctgagtcatccgcgcgacgccgaattttcagcccatttttgttgcttcgatttatctttctcttacgaatcatttgtcgaaaaaaaaaacaatttgcttcactaaaataataaattaagaatttgtatacagtttaacactcagcttttgtcttggttcaattccctcgaggaatatgggttattggcattattataatggcgctctttcaaaatattttccatttcttttattcatgcatttttattgtgtgatcagcgatcactgatcaatgtatttaatgtttttagaagatggaaagagttaaaagatggtttgattcggagattctaacgatgatcttccaacattagattaaataaatctgagatgggttttttgttcaaaagtccacaaatgttgcaatttaggcgcacaaaagactggaaccgttctaataatatggtgattaataaaataggtatcaggtagagttgagcgggaccgggaaatttgacaaaaaccgggaccgggacttaccgggaccagaaaagtcgggaccgggaccgggaccaagtttttcgaccgggaccgggacagcgaaaaaacccgggaccgggaccaaccgggacttttcccaagtgaaatttttttttgaaaaaaattgaaaatttaagtgcactttgttacgaaaattgccaatattcaaaaatgtaccaataaaattttgtatttacgttttgggggacgagttcgaggaaaattattaaaaattttgttttcaggggggggggttcttggaattttctgagtcccactgtattttttttaaataaatttacaatcttttaaattttttgcttttaaatcgctgtttttgtggcaatgttttttcaaaaaacttttttggaacagtgggagggggccgggggtccggcggtgtctataggtgccgccggacaaatgttgaaattttgagcgagatttgttatcagaagttgttcaaaaatgaccaaatatttgg

SEQ ID NO: 8337 - DNA, 2754 bp, Heterodera glycines
  unsure (1)..(2754): unsure at all n locations
ataaaaggcgagcaaatggcataaccaattcgttggtgttattcattataatgaaatttcataaaatatttaaagaagagtttctgttgccaataaaaaataactttaatttaatttattttattttattttcatttaatttaatttcctttagcagatccaatttctaattcaatccttctactacttcccaaaatgcttctcacttttcctttctgtcttctgttgatttttgctaaatcatccaattgccaaatgcaaaatttcaattgttttgcccaaaatgggcccaatcgccgcctctctcccgcccaattagcagacacagccttttggcatgagcaattccaaaagattgaactcatcaatagctcggacttcaaattgaaagagtttatttgcgagttgagccaaaagcagcgaatatttgaggcagtttttggaacattgccaagagtaagttaaccgcttaattaattaattaactaatgagtccaccaccactaattaggcccttgtccctccttccatggatggtgaatttgaattcatcaaaagtagaagagaaatgcttgtccacaatgatcccgctttgagtgaagtgctcaatggtttatttgtcactgcaatgaatgccaaacagaaattgcaattatttccgggtgaataaataacacttttaattaattaccattattaattattaatttgtttcctttttcgatgttgacgcttttctgcttgtcaaaacgatgcgaaagcatctgagttttgtgcttctgttcttggccaaacgttaccgaattcggctgagtgattcgaaagagcgaattgttttgacggaacaaagtctaaaggactttttagaagagtcattccaattaatgagccaagtaattaatatattttttcaaatatataaccaattcttccgaatcattagcccaaaaaatgtattagctgtgaaaattgtgcgaacgatcagacaaaaagcggaggaaagaattactcgagaagaaagcgattgctccaatttatttcaaaagcaattcaaattgattgggacggaaatgggctcttaaatcggtcgaaaagtaaatggcactaattaatttgggctttaaaaacccaaaacaaattaagactcaaatcgccgccgcaagcgaaagaaattaatgaaaattttcgagccgatcactctcgccattcttctgctttttctagtgattttcatcatcattttatttattctttgccacgctccgattatttcctttcgcaacggcacagcgtttggcggcggaacaaacgcagcgatcactgagcaatcagagcaaagggacataaaatgtaattaggaaaaacaatgattaaacacagtgccaaggcatttaaaaaccctaaaaaaaaagtcaaagaaaaaagcgaacggacggagagaaagggaaagcaattattaaatgctttcaaaaaaatatttttttaaggtttgaacgcattcaaagggatttcgcccgttgttgtggacaggcaaaaaggcgatgaacacgacgagggggaggagaacgagcagttggactgcgcaatttgcctcggccccattgattacggcaccgaagttaggccattgcccgtctgtaaggtgtgccatcttactgtaatacagtaacaaacaactaaatgccatttcaatcactaattttagcacaaattccacgacgaatgcattgaattatggtaataataataataattattatgttattggtcccccttttttaatagtgtgacataatttaggatccgaggcggacacaacgcgtgcccattttgtcgtcaagaaatattcaatttacaaatgatgtcaccgacattatttccacgtacaaaatttttggtttttcttgattaattaattaagcaaattgggtttaatggggaaaaatattcgctttttaacttttagaacaccggcagaacaatgatgggacaaatgaggcgacattaatagaaataacaaatggaaggacagaagaaaatgaagaaggccggagggaggaagaagaaggacgacgaacaacagcagaagagggaggagcagaaattgaccaagtgtaaaagtggaaatgttaattaaccgaaaataataataataataataaaagcgaataaaaaacggagttttattatgtgatttggatagttattgaatgaattcgacattatccaataaatgtaaatttgggtcgggacggcccaaatttttcgggcgactaatctggtcattattattgataaggttaaggaaaatcttttcacgcactttgtcaaatctaaatttaattataattaatttgcattttttttgcttgccgttttctttgtctgcggatttattggttaattaaataaaaagcacagattatagtaattgatagtaatttatcatgacaattcccttttatatatattaaaatacagctgataatttcgagggactttctcatcaaaatttcttttcttgcacgaccgttccgttttcgaatcactaaaattaaattattaaatccaatttggcattatgccccccgtcccaaccaatcggttcaaacggaaaaggagttgccgactcagtgcgctgctccacagattctcatcgttcatgtttttgttgtacaatgcgaaataaggcagaacgttgttttcgtttactaatgaaatgtcgaataattatttcatcananatttttaatt

SEQ ID NO: 8338 - DNA, 1042 bp, Heterodera glycines
  unsure (1)..(1042): unsure at all n locations
aatagaatagcaggtgatttgccaaatctgttcttttcttaccaactggtggctctttttggttcagcttaatcgatgagacggcganaattggcgacgttttctccaaatttgtgccgaagttcagtgcccttggcgcggcacttgccgaaagaatgaaaagaatggcaaaaaatctcaacattttcaatgcttttttgtgcttaataagataaaaaagaaaataaataaatatttaaagaaaggaaaaaatcgcaaattttgttcttttaggaaaaaatataaaaaatgtttttgcttttatgaataataattagaattctgccttttttatacagcaaattaaaattaatttgagtttcattctttacttttcactaacaatttgcaacatttcttggaaaccaattgcttttgcacaattataaaaatgacctttactgttacaataatatgggaagcgaaaataattgggccaaaggaaataaaacaaattaattgaaagaaataataaaaattaattttattaaatttgaattgtgagtaaaaaaagaagacgaaaaggaagtaaataacaaataagctaattaccagtagagaagggcaaataaacatatcacaattttaaaaatcatattaattttgataataatataaaatcattaaattttctttcgtcggcaccgcttcgaagacaatggtcataaaattgaaaccatttgcttatttaaacgcaatctccgcccaataatttaaatttaaaatcggaaccatcagaaagacgattgaaaattttggcataattaaaaataatcaaatttcaagagatggcaattggcgcatgttataagcgtgttgtcgatttgtcatttttaccttaaaattcggccattttttctcatttgaaaatttaaatgatttctttgccaaaaacttccaaagttccccccaccaccacccatttttattctcattccaattgaaatgcaagaaaattgtgtctccagcagttatatttgccattttcatgcttatttcgctt

SEQ ID NO: 8339 - DNA, 2174 bp, Heterodera glycines
atggaaagtatgataaatgaaaaaattttttgtggccttataatttctttacagattgttcgtgcagctctgcattgaaaacttgataggatatggccacttaagagtttcagaaattttttgtatcaatacaatttttggagagtccggaaccgggatcccggcaagtaaagatgtattttgaaaataccataaaaggttttagcaaaatttagaaaaaatagaaattatttagaaaccactaaaatttaaatttacttttgtttaatcactcacttttcgtatatgtttcgtctcatctatttgagttttttcagcttaataattaattcattaattaatgttttcgattttcttgaaaaattccaagattatcacggtcccggatgaagaaaatccaaatcccggtcacggttattgaagttccggcaaatcacggtcttggtttccgttcccttcggctctaccacagttcgatcagtcggtttttcatttgaacaagcaaagtggccttatttcccttgcaaaagagtcaaaaatcgcttcctcataaaaaagttttgttaattgagttcaattgggtcattatcattcagattttaagctaaaaagggccactggaaaattaaaattcgttttataaatttcacaaaaataccaaatttaacttacaaatgcatgcgatgcaaaaatgcagtcacattgtaaaatcccaattttattgtacaattcaatgaaaataaatatatcaattcaattaaacgatgccaaaaatatttaataatagaaatgacaaatcaataatcataagaaatttttatgacgcatttggcagatcatttgagaaaatgcacatatataaaaatatatgaaaaaagctaatatattgcaagcaaaggttttattaatgaaaaagaaaaattggaaatattaattctccaatttttttttcaattttcaattttataaacccaaaaataaagatttttaaaagataatgtcttcgatttgcagctaggaaaaaaagggcggatggagggggtggggtacatacacataatccgcgctaaatataagaaaacatatgcaaaatttactatatttcataaaaatttgtcaagatggttaaaaaaatcaatttttgtataaatgttttgccttttcccccacaaaaatgccattcttaggggtgtatatttaaccccgaccccgatcgggttgagggtcgggatcggggttatcggggttggaagcgtcggggttcgtggtcggggtttaccccgaaaatggccaaaaaagtcggggttcagggtcggggcggggtcggggtcgcaaccctaaaacaaatcattgaaaaattcattttcacaaattaatttattgtaaaatatttaatttaaaacaactagttactaataaattttctttggtgttttaaagttatatttttcaataatgaataactaattttttctgatgaaaattaaaaatttaaatagtagtgatttaataatcaaaagattcactacgtcatgtaactctaggaaagcgcacaagattgaataaaaattttattaactctaaatttaatttttattacattcaatttttttgaacatttttaatgtaaattattatattgttatcacatagaaaataatctttaaatcttcaaattatgaagctatttaatatcatttcatttttttaatatatttcaatagaatttttgatgtttacttattgaacaaatagctaaaaaagtcataagtaaaacttaatcaaataaatacaattataagaaaacatttgctaactgttaaattgaaaaagaaaaaatgataaaacctagaatatagaaaaaggcatatttttttaaatatactaattgcttaatatgtaagaaaagaaaaatcttaattagaacatattaattaaaacacgcaatttttacaataaataattaatttaaaaaatatatataattaagtgaaaatctataattgatgaaatataaaaatacaaaaataatgaataagaaagattttacaaattagtcaataaaaatgcagtaaaattcacatcacataaaaagaaattttttaattatcaagtatttaaattataagatgaaaatttccatacataggtctaattatttaaattttactaaa

SEQ ID NO: 8340 - DNA, 2701 bp, Heterodera glycines
aaatccattagctcttaatagcatattggcaaaaagtcattataataaattctattttacattcaaatgatgacgtgaaaagtaattataataacagcttacgcaaatgactaaaaattttcgattggtttttattcacattgttaaaagaattataataaatttatattttcatgtaaataataatttaatacatattttaaaattagttacgttataataaaattatataacaaatatataatttgaaaattaaaaaaatagcttaacattcttcattcgatttagattatggcagtatctgctgtaattgttgtttgttgtgtgatcgcaaagccaagggacaacggcagaaaaaggtaaagcaaacgaatgcttttgcatagcaggtaattatgggcaatttgaccgggttttgtgatgggaaaagcgaaattaatgagcgaaaaaagaggcaaaattggcaaaaattcaaaaataaatttgtttttttattaagctgagctcactttgactttgactcttgaggaaatgttccgttttgaagcggaagtcgtcaaagtgttaagcgataaatttgaaacgaaaaaagaaacaaaaaataaaacaaatgccaaaggaaagggaaaagaagtggcaaaagaaaaaggtaaaaaataacagtcaattaataataacaataattaattagttaattaattgtcttaaaaattaggcccaacaaagcctgaagaacaaattgctatttttgaggtattattttttgcttttgaagtttagatactttcattttttaggaaattgaaaagattttaactgcaattgaaaatgaaagaaaacgaacggactttcagaaaatcatgaaaccatttgaacagtttttgaagcaacaaattcaaggtgaagaaatcagggacggttaatcccgatttaaagttcccttcttaccccggtctcgacttttaaaaactcaaatcccgacccaagttataccttcaaaattcgcaatattaaacttaaaaaagccgaattttttaattttaacgaaaatatttttttaattggttatttttttaaattggctaaaatttttaaggttcctcaattttttttttaatttgtaaaaataaatcaaaaattcgtccattttgaatttagtgaaaattgttccaaaaaattgggcgcgcttcgcttttgccaatttgggcagggcattaatgaaaagatgcacaacaaaatggtgggactcaacagacgaaaagaaaaagcaactgcacaaatggtggcgggcgtttagcttctcgtaaacattttatcaaaagaaatttattaattttactattacaaattattttgattgtaaattaaagttttgatccttcgataatggggggacgatcaaaagaagccgacaatggtggacaatcgcgacaatttttacgaattacgctgaatcagtattgttcgagcagcctcaaacactacgaaatggtgctggaggatttgtgggtttttcaattccattaaatatttttattttttaaatttaagagcaaaaaataatgaaggaagatttgttgcaagtcgaattaattcctttggctgaagaaaaagccgaaaaatgtattgtaattaaaattttaaagtgatgcaatacaatcatttattaattaaataaactttttttccatttaaagcagaagcaatagaaacgggagaaatggacgaggaaatgccaattgaactgtcagtgtacgaattgggcatgtacagaagattcaagcacatggcactgctaataggcgacattggtagacaaatgtttactgtagagtgtacagtaaacctaagaaaagaattatttatttgtcctttttaattaagagattcattacggctaccaaggtgtttggctaacggaattaggccaatttggcaaaccacgatcactgccatttatgtacggcattcgatgcgcattaatccattttaaatgacaatttagcaaaaaagtgcggctggacaacgtggtcacgcgtcacagtttacgccaaattcaaacggtggtcgaccatttggagatgggtccgtacataaagtacgactttgtggaaggaaactgtgccgatttcacaaaatctttgcttaaattaatttcctggacgaaatcgccggaaatgaaaagcgatggcaccgaagggaaagaaaatggcaaatatccgccagaaaaagtaaaatatttaataacaaattaattgacagtaaaaaaacaaattgttgaggtcgattattcggaatggaacgtaattaaaagggaaggaaagcaaattgaacttgcggaagaagtaaaaacgtttaaaattaaattttgaaatttcatccctttttttcagcccattgttcacaaacaaattgaattggcgaaggtggattttctgcagaacccacgcttggtacaattggtgaaggacggaccagaaattataaaaggttttatgcgcgcagtcacacaaacggtgacagcaatcggaggcatggcaagaagaagaaactgactgatcagcagcagatcacacaatcggtcaactgatcgatcgatcatagttgccgatcagaccattcattttcctgttggcattcattcgtttatcacagtgacacatttgcgataaaagcagagatggggagcggtttacctcag

SEQ ID NO: 8341 - DNA, 1595 bp, Heterodera glycines
ccattttagaccataaataaaaaattcgataatttatttttcgactttttgctcgaattcaggttcggggttcgacttaggtcataataaatgtcagattcggattctccgacccttaaaacccctaatatgatcttttcttgaagaaaaatttcaaaaattttgtttttcgaaaaaggggagggggggcaccatccgtactattaccgttaatacttaatattcatcattatgtgtataaaaatacaaaaaaaaaaattcgaccaaaaaaaagttgcaaacaaattttcaaaaagtaccttctttaaagtagctccaaaaaggggcgtatgctaccatctaaactattacccaagatatttttagcacgcaatgtttggtcaaaaggtgtggtgagctaagttttgacttgttcaaatttaaaatttttttccaggacattaaatttggatgcctaacagttgaattagtttaaaaaatgcgcatgtttatacaattatagggcttttactccacatacaatacataacacataatataggaatcacaacaaagaatcatcctagacattacacagtgatacattatctgctcgatcagaacatcttcttcatcttgtccaatacgttcgtcacggcaagcactttgcggatatgcttcacgtacaagttgtgagcgccataagtttgcggaagggccaagtagagcagaaagacggtcttcagaggcacgtacagcagcagaaggcccattgatagagccaaagagatagtcgaactggcaaaactcggcgaacacgcaccaataaacgagccactgggtgtattccgctgaaaattggggaattgacattgtactcgaagagggagagcacagctggaaaacccacatgtgttttgagtgttgagggtcaacaagctcgcgtacattgggtaggccacagcttaaacaaagggaagcgattggttaacagaggggcacaaaacggaactccctcctcaaaacgcactgataagagtagagagaagcatattgccagggcagagcatcaacacgagcagcacaagagaggaagtgatgtagaagagctgaaaccgggaaaaacagtgtaaattaaaaaaagaaacaggagattgggctggctccaccttctcacgttccattccgcttatttcttcggccttcttgatgaacggatgttccaattcgttgagcgttttctgcagcaccggaagcacgtccttgaagtctttgatgggcacttcacgcagctgaacgctcacaacactggcagaagaagtcgtcgattcgtcagaagacattgttgcgctttgattgtcagcccaatgctctttaatttaatacaaatgaaagtgaaaaagtgacgaaaatcaatcctatttaaacataatttccaactattttgtctgtgtgttaggtaataggtggtatataaaaataggtaaaatgctagtcagacacacttacataggtatgtatttaaatacaaggtacttatgtactttacagaaaccataaaaaaaattttattttttaaatcgtttatagaaaatttttgtagagggtttttgggg

SEQ ID NO: 8342 - DNA, 2097 bp, Heterodera glycines
ccctcccccagcagaagacagccactctcgatagaatgagtcccgattccgggcatcgagactctgccggagtgtcgggtgccggtgccttcgatatgacgatagaaggactgcggacattgatggaatttcgtggaggcgaagcattggagaaaataagcaccgactacggaaacactttgggcctttgcgaaagactcgcgacagacccaaacaacggaatagcgaatacgcaggacgaactgaagaggttgcctttgctgaccatagtccgacaaactcttctttctttgacttttccgattattcggccctttgttggcttttaagccccaaagtgccgctgaaaatcctcgtttgattgcccaatcttttaaattttaaggcctctgtgtgaattgacctttgaaattggaatttcaggcggagggatgccttcggtgccaatgaaatccctcccctcccgccaaagtctttctttacgctcgtctgggaggctctccaggtctgtccgatggcatttcttaatgagtctttttgtcggtcaatttaggacgtcactctgatcattttacttattgccgcagtcgtttcacttgccctttcattttataaccccggatcggaactcggaggttcgcttttccatcatttacaagcgtcgtctttcctcaggtggaaaagacgaaactgagcaggaagcgggttggatcgaaggtgcggccattttgatttcggttgttgttgtcgtactcgtcacggctttgaatgattacacaaaagagagacaattcagaggttggccatccccgggaaaggcggacaaaaaatgaatttaatttgaatttgaatttaaggattgcaagcgaagatcgaaacggaacacaaattcgcagtgatccgcggaggaaagcagctgcaagtggtggtcaacgagttggtggtcggagacattgcgcaagtgaaatacggtaatgatttgccggaaaaagcggacgatggcactttgacaagccgaccattggcacttttactcattgacactttcccttgcttcttcaggtgatttgctgcccaccgatggagtgctaatccaaagcaacgatttgaaaatcgacgagtcgtcgctgaccggcgaatcggaccaaatcaaaaagtcggccgagcatgacccaatgcttctctcgggaactcgtggtcagttgtgcccattttgttgttcgcactttccttttagtgatggaaggcagcggtcggatggtaattactgcggtgggagtcaattcgcagatgggaattatcatgaaacttctcggcgcggcaaagtcggcgatggaagacgagcggaaggagaagctgagggaggagaagcggacgaggcgcaggagcaaagcatcaggtcagtgggagcattggccaattgaggagaatggtattcgggtggggcaccgtaaccgattacggtgggactttggcattatttccaccatttccttctttcgtgccgagtcttttcataaattggacaattgggcattcttcaacaaataatttatcataatttatgctcgaaagcaaaaaaattatcatcgatagtaaaagtgttatccattagtctgcaaaaaaaggttaatagaggagaaccaatgggtaggctatcaagctactatcatttgttgtgctttcattgtgtcctttcgcttattggatagtatgtaccaaaaacctaaaaaagaacactttcagacatcaaacttgacggttacaatggcgcaatccctccggggtcggcaggaagggccaaagatgactcggaagttcagccggccaagaaggaacggtcggtgcttcaaaccaagctgactcggcttgccattcagattggttatgccggtgtgtgagggggggggggcgacggatcggcgaaagtgtcccatttgaggctcttttgttgctgcttgtacggtgcttattttgggcattcgcttttgcatccaacactacctaatcgaccaaaaaccattcgttgtcgccgactttcgctatttcgtcaactttctgatcatcggcgtcactgttctcgtcgtggcattgccg

SEQ ID NO: 8343 - DNA, 1192 bp, Heterodera glycines
tttttggccctgacttccaaactgatcagaaaaaagtgatcaaagttcccgaaaaatcaataaaaatgacaaaatttttaaaaattcataaaaaattttaaaataatgatagagtaattaaacttattttaaaatgatcagcaaacatatctctatcaaatagcatcataaaacaaatttaaataactgcataaaaatattctaggaggagtaatactttgaaaaaaattcaaagtaattcaccatctgtcgggcggatccgaacccacgacaatgggcaataagatgtaagagaaaaaaaatccttttttttgctggcattttcatttgatcacttttttctgatcatttttggcgctggggccaaaaaagccgaaaattgtcaatagtaaatcgaccatgctctacacgatagaagtgtttttaaagtgatttgaacacttacagttcgaaatgttcccttgtgagcatcgtagtgcctctttcaccgagttgaaagcttttcaagaacgctatgaaaattgaaaaaaatgtatttttagactttgcttatttttacctgtaaacttcttgtgtttgcaaagtcaaagtcgcggaatagaacactttgaatgcaagctgaaaagcttttattgccaaagcagatgagttaccattacctctttaataatgtttttgacgtcttcgttttgaaaatcggcattgactcgttgaattgcttcctcgatgtactgttgaattcgtctttggatttcgggatcggcaagcctctcctttgaacacactccttttccgaggacaagttgcacagtttacaatccatcttcttcgattgcgcagacctagttacgaaaaatttaacgaattgaaaaaggattttacgataaattccgctgcacgacgagcaaagtgcatgtcgcactccattccaggtacaaacggggccgcgaaaaacaacaattcagcggcggttgatccttacaggaaataacttcagtataagtattcttcggtaaatcatttaccaacaaaatactccacaattgcgagaatttgttgtctgttgtagctttcacggcctactacgaccgttttcccatggtagggatagcgctttccgtcctcctttacgtcaacgcctgccgcaacagttatctgaaaaacatttgtctgggtccgatccccgcctcaa

SEQ ID NO: 8344 - DNA, 4754 bp, Heterodera glycines
  unsure (1)..(4754): unsure at all n locations
atcaataggtagccaactgcttttcggttgcatctcggtatgcttccgtgaaatagttgtttttcgttggaaatagctgcgaggcgagtgtgcgcacttggagcgcccctgccgggttacgcatcagcaccagatagtgcgagttgttgcgcgcaacccgtagttctttcgcgaacaaatgttgagtgaccaacacaacgctaaccccccaattgtgcgatccccgggtgaacacagtgtcaagaaattgttgccccataccaaccatgagatcatccagcaccatcagcagttttccatcactctcttttgcgcgccggttaacctgctcttcggttgggcttccagcatgtacaacaaccctacagccaacgatgtgtccacttttctgtagctgtattatatttgggttcaactccccataacaatagaaaatctcggagatgggttccgaaactagcgcattcacattcctcagcattcgcagcacccattccgattttccactccccgtgctccccgagattgtcagcgtgaacgggtgtctgaattgcaaatgtttttcatcaaatttttgaaaattgtcagccatttgtttaatttcataaattgtttcaaaatacctacattttctattttatatatacatataataaaaaataagtgtgtgtgtttagatcattcttaaattgttcaaacaccaaatggacgcaattcttgcaaccgattggctccacaatgcgttcccagagcgaaagacaacaacaacaacaacaacaacaatttctagtgtgggagaagaattagacgatgccgtcaaagcagtgagttttacacaaaaataaatttaaaaaaaaataaataaatgaataaataaaatcaaggaagagcaaatcagttggcttaaaattatcgaagaggaggaggagcgaggaaatgaattgcaaactggtgaaatggaagtggaacgagcgaaaggtttggttgtttacaaaaaaaatgaaaaaaaaatttagagattgagccgccaaagcgacaacacttacagtccaagtgtagctgtaacgaaaagcaaaagagtgtcccgctgattgactttctctgccaacactacaaatgttctgttaaagagcttcacgttctgcttcagacgctgaacaaacgtcgcgaaatttcggaaatgttgcgctctcagcttcagttacgcaccaatcatctgcgtcctgcctggaaaaattttcgcgtccattgcaacgaactgacaattcatcctgctcaaactgcatatgccatgcgcggttatcttggcattacggttttttaatttaaatttatcagctcctcaattgtaagatatacattgtttttaggtccgtatttactactatgtgaagcatggcgtaaagctcgtttatcctcagcttccctgtgttcttcaatttggcggtggtgaccattgttctctgtttccgcttgagtgtctgagcgtcataaaagatgcttgattaatacgcatcgggtgttttatatgtgattaagtttgctgtgttattgttgttgttgttgttgttgttgtttttttttttaatttctcctagataaaaaatgttaattattcaaaattgtaccgcggtgtttaaattacagctgttgcctttcacaaaagagcagtttttgaaaattgcaaaaaatggcttcaattccgagtacgacccccaacgatttcatgcaatcatcatacgactacgtctccccaaaaaacgcactcttgcatgtcttttatttcgatcagcccgtgctgtgttgactggtgtgccttgtccagacagagcggtgcgcgaggcacaaaaaatcagacggagggtgcagcatgcgttgggctcccagctaggaatccacgagttacgtgttacaaattgttggttcttgcactttatcacatcgattgtccatgctgaactttttaccaacactggacccacacaggttccgcaacatcaaatatgatcctacaatttttcccgccatgcgttgtaaaatagtcattgacgacgacgacgatcacactttggtcacttgtctagcctatcattctggaaaaatcattttaacaggatctaaaaggcaggacaatttgaaccacgctttgcattcattcttagctgtcttaaataattgatttgttcatccaattgtaataaacacttttttgtttttgcaactgattttttttattaattccaagttgagcacccaggacggttagaaattaaaaaggcatcatcatcatcaccaccatcatcggcattaaattgctgtaattcttgcccctgctgatgctgaactgtttgcgcttctcggaatccaaacggggttgtcttcatgccgggtcgaatgcgccccttcacataatggggctgatagtctttgtgagcttcgtgggtgtacaggtccgaacacggagttcgaccaatttgaggaaatttgattcttattgacgcactgcttcccggaacaacatgaacatcttccatgttaagcacatcgtcactgtggcatacaatgttaggcggagtgttttgtggaattgtaaaaaaaaaaaattacatttgtccatcaatgttgtaatgttccaaaacaatgtgcttcatggactcgaagtttagcagttgctgggcggaataagaaagacgaaaacttcggactttcagttcagcacgctcatcctccccacttgcgctatcacaatgacgaaagccataattttttgggccacccgacacaaattcatatattcgcctcgaacaatgttccctcttcatttggcccagcgcttcgccttcaggtacgtgttgtctcccactgcttgccacgtaatagattgagtcggtatctttgaaaatgatcacaatgagaaagtagcgttttttttttgttgaacttaccacaataaagaagcttatggcccaatgtctgcacctgcagatgtagacgagcatatgaagtgacaaaaattgcaattggcaggcagttggttgacggcgctttcgcaaattccgcttttttcctcacaacaactcggtccatatgaggtgagacgtgatgaaagtcaataatgtcgatggtgtgattttcgagcagtgcatgaaattcagctggagtccgagtataacgtacttccgtaccaccaactcgttgtgcaagttttccccagagtgagtttgccagaattttctgttttttttttactcgattttatacgaaaatttctctaaattatttaccgcaaccattcgaagcccgggattgtttgaaattttgttggggtccagctgaatgccctcaatccgcttaaattcatcaacatatgctctgcgctgttcatcggaatcacaaccgggtggccagccgcttgcttgtactttaaggcccacaaaagtgttaacgtattcacgaaaaagttcattgtcccactcttcataatgccaaacctatattttttttaaaggctcgatgcactgaaagtcatttttttttacctcatataagtcaactactttataaccaagctgtagggctttgttcaattcggcatgagtgtacctgaggcaaaaaaaaaaagattgacagccgcaaaaaattcccaaaattacgcggaaacccatgcccttgctgcatcaacgtgttgacatgcccgttgttgccgattgtcagcacagcgcgcgcaaagcggaaaagttaggcgtccgtctgtcgtccggtatggaagcaaagggattgttagcgggcgtgtaacaggatcgggcggaagaacacggacaaacaacaggcccgagaatgagttcgcgtcgggtgagcaccagggaagcggtgacgtgggtgggcttagtagcgtttcacgggtaagaacacgggggttaccaacaggaaacgagaatgccttcatcacatatggatacaagcttacctgaaaataaataattaaaatttttttttgctcaattattattttataactatatcaatgaggattatctcctcgtccgagttgcatgtgtaatgaagaataaatggttcagtgcgaccaccacgcagtgcatcctctcttggatcaagtggtcttggaacaaatgaggcattatacagccgccgaaattctgggtctactcgaaggcgttgcttcacttcacatccccagacaacctccaattcaaacccatgttgattctccagttcaaataatcgcctctttgttcgttcatacaagtcttcagctgtcttaccacccgccaatttttgtgtctgtcgtttacgtaacattttggacagccttcaccgttttatgaaaattaaagaaaaagaataataacattttttttaccgtgataaaagcagcccatatactcaatggcaaggtcccgttcaggtggatctcgtgtgactaatccatcaaggcggtaaccagtgtcctcaacgttagcttcaccaatggaccactgtgcagattgaacatgcaccccaacggatcgagcccattcgtattctcagcaataattttgcaaaattggagcacactttcgcgtagaattgccacgtcattcatacagtatagggatgagttgttcacgtaattgaaagcgtgaagcgcgattctcggcctccaccnatgaaaaaggcatttctttttgtgcttttatgtgatcaggttgataaaattctttgggcggtaaacacgcaatctttgatgcaaattt

SEQ ID NO: 8345 - DNA, 1649 bp, Heterodera glycines
tctttcagcttgtgtctgccgcaggtttgttgaacctctttgtttttcgtttgttcatttgtccgggtttacgtgcttgagggtcacttttttcatctgataaatcgaggcaaaagagtaataatagtctcataactgatcaagcaattatttgccaagtaatggaccgaaaaacattgatccgtcgctgatcagttgactggtctattcgttgatcagttaatctgatcttgtcttcgaaatgaccgataactcgaccaatgggtgatcgataaaaatttctgatcactcattggtgctgatcattctgacagttgcccgcttaccaggtcaatctatgcctgtgactgatcagtgagtccatggatgggttgatcagttcccaaattcgtcctccattctttctttggccttcttcccatgattttcgctccccaggtttacgagctgttcctgaagcaatttgtcggcggactgcacaccgtttacaccaaactgaagcggctcggcattcagccgctgatttgcagcgtggagcaggtgcgagcactgcgcaatttgggttccattcagtcgggcgtcaaccgatgcaaactgatcgagacggacgacttcgaaacgctgtacaggtgcgagacagaggacatttgaggaaagtcgaggagagattccccgggactgaaatcacccgaccattttggcattctttgagactgtcgaaaatgtagctgaatctcatcatttttggaactgttgatcggttcagaaaatgataaaaccctgccttatcgatttatttgtcttggttttttgataataagcgaagattttatctgatcactcttactcctctctctctctctctgctgattggctcctcctctttcccttaatttcccttattttctttcactttttgctttttttattcagagactgcaccaacacggggtatgtgtgagaagaacaatttgccaagcgatttgttgttgtggcggaaaagcaaatgcctttttactccaactatttttttttgtgtgtttagcgctcgccccgggcgaccgctgaagcgaacgatcagcgacaatctgcgcaacttcgacagcaacacgcggcaacggcacagcgacgacgcacccgtgccgtgctcattctcaagccactgtaaagatgagttatcaaaacgacattctgaagacgacttttacgcgccgtccaaagcatcggccgaccgtttgctgtcctcattcattcccatccaacaccagcacatgttgcaccaatatctgaatgatcatcagacaacatttgatcagaatcgcaaccagcaacggcagaggcacgagacgagcacatcgagcaataacagcaacaccaccatcacagacaacaacaacaaaccacaaccagcacagcagcagcagcagaaccatcatcacatgttgctgagcattcagcaagcgattgttgcggctgctgcaatggcagcaacggtacaacaccaacaacagcaacaacaacagcttcggcaacagcagcagaacggcacaaacaaaagcaatgctattgttggggatgaacaacaacggcacatgccattgcaacagaacgtccaaatggaagtgaagggacaactgattactgtcgat

SEQ ID NO: 8346 - DNA, 1584 bp, Heterodera glycines
cagcagcagcacgggcgaaggagaggaacgaagcggaagtgaggacggactgtcgaggagaagcggaggggcggacgaacgcgcggcacagagcgtcggcagcagtcggaagcacttcacagcggacaggggaagcgggcggcaaaatgacgcggtggaagcggagagtaacagcacgagcaacgggtgaatggtgtggggaacagatagacagtttaggggtggggggggaaatgcagatcaggcgtgatcagcggatcaccaatgatgttagattggggactgactgatcagtaagacaggaagggaggaggaaggcgtgatcactgatcagacagacgtattcgtatgctgatacgataaagaaatggaaaaaaaatttgtaaaagatagtcagagaccaaacgatcagaaattgattgttgctaaactgagtgacgaaactgaaacaccgcaagtgtttagcaacagcgaaagcccaccgacgcaaagttcgcctccctcttccggcgatgggtactgctctttcaacagttccgactcttacagcaggtcaaattcggacagagttcggggggagggaatcattgttatcttttaataacaatttcagcgaccgacagcaacaccaccacatgctgaaccgtttgaatatggcggtggaccgcgtagagaaagtgttgacggaccaatgccaacactttcacggttggtgcgccaacggaaaacacacaaaaagcaaatccacaatttagcaattgtaaatgagctcaaattggcaagacaaagccaggaacggaccatgacgagagggcgggcggagaaacggcgatcggcaggtaaatacatttgtaatcctcatttttcttttttcaaaatcattgattttgtatatgatttttctcgtgttgttttttttctaaaaagtggtaaaatcccttttctgaatgatgtaaaactcataaatagctttagaggtggctattaaatgtatggcaattttacttttgttttcctattttttttgatgcgatacaaccatctcttagctccgtttccagaacatttctcacataaattcgttcagaactccttcaccaaagacacattagactgaatagaagacagcagatgaaaacaaattcagtaaccacaacaacagccaaaagcaaaccaacggaggaaaaagaaagggaagcgacggaaacggattcgaaatgatatttaatgccacaaaacaaatggaatgattttttcttttgagatgaagagatttaaatttccgttttgatgagtttggcgaaagagagaaacagaaaaagaaaaatgtacgaaaccaacacaaaatgatcattttcagagtgcacagaaatttaagttaacacaatgaaacaacacacataaaagaaatggcagatgagcaacagcagagaatgtcgtacaataataattaggtgtttttcaatgattgaaaagggacggatgagcaaaaataggttaaataaatgagaggaattggttggcgattgtatctgatcatgtgaaatgaatgaggagagaaaggaggggtaaatggagaaggga

SEQ ID NO: 8347 - DNA, 1223 bp, Heterodera glycines
  unsure (1)..(1223): unsure at all n locations
ggggttccacgcatttgtccatgttccatccaccacatcatggncatatgtctggagtcaccaccgaacccgttgtcagcagtggagcagcggtacgatttgagacgaagttttcacgcatttatccatcgctcctgtaaaaaagagaaaaatttatatctattagtttattatttgcttaatgaatgacaaaaccgaccaaggtattggagacggactgcgtttgtacgtaaaagttgtgtgccattgtcggtgacaagaattgccatcggttgttcagcaatcgcttcgcacacattgagactctgttcatcattcacaacaatattccgatcggttggcacttcgttggcgttgagtttgacctgaaaatgccagcaattgaattttttgatggaatgtcgtgagcattgggccaaactcacacaaattatgctgatgttatccgcgcggagagtgctccatcgcttgaaggcatattgcagcagacactgcgcttgattcaacggcaagtcgacgtcgaactgacaatggatggacaattagagcaacaaaacggccttgagacaaattggatggaaattttgacatttgtggggtcaaaatttcaaaaaaataaggtagcctttaatgcattttgttaggaaaattgattaaaaattgtcaatttttagtagaaaatcttttttaatttctttgagatttccagggttaatttattcgaggccaggaaattgagtttccatgtgatatttaacccatcgttgtgcgaggtgtacctggtcaatgtcaatgagttggtcacaattattttcgtccaccgatggcgattcgtttccgttgcaggtgaaatgttttgagcgttgttcagcttcacgcaacgcttcaataattgcacgaacaccaaccactgttgtgagaccatcggttgccacgacgacaaaatcgtcggtgtgcttcagttcaaacacatccacgtcaggttcggggctaacctaactcaaaaaatacatcaaaattcaaacattttgggcacaatttaaaaataataatttaaaaaattgttcggatcagaaaaagattgaattaaactcacaatgtattcattgctgatgggattcaatgaccaaaagtcgcccaatgaacgagcgacagccaaaaaaggaatgttttcagtggcggtggaacgccggaccgggccacgatggcctcgcattggacgc

SEQ ID NO: 8348 - DNA, 2321 bp, Heterodera glycines
  unsure (1)..(2321): unsure at all n locations
attaaaaatntattattatttaccgaaagaattttacaaatgaagaaaattaaaatatttaaacaatcgaaaaacgctaagaattgacaaacttttgtgaagtaaaaaaagttattttaaaaatgagtgattatcgatggaactttatcggctcaaataataattaaattcaaataactaataatttaaaaatagaaatattgaacaaatccaataaaggacataacaaattcactcgcattataatcgatatttttaattaaataaataatttaaaaggcaatttagcaaaaagtgatacataaaaacaaaagattaatgaaaaatattaaaatcagatttaaatttaaaaatgcagagctggtttatataaagaggtcatatttgaattaaaaatgttcttctgccaatgcttgcattttccgacagcctaggtatggtgaaagacaaccaaattacaaatttatagcaaaaaattcactgaaaaattaaatatgtcttaattgaaaaaaatttaatttttaaaacgaatgctttcagtttattatttctgttaacaattacactcaaaattgcataatggaaaaattcttcgaatttttctccccacaaacgagaatttaaaaattttatgggtacatttttgaatataggcaattttttgtaacaaagtgcactcaaattttcaaattttttttcaaaaaatttcacttaggaaaattcccggttggtcccagtcccggacgaaaatcgaggtcccggtcccgacttttctggtcccggtaagtcccggtcccggtttttgtcaaaattcccggtcccttgcaactctaatattaccttttttgctaacttgctatagcctaatatgcacgaaaacgagtttttaacttggtttgaagcttttatcttgaactttttggtgcatttttttgccttgcgatttatttttttgaaaaaacggtaaattttttgaaaattttgcaacttttcctaccatattttattacaatttccaaaaaattttccggcggcgattatcggcaccgccggaccttcagtttaccttaatttttgaaattttaaccacaaaatgggtagaatttgtcattttttatctgagaaaaagatcgaaccggaaaatgcagatttttttttgcatcacaacctcaaaagctattggtaaaattaaaaaaaaaaattcgcttttcgcttttcgcatttcgctttttatttttcaatttagcccatccctggtatttaccattcagttttacagtccagctattacacgtaattagaggttaaattgagaatcttgtattgtaattacgaggagaaattttttttttactaactataaataataataaaatacttttttttataaaattaaatatttttcatttaaatttggtttgatttcatttaatttcgcattatatttctctgaatcgtttctaactttttaaatataattcaaattattaatatttttttacgtctattaatattgagaaaatttttttgagaaaaactttaattttttcaattttattttcccattgaatttgtcttcgttcatccgttgatttaatttagcagcacggcttcttcccccctccctcccccgccaaacgcccagcattttttgtctgtacttatgtgcctaatccaccaaaattatccgagtgttttgcaaataattctgctcattaccatcagcattttgataaacgaaccaaaatttgtctcaatgggcaggtcagattttatataattttttttttttaataataaattaaattattccaaaaaataatttcgattggataaacacctaaaatattagctaaattattggtttcttttttaagtgatccagtatcggacacgcaaatcctctcaacattgctcaacagaggctatgactggagagttcgtccgcccggcactaatctatccattcctggtaaaaataaaaaataataatttagaataatattaataataataaatattttttaaaaattttaaattgcaagtagaacagaaatatttatcattatggtcgacatttaagttttaaactatttcttgtataatttttgattaacggagcataatctattttattcggacaagtatttggtttgagcagagaattattttcaacgattttattgatcattgcttttaacaatttataaatattttggattaccttataaaaaaagtaaacccatttaattgtaaaaagctttactccaatatatccgcacgaattttccggtttttaatatttcccaaatttatactaa

SEQ ID NO: 8349 - DNA, 1595 bp, Heterodera glycines
aaaaaatggatttaaaattaattttattttaaatattttcagttattatttgttgcaattgtacattccgtcgacaatgttagtcatcgtttcatgggtaggatattgcaccttaattatttaatacttcatataataatcctcacaaaaagaaaaatttaccattttaaatatttttaaaaatttatttaataattgtttattatttaaatgaaaatgtataaaattatttagagtttataaattaataaaaatattttcttactttatatcttcgagaataaaatttattcaaattcaaaaaacaatttgttggtgcatttcattttcctttgggtgtccttttggttggatcgcactgcggtgcccgcacgggtcacactcggtgtcaccacactgctcacaatgaccacccaaacatccggcatcaatgccaaactgccaccagtcagctacagcaaagcgatcgacatttggtgcggaggtaggccaatcaacagaatttaaagtctcattagcgagtctcggggcttctgacggtgcacccttctgaccagggaagggggaggagaattcacccagtgctatgacgttagtcaaaaacatcaaaatgggtgttagtcaaaaaaccatcaaatgaaaagattttttcatataactttgctcaaaggcaacgaaattttaaaatcttgttgtcattcgttagcgctaagtgttttctattattctgcaaaatttcaaaaaaatttattaagtttcagaaaagttatgaccaaaaatgttcaagaaaacctggttttttgagtttctcaggtcataacttttttgaaacttgatgaatttttttgaaattttgcatgattattgaaaacacttagggctatcgaaaaatatcaagtttttaaaatttggtacattttaggccaagttgtgaataattttatgtcacaaattttccatttgatggtttttcgactaacgcccattttgatttttatgaaatcctctttggtttttcttacaaatttgtttgttttctttttttttggcaaaaaaccgcgaaaactgctattttcgcccacagcgactattataattttgaaaatttacaacgggaaaaaaggctttgaattccccgattttttttcatttttaaattctccaattatcaaatttcttaattgaaccccagcaaataatttcccaacaaaaaataataaattcttaaaaatttattattttttgggcctttcaatgactttattaagcatgtttggccttcattttctcggcactgcttgagttcgcttgtgtcacctatatttcgtcacggatgttttataaaagtttgtttatttaaacacgcaagctcatttgaaattctcaaatttcatcatgaattagaccggatttccatggacaaatatccagacatggattataaatattgacgaaaaaatctcaaaaatgctgaaacatgaataaaaaattgtcaaagtatggaaaaaatttcccaaaattgagttaaacaattaaattttggagactgaatgagaaacctgttttaattacgaaaaaaaatatatataattcaa

SEQ ID NO: 8350 - DNA, 3985 bp, Heterodera glycines
attaattaagatgtttgtgtattttattataaaatataattaaatttatgcgcgggatccatgatttatttttttaactaattttttcacgtgctgagtcgatccacaaaaaaaactcagtgtgggcgatccacaaaaaaactcagtgattgattggtcattttccggaagcctatcgcaccactttcgggcaccaaaagtgcctgatccggaacccggaccggcccggttaagaacaattttttgttcagttttttaagggctatctcccaggccgggtccggttcttaatccattcacttggagcccgtcatgggtcgggcacatctgccggaggaccctcagcctcgcccccgaccagggatgtgcgaaaataacaaaaaaaaattttcgtatacgaaaacgaaacgaaaaagggcattcgacacgaaaacgaaacacgaaacgaaaaaagaaattttgaaaaccgaaaacgaaacacgaaacgaaaaaattttgagtgacgaaaacgaaacacgaaaacgaaaaaatagccattttcgtacgaaacgaaaaaaccgaaaattttttaaatatattcaattttaattaagaactttaaaattgtatcctctaactgagggaattaagatcctaataggtggaaaagcggatgtggctctaggacaggggtatgaccgaaaaattttcaaaataagaacatcaaggacaaaaaattattgaaaaattttacgaaactggaaaaaaatattttttgtgataaaaactcaaaatttttacgattttgaatagcatttcgttcaattttttatgaaattctatttaatttccaattcgtaaatttcatttgaaatgaatttcgttttaaatttcttaacttttttacgatggatttgtaaattttttcaaaattatagatacctaatttttgtgaaaaatcgttagcaaaattcatataatcggttaaaaagcgcaaatttgttcgataaatctgttaacaatttgcaatcaaatttaaaaaaatttcccgccggcgcctatcggcaccgccggactccaaaaactcttgtttaatgttcgtaataaaatttagaacgaatctatattagtattttagttaaaaaatatggtttttattgattaaaaacttttcaaaaaaccctgatccgtatacgggtccgtatttttcctgcatacggacttatacggagtaagggttttccgggtttttagtccgtaagtctgtagtccgtatggatgcctagtccgtagtcctgatcctgatccgtattttcgccaaatgtcgctctctagaaaaaattatcaacatttcaaactttagatacaatttcctgtcagatttatacaatacttcaagaaatatcttattttttcttaccaaaaaagtcattcttaagggtgtaaatattttcgtctttttcgtccaattttgctctgacgaaaacgaaacacgaaacgaaaaaaaaaattttgaaaaccgaaaacgaaacgaaaaaactttggtagacgaaaacgaaacacgaaaacgaaactcaaaaagtgccgaaaatgtaggacgaaacgaaaacgaaacgaaatttcgtccatccctgcccctgatggtgaatgaatgaatggacatttggaaatatggacgattaatacatgcatttatgccagaaagttgacatactctattaataaagactaatgagtattgaaatgatgtgcggcaaggcataaaattttttgcaaatacactacaacaaataaaacaaaaaaacaacctctcccctatgaataagcacacctcgccaaaaattttttccaatgcaaaagaaaattattttcctttttttggtggaaaaatcatttataaattttccctttttgtttgcaataattaatgcttgtgttccagtgggccaacttcttgttaacttttgctctaacctttttggtacggttctcttaaacggaggcattatttcttcaacattttcttactcataatttttcattttcaaaaatttttccgtcagagtataattgttttgagttttatttacaattttcaataattttaccagtaaaatataattatcgtattgtttcgggattgaagataaatataaattattaatttgtcttttagctggtgggcttaacagatattttcccactaaacctttaaaaaaggttattaatgacaaatttccggacaaaataaaagatttaaaacgtagaaagctgcaattgtataggaaaatgaaatctattcactgtaatcagcttaaaattgagtataaaattatttcgagagaattaaacagacaaattaaattgttttataatgagaaagaaaccaaagttgtgccaaagggaaattcctgtattcacagacatattcgaaataaattggggcagaatgcttccttgcctccacttgttagctccaatggagtcattgttcatgaaaaagcggataaatgcaattacacttccttgtggtactccggtgaaggtctcaaactttttagaaaatgcgctatcaattttaacactgaatgatcttccccttaaaaaattagctaaaaaatttaatactttgccacctatacctatttttttgattttgcttaaaaacaattctattggaactgaatcaaaagcttttgcaaagtcaatatatattgtatcaacatgttcatcatttggattgcagaataaagattaaaaaatagcattattagcaatacttccatctgcaacacaatgcattgcggtcaaaatgtgtcgtgggccaatgattgatgcggtgcaaaatggttcatatgctgtctcattgcttgctttgtaagctttattttgcaaaatggttcatatgctgtctcattgcttgctttgtaagctttatttgttaaataaattgattattgtctatttatttcaaaagaaaaaatattatttcctttaaaggaaaagtatttttaatgaattaacttcaattaaatttcatatttaaattgccaaatttagaatgttgaccaacttttgaaattttcagtgtttttttctaagagcagttatcaaaaataatgaaaaaattaataaataatgacttatataacatttgagagcgggtattagtcacttttgccacgaaattttggcaaatgttatgcggtgctaattttttttaataatttgccgccgaatagagatgccagccgctttcaaaacatccaatgtttatttaattttgggttttattgctcctaattatttatgcttttattagaaaagaccctcaaggcgttgcaatgtggccatccatggcaatgcgcggtcatcatcaacggtgtatccttttacgacctaattaaaaatcaacaaatattaaaatatgcctttattattatttcaattatctaatgataattgatcccccctccctccttaattacatggctaatttccgtgtcctccgcgcttcgttgttcattgaacgggtcaaagtccgaaattccgcattccgaataatcttgtgttggtggcgacaaaatttgttcgcataatgaaatttttttgccaattatacagacgaataataacagcagcaatttggcaaacattttttgtaagattttttctacaaaaaattaataaacaaaaaaaaataaaaattattttcataagaattatgatatagaatttttgtaaaaaagaagctgatatttataggaaaatagtataaaagaattcttttgctccttttaaatgattacaaaaaaaggtgaattgaaaagccaaaatatttcacaaaggaaatgggaaaaacatatttattttaaggttttactttacgaatcatttatattatttttttagttttcatttaacgaatttttatgaaaaattttgccttttcaatataagaaaaattttatagaatttttaaaatttgcttttaatgattagttat

SEQ ID NO: 8351 - DNA, 3154 bp, Heterodera glycines
cgaataaatgggttatgcattgatcggagcaggtcgcttcttctcgtatcacttcccaccacccctcaaaaaaatctcagaaaattgatgagaaaatttaaaaaatatattttcaaaaaaaaaaaaatttttttttttttaaatcatggtattccgtgccaaataagccggaaattaaaaaaatgcatttccaggtttaaaattgttgtattatagtatattgtttatttttagcaacagaaatgcgtgggctctcgcatgggaacaagcgttcatttcgctgttgaagtcatacaaatcggaccagttcagcgtgtccttcatggctgaacggtcgttggaggacgaaatttcacgtcaatccaacgcggatgcattcactgtgttcctctcttacacgtacgtactaaactcacatccaaacaccaaaattattaaatcaaaactaacaaaaaaaaactttcaaccgaaaagtagggcctaaaagcactaaatttaatatgcaatcaatattcttataattaaaaaaaacatttttgtttgactttttcccccatttctttgtttgtgacaggttcatgttcatctacgttgccatcgctttgggccaatatgcgtcggtgccgggccagccccagtccgtttttgtgcactccaaattcacgctaggcatttgtggcatcattggctgtgtgctgtccgtgtcaagttccatcggactgtttgcactcttcaatatgtcagcggtcagtcagtccgactcattttttacatttttccaatttgccatcatgtttttcccattttttcctcgctagccacccccccccccccctcgaaaaaaaattttaaaaaagacatttttttattttctaactttcttttaaagagagagagagagattttaataatttatttgcatttgcgcattttgttaagacgctgatcattctggaggttgaaccctttttggtgttggcaattggtgttgacaacattttcatccttgtccactcataccaggttaagagggaaattgcataattttttttttttaaagaaaaaatagcttaaatttttttatagcgccttgccaatgatgttgaccgaccgttgcctgatcggatagcacaaatttgtgaggatgtgataccgtccatgatgctgtccagcctttccgagtgtttatgcttcagtttaggtgtgtgcaaaattttttttcgtagtatttctaacgggagcaaccagctcgtttccccccccccccccccccccccccccccccgcttttaaaaaatttctaacaaaggagaggtacccaagtgaccatgggacttccgaatgaaactttcagggtaggtagattaccccccctttgtattataaatttttttttatttttgctaaatgaagcttctggccgagatatgaagcttttcctttttgccttttcaatatcattttcaaagaatgtaaagccaatgtgagcgtcggtggcctggtggttgtgccttccatacttttttcttcttctaaagttcaattccccaaccctgtaaataattattttgtttttttttcatatccaaattagtttttaagctttttaatattaataaatttgaacataatatttttttcatttttattcgacattaattttggcacatgtgataattttggtagaaatgagtgaagcaaaggaatttgtcacaccatgcacatctaatcattataaattccgaacaaaaagtgatttgacagtgatcaggaaaaattgttgggaataaatatttaacgggatgagaaaagttggaaaattcatcattttgtgattcaatgtagccccccttatgccaagaataacgacgaaatgaccgaaattttggagcacaaagttggaaatggattaaactttgaagtttaacaatttcatcacgatggtaaagatttacaggcagatcgtcaagcacaatgcgatccgaaatttttctgacaattgacttccaagttctttaaataaattagaagtcagatctgttttgggaccccacctgaacaaatacaaatcacatggttgtacgaatccggtacaccctggaggtattgtctcgagacatatgttgtccctggcaaagtcagttgatgatgatgggcctgttggtgctgctccaccaatggccgttttcccaaattcgaacaaaaactcaaaatttataaattaaaataaaacattattaaggggttttgaggttgctgaacacggttatgacatccattttgaccaaatttgaaaaccgaaccctgactcgaacaaaaaacccgaaatttaattttcgactaaattcaaaattaagcctaggcttaggcttcagcttaggcttaggggtaaatgtttatctgagctcccaaactcaaaaacacccaaaatcgaagacaatctaaattccgcaaaagggagcataagcccaggagggcgtctaaaaaaacgagaataattagcaggaaaaaaagtattgaaaatttattaaagttttccaattatgtcagaaattcataaccaaaatattcttaactaatcatttagacattttataatcgattttcgttcaaatacgaaatcataagcaaagattgacttattttgacagcagcggcagaaatgcagcgataaagacgaaaaaattaaagagagagagacagagaggggggggggggggggaaaatgagagaaagagcgaaccatttgtccaattcacaagcggaaggaatgaaaaggaagaaaatagtatagcgtcgagaagtgagagagaaactgcatattttgctccctctttcttctctccatttcaactcatcatcaatttctcctattcttttccacttgttcccagccaatcccttccattccttgagactgtacttctcaggatcatttctgtagtacggtttcccggtgggagttccaccttgctcgccaaagcacccgcgatgacgagactcggcgtcgtcccctgagcgtgaagctcgccggggtcgtcgctggaaagcatttttggtgatcgcccggcgttgaggaacgtcggctggccccccttgggggtcggccgcgggggcgacgctctctgagcgggtttaaatggtgcgaaaaaac

SEQ ID NO: 8352 - DNA, 1510 bp, Heterodera glycines
  unsure (1)..(1510): unsure at all n locations
ggggggggggggtggcaacggcgggtggggggaaaatgaaaggtgcaccatttctaacactgataataattttaattaaaaaatttcaatgattcccattttttttaaaacaggcgctctttcgtcaatgccagcagttcaaatgttctcgttgtacgcttcggtggcaattttgctcaatttcattcttcaactcacctgtttccttgcggttttcatttgggacattcaacgccaagaggtaaacaaaaacaccacggggaaaggggggggagaggacgcgcagatctgattgaaaaaatggccaaaaattttattagtcaagcgcctttgaacccgtcgagaaagagaaaaagtcatggtccataaaattgtctggctacatttaggggggggaggggtgaaattcctaaaaatgttggctaattttttttattttttacggctgaaaatgatgcctgtcattagctccaaaattctccttaatgtgtcctgcctaacttttggcgtctattttgtttaataaaaaaaattgttttctttcccagtccggccatcttgaactgtgcggtttttgtgtttcaccggtgccgttccaaccgacggacacggaaagtcggattgaacgatggatgcgcgattactatgcgccggccttgctctacaaattttcacgatgcgctgtggtaaaaattagaacaattttatgtaccccctggggagtttactttatttattaaccctcctcgaatggaggctttattttgggatttgggaaccacattttgggggtgcactccaattttttttgtttaaattaaaatttcaaaaagaaatatcttataaaaattttttattgtttgtccggcgaaatttacacaaaaaataaatatttgttattattattaaaactcactaacttttaagatttttttgtttgccatttggttttcactgtcttccgcaattatgaaccgcataagtgccggacttgatccaaaaattgcggtgcctgaggtacaaaaaaaaatgaggaaaggaaaagcatttaattgaaaatttaagataataataataattattattatttgttttttatttcattttgctaatatattatacaaattaaacccaaggattcatatgtgtacagccattttgtgaacatgggacactatttgtctgttgggccaccagtgtattttgtgctcaagggcgactttgactaccatatgtatgctcagcgaaagcaggtgggtataaaaagccgaaaattttgagtttctaattgtaagacttttgttttggaaacttttattaaaaaaaaatttccgtgcctggtacccgcctttttctatcccctgaaagtcggggttttttccggattcgtagcatacgggcaattanaaaagtaaaatttatnaattaattttgatagttttacaaaatattccaaaaatattgaaaccaattattatagaaatttttaatgacttatgaaacaaaattg

SEQ ID NO: 8353 - DNA, 6603 bp, Heterodera glycines
  unsure (1)..(6603): unsure at all n locations
gcgtgatggaaagggtagcatcccttgctgatttgtcgccaagcctgtcgccatgtgcttncctctcgttgcttcgtttactctggcaactttttgttgctcttcgttcgtgaaagcgacgggaccatccccgttcctgcacattntcgtcgtgctgtgcgccgttgcgatggccctcatttgctgggtccatgttgctttcgctcccgtcctcgaattcgagtcgttgcatttttcgtttccgtctgttctgttcgtcgaccgaaatgtttcgctggagcccctgctaacggcaccagtttgtcgccaatcttttatttgcgccgcgcgcttggggttggggtgggccaagctgaggcgggattggttcccgctcctcttcaccgctctcgtcccttttttctctgctcactccgctcgctgtgccgtaaagggaatgacccccttttttcaccgttcgctctgatgggtctgatgctgctgaccgatccgatcagcgccaaagggggacgagaatgggaggggggaggggtgacaaatttggattggtgcttgagggaattgtgcagcaaatcgctgcttgcttaacggcaccaccgacaaggtttggggaagggcttgtcggacccctttgactcgacgaccacgggtttcgactcccgttccctgcggcggacactccggctggtgggagtccgctttgatcgatgcgcgcttctccggctggtgggagttgcgctgacgaacggccctgtcctttcgtcggacgatttggcaccgctcggctcttccttccttcactgccctgcttggacttgacgacgacgggagttcacacccgtctcttcagctgctcctactggtgggagactgaactgctcgaatttgccgctacttcgggtcactcccgaatttttcccaatggctgatgggaggggaatttgggatccgggagggttgagggaaaagacgtaggcgaatgtgatggagtgaggagggtctttttccctccttaccgtgtcccccgaaaacgaattcgagacttcgattccgacacaaaatttattaaagaagcgatcgacgaattaaaaatgcgtaaatggtaaaaaattgatcgaaaagtccagcaaaacgaataaaagcgaatgatccgtgggggaaggaagcgaagagagcgaccccttgggcagggccgcttaaatagacattcgacaaaatgggcggagtgacagacggcccgataatgcgatgagaaaaatgggacaaaaaatgggcagaaattgtgatgtgaaaagtgtgaacaaagaaaatggcgcataaaaataaaatgtaaattggcagatgtgaaaagttaaagaaattgaaaagaaagaactttgtgcaaaattgttttgcacaaagcttgggccggagattagccagccgatgagaaatgaatttgtaaagaagtgaaaaatgggacaaaaaataggtgaaatgataatggctggtacgattaaatggagaggaacgtgatcaacatcagcgatttaggaattgatgaatcgggaatccgcccgaacgtctcgtcgcctttttgctctttttcttccggtattttttcgtctttgacggtccggcccatgtgctcgtgcttggtcccgagaaaacggactcctcgaacggtcctcctcgtctgtgtcaagttctttcccgattcgttgtccgtccgtgccctggttgaacgcgagcactcgcgcacgccgtggcgggttggcacccgccttctcgtcgccaatgagaaaattggcgacaattattttatacgtcaaaatgatcaattaaatattttatttgaattaggtataataagtaaaggcaaaatcaaggggtggattttacgactttcgtaattccccgaaacatgtcggggcttaaccctagttttaactatgaaatatgcttttgttcaataattgaatatttataaaatttcaatttttaagatcataatcaggaacaggatttatatttttttacctattttgtaaaataaaattttataagagaagcacgaaaaaacattttctggccaatttttgaaagaaaaagacttttagcacaattattttggccgttttatataaaaaagtccgaaatttttatttagaaaaatgcattaaaaatgaaatttcatcaatcgaaagattcaaaaacttcggtttttggcacatataaatcccgtgtcaaatcataataaaatgggttgaatattcaagtgtttcttatttaatcatttctcgttgacgaagggattgtcatttgcttagcattttctgctggcccaactttcaccacggcaattgctatttgagtttttgtgccaatttttttgctaatgattttcggcaccaatttgctacacaatttgcgcaaaatgccaatcacttcttggcgaattgttttgttcagcaacagatagatgaacggcggaataccttcagagaatatcgagtaaaatttgattattgaaattaaaaattaaatatattaaattaataatattgttttttataaatattttttctttataaaaaggcttaccgaatgaaagcatccaagtgatttggccaagtgtgatcaaagtgttacccaccggcaaaaaattcatcagagaacaaattgtaacagcaacatcattgatgatactgatcaaaaacacttggacgaaaacctaaaaattgtataaaaatcaatgaaatatattaaatattaatcactttttaattatctacctttttttgcgagattgaagatatttgtgaattggtgttagtgattgcgttcatcaaaccatttgactgacatttaaagcccattttggtgaggagaacaatcgcaaagaccaaatatgtgccggttagcacagtgactaccatgtaactgtgtatggttgccaaatcacttcgatactgtaaaaatggcgtaattattattttttatcttcttgtacaaaatcgctcaaaaatataagaaagaaaattatactctttagcctaattatgtaatctttttgtctcatacaattgtgccgcttaggtcatcgttgtaggcaaaatgcgggttgacgaaccaagtgccgattacgcttgagaaaatgatcggcattgtaaacatgcagaagtacatgccgtagatgacacagaaaatcatccacagataaatgcgtttgccatgaaacagtactcgtgctgcataaccgtatgccaaatcaatgcagcgattcaatgccaaaaatatttgtgccgtgttctcaacagccgttaggcctacaaaaactcaattaattttattttaaatgtcgagaatttatgctggacatatgctaactgtcgatactattcaattttagcagcacaatgccataaaaatacatttatttattttttacctattgcacaagcgccacagacataaatgaatgtcggcgctgtacagaaaactgctccggtaatggccaaatatccagtgatgattgagcttattggtatcatcaacagatcagtgataccaatgaaaaacataaactaaaaaatatattatttaaataaaataattaatagttaggtggaattcgaagaaaaaataccgtgaatccgctatttgaagctctgctccccccaattaaaggctacctttttggaggggttgaacaatagacccctccaattaaaggccccataaggagggcttgttccagacacgcccggtttctgggacttaacgatgacaaaacgaaacctgatttcagattcgtatatgaccctaaaatatccctaaaattattttgctgctaattttgatcccagttcttaatttttttctgaaaattcgaatttttccagaatgtcaggaataaatcaggtatgcgtaattttcataattaccttgtaacatgtgttactcatgtgtttccaaagactaattaagcatggcaaatacaaaatctataattataattgtttaaatctttttatttatttgtttttaatttacctcactaataatgccaaaaaccatgtataaagcgccgaccaaaaaatgtttacgttgttccaacggaatctgatcaatgtcatagctggcacagttgtacaaacgattgtacagttcgggtttgaagaagaacatttccattttaatagttttttattcaatgccaaaatcaaaaagaaatttataaccttttaaaattataggcacagaaaaaaggttcctaaagactaaaattttctatctactaactctaatgatttcttattcatttgacttcgggaaatgcatttaatgaaatttcatcaagtcaggccaatgtttctaggctttgacaatggctaaaataattacagttcaaaagaaattcaaaaattactaaacattaattttcagtacatttaattagtataatcagcggacagatgttttagatggtgttgccatagggaatcattttaaagcctaataaaattcagtttgaaagtgtcaattatcagttatgccaatgtctctaggcatttcacaatggctaaaataattacagttcatttgaaaattaatttaattgctttattagcggtaatcagcggactataataaattgaatttgtcgaaaaatgttttttcgctcaaataacaaataaaatgaaaaaaaaaaattttttttgaacataatgtctgctttgatctgatgaatgaaagatggaagaaaagccaatctgatgatcccacaattaacttactcatttgaatctaatcatttagaaattttagcagattttataatgaaaatagaaatttaatttatccactggttttatgtgtttatacagctgacaagggatgtgatatcgaaattacaaaattttggctccgaggcttaaaataggggcacaaagaacccagaattcgaacaaattaagaatattaaaatccaaaaaattcaataaacatgtatgaaatagaaaaaaattattgaaataatttatttaaaatattcaagaaaaaataaacggttcattttaaaaagcaagaagtcgttcaaaatcggaatgaaccttttacaatggtctccgaaaatgcgatgtagggcttttgtaataccattcgaatcggggataccgggcgttgtaaaatttaaaagttatttcaaccaaatatttaaattttaccttaacaccatgccaaaataaacctttttttcatagccaactcacttcgaaattggtcaaaaatcataatctggtataaataattttttgatcagggtttccgacccccgacaatttaacctcccccaccgacccgacccccgaaatcttgttgttgattaataaaaaaaaaacagttttgcaaatgttttttgtaaaacaacataataaattgagccaaaattttttaatttaaaattaaatgtatgccttaaattagagaccggacggaccggggcctctccgggattttgccgggactcccggccctggtcccgttttttggacaaaccaccgcgaccgggagtcttggaaaaacgtgtcccggcccgggccgctgttcccgaatccggcatccatttcgaccaatttcgaatccggacccaaattcgaagaaaaagtcgaaaattcaaattttttcggttcatatttttagtctaaaaataatttaaatgttcttttttgttgaagcaatgatgactttcagttttttccgtgtatttaaataaagtgtgagccaaaatgtgcaagttgagtttccaaaaccgctttttagggaaaaaaggcttcattatgaatctgatcatgtctaggtccgatctctttcaattgaactgaatccccttttaccaactaaaaaatatgcataaatttcattgattttattgtacgtatagttttgtatatcaatgatttaaatttttgatgatgattatttgataacaaataaaattgatttgaatatataaattataatttgaatttcatcaatgagctgtaagtgaaaaaccgtcctcatggattttgcgatgaccgagaattttggaaatttataatacaataaaaaaaaatttttttgactaaaacaaaaaagattaaaaaatgaattaatttaccttaattttatagatattttcctagactttattgcatattatttttacaattttggggactatgatcaatattttccaaaatgggttcactattaattaaattagtagatccattattattttagactgaattatattaaaatattgataaattaaattttcatgaacaagatttaagtgacgaaattttaatgtaaaaaaaatttaaacgaatataaaaagcataaaagcgaatctcagagatttacacggtaataaacacacaatttatttgttttttaaatatttgccaaatcaaatttaaaatttggcccaaagttcgcttcgattttgtccccaaggtcgaacaaagagacgcacggaaacaatggatcagctggagaaggaatgagccaattggtagtatctgaacaaaaatgggcctaaatggaatacacaatttatctttcgtatattaagcc

SEQ ID NO: 8354 - DNA, 1847 bp, Heterodera glycines
gtgggtgccgcggattcggaaaacgcattatgaattgcccagaggatctgattgtgggtggaattcgaagggacgcccagggcgttcaaatccgacacgccgaggcttttcagacggtttttttggttgcttctgctggcgatgtttaccaacgattaattgtgagggctttctttttttaatgtattttggttgcgttcaacaattacttttctttcagcgctccaaaaatcacagaatggaaaagttcggcgtctcctttacccaggctcatgccggtgctattattgcggcatggcaacgaaatttcaccaaagtgagtgaaccaatcgacgaacacagccaattctaattgttcagagtatttacgaccacacattgaataaacctgcccagggaattcgcgtggtgcatccgctggcctcaacttccatccaggacatgttggagcagttcagcgaattccaattcttcgtcatcttcatcggctacgtgcttatggtttaaaacggagaatgtcctctaattgtattttggttctttactaacagattatttacgctggttggtcccaagtgcattggcaggggtggtggttttcggtcaagtcgagttgtctgttggccattatcggtgtgctggtgatcactttggcatcggttgccggcctcggcttgtccaccgccatgaatattcacttcaacgcggccaccacgcaaattgtgccttttcttacactcggacttggcatcgacgacatgtttcttctgctgcacaactacaacgatgtgctggaagctgtccgacaaaaagaggtggcggtgttgctcaaagagactggtgagtcggggaatgcctcgggggtttcccttcttttttcgggtcacttttcgtctttcatcctttttctcgcttttctttcacctttaggcatgtccgtgctgatcacttccatcaacaatatcctcgcctttctcaccggttgcattttgccaatccccgcgttgcgttctttctgtggtcaggtggccattctgctcacctccaacgtcctctgcattattcttctcttccccgcgttcattgcgttggatttgcgtcgacgtaaagcgggccatcgcgacatgagcttcgccgcccttttctgttgttgttgcaacagcagttgttttatcggtggcaaaaaaggcggtggcattgaaaatggaggccaaaagcatgccaaaatgatggagggcggggcattcaaaaagcgaaaggtttttattatttaaattattttgtgacagttttgctcgtaatgtgacgacgtaagcaaagaaaagaaatttaagtaaaacaataaaaaatgaaatgcaaaataccaattcattttctgtttttgatccaacttttgccattctttcaaattcaaaggttttccatttgtcagttggaggagtgcagcagtcgcaaccaattggtgaagaccgactccacggtgaccacccattcctccgaaattgacctgcaacagatgagtgcggctgtgttcggccctccctcgtccggcccactgatggcaaatgtcaactttggcccttcctcctcaccaccttcggcctctaacaataagccggtcacttcttcagcaacaaagtcgttgcacaaatggtacacattggtcgggtttctccacggctattacattccgttgctcaggcggccaattgctaaggtaaagggccacaattttctgattcttcgatactctatgaccttttggtcttttacacattttctccgtttagactgtcgttctgttagtagtgctgcgatgttcttgttcggttgcttcggtctttact

SEQ ID NO: 8355 - DNA, 2419 bp, Heterodera glycines
tgctaattgcactggctggtggaaattccatgtccaaatgaattaataattcatttcatttccaggtttatgcgcacttggcttcactctctccaatcctctttggaccgtgctgctaaaattggcatttttcctgacgacgatctcaagaaaatggcggctgacgcgttggcacgcaatttcacactttcagacgactttctattggctagaaagttgctttgttctgctggacaacggtttaactgcacggaaatggtatggtttagataaattttaaattataccaccgacgggaggagaaggaattgcacttttttttgtgcgttaatttaggcccgagactctcgggccgagagtcaatttttttaattctgaattactttcttcaatattatacagcgcggtgctaaattgattgaggacggacggatcaacccacgagggttttacaattatttgactgcttggttctaccaagacaatatgatgtaatgccatttaatactttttaattcaaattcttcgtctttttgtgcaggtattacgtgtcccaagcggcctttttcccgacgcctttgccttggcatttttctgccgctgatgaaagcgttgtgccgcccgccgatccgcttctctactcgcaaattcccttttacatgaatggcctcaccgatacgcagtcaattgtccaaatggtaactatttgagataaaataaaacctttgaagcttacaatttatgggttaccccacatttgcgcctatgtctaaaatcggattcaaacctaattttttcataccaggtagcctaaacagcattaaaattatgaaaacacagtattttggtttattaggagcattaattctcttgttcgaatctacgggtttaattggcttttgttagatcaaagaaatccgtgccatttgcgaccggtacagtgcggacggtcttcctgtttacccttccggcattccattcacattttgggagcagtacctgaagctgactttttatttggtgtccgcgattttggttcgtttttacacccattatattatttgacctacttaaattaatttagattattggagttgctgttttgttggtcatttcgattataattgtaattcccgccacaaatgtttttccaaatacccattttccaagttcaacccttgggcagctgcaatggtggcgataatcgttgttaccatgacggttgagttggccggcttcatgggcgtattcggcgtcaaaatgaacccaatttcggcagttacgcttatcactgcagttggcattggcgtcgaattcactgctcacgtcgtcttggcttttttgacctcgcttggctcgagggatgagcgtatggtcgcgtgcttggtatgtttttgttttgccagtccaaatttggtatttaatttctctgggcttaggaacacatgttcatccccgtcatccatggcggactgtccactttgctgggcattgtgatgttggcattctccgaattcgacttcgtcgtcaaatacttctttgtcgtgatgaccgcattggtcatcatcggcctcatcaatgggttggctttgctgcctgttttactttcactaattggaccaccgtgcgaggtttgcctgtctcttttttctttctttctgttattaattttcctctcagatcactcctgtaaatggtagcaatttgttgccgtgtccggcgtctgaacggtatcggcccgaagacagtccgaactgcttcaccaccccttcgtccacccatcatcaacagtcggacgagcaaaagagacgacgagggtgtaaacggatgttagcggtggacgactcatcgtcggcatcgtccactgaagacggtgctggtgcaccagcattcagcaaatctgacgaagatggtgaacaccaaaagcagcagcaatcggtagactgggacaacacagtgactaattaatacaatgaaatgagtcagttgaacagccatcgtcagcacgattaccacgaatcattgtcaactttgtatgaggcgagtggggaagaaagggagcagcaaaatcagcagaacacaccacagccgaagagcaacagtggcagtggaggagggggaggggaggaaaccaacggcaagacgagaagaacagcctctttgtccatgacaccagccgaccgaagattttgaacgataaattatatattgtagtaatacactttcagacacctcggttatgcctattttcatgttctatatttctgttcaacttttctaaatttttaattcatttgcaaacacagagcataatgagattgttttaaaaaactgaattctttaggaataaaatacaaaattttaatggtcatttagctcaacgaaattgaaagaactttaacaatgaaaaatatggaga

SEQ ID NO: 8356 - DNA, 1954 bp, Heterodera glycines
  unsure (1)..(1954): unsure at all n locations
tgggacttataataacagcctcttctgtcctaccattggaattgttcttttgcttggtttgtgaatttcctcgaatgtttcttcgtccgtttcagtgattgttaccgtttcttcgacatcggccaaaatctgaaggttgtttggggattgttgctgttggtagtcactgcgtcgcctcccccccccccttcgggacataatttctccgatgaactattaattcccattattagttaccatgttcaaatgttggtcgaaggcatgcagtcggccgcggagttcgcgttcctggcgcagctttacataaacacgctcgttaaggctgagtcggatcaggtcaagcggttcctcaacagcgtccaaagttgccatcgaattgtcacagtaaaaattgaaatgattttacaaaagggtaaaaccagagaaataaggcacaaagtgcactgattgtgaacatgtgaaattcccttgtaagattgagaagaatttaaatgtaacattcaacaaataaacaacaaaacgaagcaaaaggattatcgttttcttttcctttctccgcccatccgagtgccattgggtttgccactttttctcttttctccgcccatccgacgagtgccaccgtttttgccattttttctcttttgtttcggtccgtcctttctctcactgttcatcctttctttgggattctggctcttttctctcattttgccttttcgtccaaaagtgttagcttttgccttatttgtcctcttagtgccagtttttgactgtttacgcatatcctgaaataaaaaacgaattttcatatgattcaattctctttatttgggacagcctccgctaccgctccttacttacttttagaaaaagatttattatggaatcatggaattaagcactttactatagccctggaccgtagagccccgctccccccggtttgtttggtgtgactccttcagccacctttttcattcgtttgtccaccagtcgataatgtccgtccggtcggctcattgagcctcgtttgcctttggtgaccacttggtacgtcactttgcgtttctcatttgagcccgccttcttgtatagcctgcagttatttaattcctgccaacatcaccaatttcttggcccgacctgcgcagttcgcgcactttctccccatgctccatttgctcattgtccacaattccctccgcctttttcttcgccttttccatgcgtcgtattcgccgttgtcttttgcgtgcctttgcttccgccactttttttattggccttgtgttcaattcgcgttgttctcgcttcgcgtaaaagtcaacgcgttcctttagttgaaatgcaattagagaaattcaaaaagcttctctctgaatggcttatgctaattagttactcactttgtctaccgggggctccaactgacagtggcgtttctcgtcgctgacaaaccattccggcaatgcttcatcgttgcttgtgtacctgatcaaatgtacaacaatgtaccaaacattttaatgccaaataacctattccaggcccagtcctccaagtcctgtgcccgctttttcgagtaaatcatttcctcgcccattgctaattgctccggcgttaacttcggctttttcgcgcttttggtgcccaatttatgttcatctgaaaaacaattcggccatagcaacttgtcgggttcgcttttcccaccttcttcctcaattgcttcgtttagtccgtcatcaaattccttctccattttggtcatttttgtcgttgctttctcttcgtccttttcctcttcatcgtcatcctcatcattgctctctttttcctcctcctcttctttaattcccttcaccgcttttgccgcacgttccgctaaccttttcaccgtttttaaagaaaacagcttaagattcaaaaagntgttattccgccaattggt

SEQ ID NO: 8357 - DNA, 1769 bp, Heterodera glycines
tttatgatattcgaaattgactcatcactttttcagcgttgcttttccttcggcttttgctgttctgatcagatcgtcgatctcttccaactctttgaattcagtatttcctccaactcctcgccagtatcaccctccaccatttcttcagccgattttacactttctttagacgctttttcctcctttttctgttcgtcaaccaatttcttacgccattttaaaatgcttctcagttcggcaggtccacaaacctaaacgggtttttttctgttagtattcactatatttctcattgtccagcttgtctctgtcactaactcactttaatgtctttcaaacattctttgatttcattcgtcgtgtgttcactgttcagcactctttctgagtcgagcaccttttaaatatgaaatgtaaaacaatacgcttctaatgatttgtccagcatccaccgaccaattccgaggcccggctaagcaattgaagcgcatttttggacgttacaaattcggttgcgcccagtccgctgtgttggccaagcaacgcgtcgtttccgtagccaagtgctttagccttgcgctctttacggcccggatgcaaaaggagtcgttgtctttggaataagaaaaggatgcaataattcaaaaaaaaaataataatttatccattacaaattcttttcgctttcgtcaccgcctccatccgtttggtcagagaacacttttttagaatccaacaattccgatggaactttgtcaggcttcgagtattgttcacaaacaacaaaaatttcagcagattcgagccgagaagcggacggtttccaaacatggacccaaaattaaaaaaaggaaattacttttgtaaatagcgaaatttaaatacttttctgaacaatttttcaaagacaccaatcaaacattgcgagtcggctgatcgaaaaatctaaacaatacaaaacaaacaattaagaaacgaaaagtattcctaattataattactttactcacgaaaaatccgcccttgcgcaagacttgggtggccaaacgaagcgcgtaaagtgacaaacaattctgctgcaatgcatcctgcgcccaattggatccaatattccgtgcgccgtcgtgcaacacacaatccgcctcccgagtgcccaactcttctgcgcaccgcatgccgagtcacaaaataaggaatttaaaaaaatcaatttttgaaaaagggcggaaaaatgataacattttgattcgaaatgaatgctgctcgtgtcccaccttttcttcgataatgactccctgcaaagtgatgcaatttttagatcggattcatgcgcacaagatcaactcctgcaaacgaaacgacttaagacaaaacattcgctctctcccaccaatcctcagggaagagactggcatttgctgctcggccacttgcagccaaccgccaggcgcagcgcataagtcgacgagggcacgacagcgctgaaggaattcgaagcgtttgttaagctgcagcaatttaaaagcggcacgtgagcggaagcctaaattttcgggggcataaaaagacgtaaattttgtcaaaaacagatgcactccttcacagaaacggacccgcttctttggccaagaagtagaacttgtccttccgctgcttcccgattttcgttattttgcccattcttaatacccatcaattaatgcatattccaaaatgtagtaaatataacagcgaaattttaactacttgaaaaaatacatgacaaa

SEQ ID NO: 8358 - DNA, 1522 bp, Heterodera glycines
cccccgtcgtcagccctattcgattcgattgcgtccgcgcttcggcggaagttgtccttcgctatcgacagcgcagccaggccgtcaattcttctccaatcactcccacccaaaatgaccataattttcgtttaattgcccttttccttttgcccccgcgtcgctttgtccgaattgcgcctcttttcctctctctctctgatattattcctcctcaatgagtgctaatttaacattgagtaacctcaaaaggttgccctccgctgagggatttcccccaaatccaatcaaaacctatcagttgcgcgagcggttactcaacagctccaaattccctccccccgcaattcccacccacacatataaattaatcaagtttttgtctctaattatgtggtaaacaggaaaaagaatattgtcatacgatagcataaacaaatctctcataatgtgcctaaaaaataaatgcttatcaaaaaaacaattcttaaattaggaagtgccctcagggaaaacattgcgccgacttttgccggttggccttttctctggcgatgatctcctctaattcgcattcccatcactgtgccaatacctcatcaccatccctttcttcctcctctttctcttcatctttctcttcatcttcctcttcctcttcatcctcctctttcgcttcatcttcctcctccttctcttcttttttctctttttcttccctcctttttcttccattttccttcttcgcctttcgcttcttcttcctcatccttttcttcacaattcccagcagaagtgctttgtcggggaatatcggtgaacactttgccgcaagatgtgagtttgtggggggagcaaaataaaaatatgacaaatgaaaaacgaattgccaaacattctttttatgtgaattgtgcgtttgagtgtaataaaactatgaaagaaagggaaattagcagcggacggaagaaggactaaaataaaaaggcgaatttgacaaaaaaatggcaaaaaatgaactgcaaaaccagaatttggaccggaataattaacttttgcttgattaatgatgggtttttgacacattttcagacggtccgccgcgcttcaaacaaaacgtgcgtacccatcaggtgggaatggtgaatggcagcgtttttctccactgatcattctccaatcacccaccccctctgatcagttcgcttatctcggcgacaccattcgcttcaaatgcaatgccatcggccgaccgcagccgcgcgtccattggtaccgcgacggacgctacctgaactacagctttctgctgcgccacccacgcctgaaagagcgcggcatgagtttggaagtgaagcaaatcgaagtgggagacagcgtaatttgggggggggggaataaagcggacgaaaaacggcggaatttggcagggcaattggacgtgtcgcgtgtggaacaacgaggggtccacgaacagaaacttcacgctacacatcgtcggccaatgaataggcctactttt

SEQ ID NO: 8359 - DNA, 2028 bp, Heterodera glycines
cagacttttgtgactatttcctcaacgtgcacattcacccgcggcgtgtccccgaggaatgcctttgccaatgggccgtccagcggcgcgagtcgctgcagaatgccaacaatgacccgtcgtcccacgcgcgagcactgccccaactccgtgccgatttggacctcagcgaatttatcgcaaacaatgggagcagatgcgcacgatatgcaaaggtggaggaaatcgcacggctgaggacacagccgcgggaagaagcgccgaaggggtggacggagaaggaaagtcggactgacagcacaaccccagcgagtagcacaagcaaacccaaacccagcagcacaagcacaagcgcagcaaaagtgccaacgaataaccccaccggaggacagggcacaaagagtgccgtgaagtggacactgcgaagtgagtgcgctgaatgaccatggtttagacccggtcaaactgttcgaccatctgctcgaggagggggtccccgaagttacgcatctgctcccggaactgatcacccccggggccatggcattccttcgggaagaattgcccaaacgatggccaaacaaaagcgcaacgagttcagaattgagcgccaaaattcgtatggccaacaaaattgtgggggagatgaagcaaagagaggggggagaggaagcggaagagaagggggaggagcagggaagtggggacagcggaagaacaaccgagagggcagcgaatacaacgacggggagcacgacaacgccgtggacgagcccaacgacgcgggcgcctcccgcatgggcggcaaccaaacaatggtcactgccacagagaggttatatgggggggggggggaaactctcgacacttcttaactcacgaacatgctctaaagtggtcacttttgcgtctctcgcattaaactctctccctctgttcagtgcccccatactttcgccaattggatgaccattcgctctctcacattgtcatccccgcggggcgtacgctgaaactttcttgtgcgttggttggctttaaaacggtgaataattttaattaattgcatttgtcattttgctgaaggcaaagccggcggtcagcccgaaccgcaagtcgtgtggagaaaaggggacgaagagattctgaggaacagcgagagcagaacgggctcactgttccagctgaagaagtggactttggagttggaagacgccacggaagtgagggaaaagggcaaaaggaaaaaaagagaaaaacaatggccaaaagaacgacagcggggaatacgcgtgcgaagtgttcaactccgccggactgatcgtccgccgcttccgcgtggaggtgcaggaccgaatccgttcccggcccattttggtgccgaatgtgctgctgaaccaaacggtggacgtcaacggcaccgtagactttgcgtgccaagtgatctccgatttggttcctcacattgtgtggataaaactgatcaaaaacgacggcacttttattcgatgggacaccaaacggcgccagtacaccttcaacttcatggacatgagcacacacaaagtgcatataaggggagcacaaattgaagagaaatggccaaattgcagagaacgaggatattccacgaaaaacagtcgaacaaatacacaatggaaattgccaatgtgaccatggaggaccagggcatttactcgtgcgtggcgggcaacacactcggcatggttagcccgggggaggcgatgaaacttttccaaaccagggctgggccataaaactcgaagccgaaattcgtagttcgaagccccgcgaagttttgagcttgaagcatgaagttctttaaattttccctaataaaattttagggggaggtaattaaaaatattttaaaaattcattatcgtgaaaaattattgaaaagggaacggcaatagcaactttgagcacttacggtgccgatggtattggatccgccgaggggtgaaaagaaattttgatcatgttccttataagatttataccaaa

SEQ ID NO: 8360 - DNA, 1195 bp, Heterodera glycines
cgcaaagagagggcgacttttggtccgatttgacctcgtcctattccattacggttgagcccgtcccgatgggacggcgcgaaagggcggcacgcgcaaagggcggcggaagcaccggcgatttggtgccgctgatgggagacgggcagcaaagtgcgcaaccgacgccggggccggaggaaggggcgggggaaacgtcgccactttcggagtacgaagtgccaaccgacgcggcatgggaagtgggaagggaacggtaaaagaaggggcgggatggagaagaggaccaaagccaactcacaagcagactccaattggtggacattctcggagaaggcgcattcggcgaagtttggcggggactgttgagtccaacgggggatgaggacggcactgagccggtgggagggggcggggaagtggcgaaatgctaaatttaatcaatggacaatttaagatgcccgtggcggtgaaacggctaaagtcggcagcgcaggagagagaactgatcattttggtaagccattaattaagagttgggaaagtattatcaccagcgaagcgtgatcagaatttttgatttgcttttattttttgtgtttcaggtgagtgaaatgcaaattctaaagagcattggccaccacccgaacattctccggctgatcggctgttgcaccggccttggccctctgctcgtcgtgttggaactgtgcgaacacggcaatttgaaggattttctgaggaaacatcgcccggcggaagcgaagagagagcaaagtgtggagggatacgaagaggaaggagagagtacgacgggagcggagggcacagtgaaagagagcgaccgcagcgaaccgaaacagagcccatctggcaaaatgtatcaggtgattgagaatggcacaaagaagccattgaaggaaccgtctgtttcaagaatatgctggacagtcccggcacttccgtgccaatgcccagcacttccgcaacttcaacggcaccaattctgaacagacagctaacccttcgtcatttggtcagattcggcgccgatattgccaagggaatggactttttggccagtaaaaaggtgatctgatattccatctgattacttttggtcttttggcattttctccagataatccatcgcgatttggcggcacggaatggtcttggtcagtggcaccttccg

SEQ ID NO: 8361 - DNA, 339 bp, Heterodera glycines
ggttggaagcgtcggggttcgggtcggggttaaccccgaaaaatggccaaaaatgtcggggttcgggtcggggttaaccccgaaaaatggccaaaaatgtcggggttcggggtcggggcggggtcgggggtgcaaccctaaaataattgacagaaaaaaaacatttgtaagaattatgggcgaaaacgacttgccagactaaaacgaccctctgactaaaccggccagactaaactgacccggtccgccataatacataggtatggcattgatattgaattaattgtaatgagcctgtgtgggtaagcatgcttaatcgaatgaatattcgttaaagaa

SEQ ID NO: 8362 - DNA, 2165 bp, Heterodera glycines
tacgccatgtctaatctcgtgaaaggcgctcaatatctccctagcggtgggttaataaaacattcattattacctaacttctatttatcttttttttaatttagcctcaaaattccgtttctgaccttcggcgatttggcggaacaatcgtgcaaagtcagttttggatggatcaaaaactatggaccattggcaaagtttgtgccattctcttttcatgaatccttgccattttcaaggaacattgtcaacataatcacaatcgtccaccaattcggcatctgcagcatgtactatctgttcattgcatcgacctttcaaacggttgctgtgtttgtattgcgtttatcaaaaccaaaactttttgcaggtctttgataaagaaaaagctgacaatgagcccaagggaaaagacccaacatggtttctcgtcatattgcttccgattgtcgctctcgtaagtggatgagtcatttgttaattgctgtgcactttaacaccttttcagaattccattgtgtccatgcgtatcctctcaattatgtgccttctcggaaatgtgttgatgatcaccagtttgacactcattctctttgttggtgttggcgttttttttcaatttatttcttttcactttcagatgctgtcccaaattgtattcacggaaagagctcattccattccgtttgccctgccatccgcagaaggctttttcaaagcgtgtggtaccatcattgtctcttgcctcgctcagtcattggtacgatgtcataatgttgataaagtagtcacttatcttcggttgtttttaggtgcttcctatggagaacaaaatcaaaaaacccagtcaaatgttgggaccctttggcgttttgtccggtggtatcgctatttcgactatcgtttacgcaattgtcggttttctcggctatagtgcttatggagagagccttcgtgatagtgtcttggaccatcttgaatgtgttaggtaagtgtggagttttgtgcatcattgtatagcaaatttcttttttcagtaacgcaaaagagttgactgttttgacttatatcattcggattgccctctgtctgtccatcttcgcttcttttatgctccaaatgtttgttatcgtcggcgttttgtggcctctactcgaaaaacggatcgaaaaactttctcgtatttggaaaattggcattcaattcatctttcgggctattttggtctccgtatgccgtgcgttttgttttccaatttaatttctattcacacatttttagtggccatttcttattccatcaataatttggccgctatcattcgtttgattggcgttaccaccggttagtcgtactcaattttcattcccaccaattcatttcgcaatgttttttaggcactctcctcgccttcgttttgcctgccattttcgaccttctcaccttcgtccctctttttcgcagtcagaatcgccttcgcgaagcaaatgttcggcttggcataaacattggtattatcggtttcggatttgtcattcttgttggcggattggtggtgaatgtcattacgatggctaacaaagaggaagattggaagtgcgctgcaaatgctacgactagcggaaatgtcacggcgacaacgcaatcgtacaccacaccgatttaattatcttaatcgcatttgcttaatatatattgtatgtatgtatatgtgtaatgtattggctaataaaaaaaacataaggtttcatacgaatgagttaaatttacctaattgataattacattaatagaatcactgattggaatgtgtcacttattttttaatcttcccattgccgaatgtcagcatttttatcacgatatttgtccattttgaccaattccaaaacccggcctcaattttttacctttttccatttttagccatttttgctcaatcattcagcaaaagttgttgttccttccttatcggaacaacaatcgccacagtctgcgcctcgtttagtgtcttttgcatttggccagggggagggatgagtaagcgcatttatggcaaaaggacgaaatgaataaattaatgggcgaacagcagagaaagtgacgaaggatgaggggaaacacagagggcttaatcgaagtcgttgaatatttggtcatttatt

SEQ ID NO: 8363 - DNA, 2302 bp, Heterodera glycines
cccccccccccgatccctttgttggccaattaattaattaattagctgttgccaatttctccgttgcacttcccccttttgtgccgtcccctcaactttccttaggaatttccctcccccctgtggagatggagatttatctcttctgttgcgctttgccaataatcgttacgtgacttatcacttcttatttagcggcttaccgttctctccctctcactttgccaacttcggatgaccaaaagtgtgccgagtccctcccggcgtccatccgttggccatccctcctcctcctccctttccgccccctctccgatgcccaatgaacttcgtaattcttcaaattctgaaaattgcccaatccgcgcgagttttggtaagacattggcttatttcttgcctttgctcaacacatttacgactctttttcttcagaaaattagccattttgaccttaacggggaagcaaaaagaaaacacatcaaaattgaaattgggcgaggagagagagagagggagggggagagagagtgggagaaagagagggggacggatagaagagaggggagagagagaccccacacaatttgacggagtaattagtttttactggccaaagcaaaaagcgacgagggaggggggaggggtaaatgcgaaaaatggatccctaaggaaatttgtcgggacttatgggtttaaagggggcttaacgcctaagtaaaaaagcaaaaattgggtgggaaagaaagagacgaatgaaacggaaaagcatcagaatggctaaaaaaacgccaaatttattagcagaaaatttaaaagccgccttcgttttctctcagatggccccacaaatttcgaattgaaacatcggcacaaccaaagcatcgatttgtcctcttcactttcgctgttttctatgcccaaaattccgtttaacaacagcagacaaatgcccatttgtgcgcagtgttctcgaggtgaatgagaatggtttagtcggcacgctcttttcggctttatccgctgacattccatcccaataaatatgtctcagctaatgaatgaaattatccaccacttcctcccgttttcgttccattaatttcttaaatcacaaatccctttttggtgctccatttctaatccattgaatgtgccattcattcattcaccgtctgcgatgaatgttttgccatctccgattgatccctttaaaacatttcagtgattatcgacccattcattttgcgtgttccgcccaatctcgagttccactcagattgccttaaggtaataaatgggggggggattagtaatgccatcgcgtgatccaacaatctctccgccttcgattaagcattcaaattgccccggctttcctgtcggctgtcccattaaatatgcaaaatgcgcgatgccaacgaaaaggaaaatgcaaaaaattctttgagataatttgacactttctagagatatgctagagaaaagggaccaaaagccatttgatcattttctgtgatcatttcctctcccttttttttgcccctccccctcaaaaaactcaaaagcaaataattcaccctcttctcttcccccccccctcgcttcactccctttttcctccgctgcataatttgcacttttttaccgcgcggtgtttgggcgagacttcaaaatcaacatttttgcccgaaagaatctgacaaagttggacgattattgctattaccgggatcttctcaaaaattatcgaaatgctttttcatccattgtttgtttttatgaaagtgatcagaaagtgtcggtgggaagcgccgctcaccgattgtggtgggtggtgggtgaccttgatcagatggcatttgatcatttcggctgaactgtctttgttctgtgctgcttcctgtgggttctttctttcaatcatccttatttgttaggtgttttgtggattccctcctcaaactgttgctcattttcacccctttcattcttttcgaaaaggaacaacggagacggacccccccccccccccccccctccaacagtttttgggtataattaattcctttcataattttcggaattgaatgaatttgatatcattcgatagccccaaattgtctccattttactgcaaaatttcaaaaaattcataatttttaaaattaactaaatttttttttaaatttttcagaccgatagagaacacttaaggttatcgaatgattccaattcattcaattcggaaccatctcttttcacctccgccctttccccttcggtttgtttcccttttcct

SEQ ID NO: 8364 - DNA, 5040 bp, Heterodera glycines
  unsure (1)..(5040): unsure at all n locations
ggggatggctttagcacttatttgtctatcccaagcattcacacccggattaggcgaaccagccactatacagcaanncacagaggaatgtgagacaaattcaaacggaacggaatgtagtttcaattctgttaccctagtaaatcttctcccagtcggccaacccgtggatttactgataagagggccagaatccgtacttttgggaaccatgaccttcacccttaagggattgtttcaggaatgcattcccgagtccttgggctttatcagatcctataaaattgaaacattagggaacaaacggtgccctggaatggggtcctgcaccgggaaaaattgtgaaaatctgttaacagatcagtctgttcccgaattagccgaggcgaataattatcccggaaacacctactgcatcgatagtgggtcgttttggtttaatggctgcggagggaccaattccgcttgcctatattatcggaattatgctattcccactaaacacggaaataaatttatttacgaaatattcagatgtcctgcctggtactttaggattatgttaggggtaaaaattaatttgcatggaaatgcatcacattttgaggaaacggtcctatattcgggccacactttccatcttaaaatggcaaaattatccgtaacgccagccgtttttggcagtcccgccgctcctggattatccggcatattcattggaggccggggcaaagccgcactcgtaccgtcttttcaaccatctctgaattgtccggatgaaatatcggcaaacttaatgcagtgcaatctttccctaaattcttgcacaaagtgccgaccggaccacagtgaaggcactgtccgctgtcattgccgcgaaacggacgttgaaaaattgttggaagatccaacgactaaattaccgttgtccattggcccatttgtcctaaattaccgtcaccctaaggaaatttgggccgaaacagtttttgtaccgatccaaattgccttaaaaatggaaggaataaaattggccataagtcatcaaatggccacgtgtaaaataatcccagcagggatcacaggttgctaccggtgccgaatcgggagccgcttctcttacacctgtacagctagttacggtacccccctagccgaaatttcgtgtgaaaatggggcgaattgggccatcccatgcacaaataaccccatccagcacaacacttctctctctcttaattcggctgaaatcaattccatttgtaaagtaatttgccctgggggagagaccatgttcgtaatgaaagggaccctctcctatttaccctcattaagcagaaattggcgcatttcgggatcacgaacaaaccataatcccggtggtttcagcttccccgaatttggcgattttccccacctgtttaactggatttttggaggcattcaattggccattatcatatgtgtcatatttcttggcatattagtgctttattgtctaattaggctaaacccaattttccgaggataccgtcttttcattagaataatgaccatatgcttaatcgcgcaagcgattcatgccgaagaagaggaaaatcagtcattcatggaccaaaaatattttgaagtaaagatttttgtatggatgcaccaagaaataataggtcaggtttttcttgccatttgcatatttgtcacaatttgcgctttcgcatggatgataatggagcgtagacggcgttatcccatacgcttaagacgcgaccgtgtcgaaccgcaaagacgaccgaccctagtaatgcaatggctaactccagatggacggccggcattagtcatgcagtgacagattagtcgaaattgcctatgtacaaaaatcccacccacactttacgctaataattttataaaattttttcacattgcccaccccaaatgtgcattaatcccgatgggattctctatcagcaaattggggaagtatataaataggaaattcaccccatcacaccactctcgtttatgttcctaattgcctcctatacccgtacgtcctcatatttgttctgcagaaacatgaatcccaattattcataccccaacacttactcctacccggctatgaacaacaacgtacccaatcccgggtacaaccaggcaccccctccgggaatgggggtgcaacacaacaacccgccccgtaccgaatttccatcccaaaactacaacccgtaccaacaacctttttaccctcaccctaccaaccaaaatggtgcgtcaaaccctccggtttaccatttccctacggatgcccaaaataaccaacaacatactcacaaccaaacttacaatgctccggctccccaaaatccgctaccaaatcattcgactcaaaataatgccccagcggcggtccaaaatcctccccaaattacccaaaatcaccaacagccttagggcaacattttgaacggacaaaatgcggttcctttgaaccagcgcgttattcccccgccaaaatattacaaatcgaacaaagagaaaccggtaagaaaccgctccccattcttttcccacaaaacatggccattttttttctctctccccagcgccgtgatgccccataccgtcgaccggatccagccacaaagaaagccgatcccaaaaaagttcccgctcctggggtcaagaaactcctcacggaggtgctttctgagatcaatacccttagcgatgcgttgaacaagcacgcggccgaattttctcgtttcttccacttcatcgtgaaacaggcccaaattggtgaacaggaagatgagaaggagagacaggcgagaaaagcggaagatgagaaggagagacaggcgagaaaagcggaagatgggaaagaaaaacaggcgaagaaagtggaagatgggaaagaaaaacaggcggagaaggcggaagagggggaaaagcaaccggagccggctaaagaggattaagcccggggggagttttctgtcgccgacagaaaaaaaaatcggcggtgatcattgatcaccaactttgttaactttacttttttgccgtattcataaatttttgtcttaatgagagccactttttgaaattaatctgagaaatcccttaaaagtggtcatccatggttctttccctggccccttaatccgtttttccccattttttcttgtcattgatgtccaccatttgccccatgcgctcttcaacatgctcatctgtgcgaccgccccctttttggatccgcgcccaagcccaagaagaacccgtataaaagaacgaaggaagagccactcgacagaattcaatttcccattttaactgccatccaacagttatcaaacgatctttttccaaacgatcaaacgatccaattttcatcacacatttcaatttttcacatttttcattgcgtttttgaataaaggttttatccagaaaacctttcacttttccttcccataaggaaacccctttttccaaccaattgccctcattcctcctataggaatttggagcttccatcccaaaccataagccataacattttccaatttattcttttccgcccaaaaatttaaacgcaattttccatcccttttcccatactttctgaaccgccgttcccactccgaaaacggcggcgataacatttgagacaattgggcaggacaagaaaagaatgaagttgatgcctcatgaaactcggaattggttatgttttgtcgaaaatatccttacataatactcataaaaaatacaaataattcaacccacctattctatgaccacattctgaaaaaaatcccagaaatacgaggaaagatatgcttggtcacaataaaataaaaaatggctagtatgtaaaaatttgtggtcacaaataaaataaaaaatggctaatatgtaaaattggcgtccagaaatttttagactaatccgaagcaaagcacgaatgaattaaagaggcgaaagaattcacagtattgtttctaatagggaaatattgacaggatattcggctaaaaacgggtttgatcatttttagcgcatttttaggtatacatttgagacaattgggcaggacaagaaaagaatgaagttgatgcctcatgaaactcgtatgtaaaaatttgcggtcacaaataaaataaaaaatggctaatatgtaaaattggcgtccagaaatttttagactaatccgaagcaaagcacgaatgaattaaagaggcgaaagaattcacagtatcgtttctaatagggaaatattgacaggatattcggctaaaaacgggtttgatcatttttagcgcatttttaggtatacatttgagacaattgggcaggacaagaaaagaatgaagttgatgcctcatgaaactcggaattggttatgtttagtcgaaaatatccttacataatactcataaaaaatacaaataattcaacccacctattctatgaccacattctgaaaaaaatcccagaaatacgaggaaagatatgcttggtcacaataaaataaaaaatggctagtatgtaaaaatttgcggtcacaaataaaataaaaaatggctaatatgtaaaattggcgtccagaaatttttagactaatccgaagcaaagcacgaatgaattaaagaggcgaaagaattcacagtatcgtttctaatagggaaatattgacaggatattcggctaaaaacgggtttgatcatttttagcgcatttttaggtatacatttgagacaattgggcaggacaagaaaagaatgaagtggatgcctcatgaaaactcagaatacgaggaaaaatatgcggtcacaaataaaataaaaaatggctaatatgtaaaattggcgtccagaaatttttagactaatccgaaacaaagcacgaatgaattaaagaggcgaaagaattcacagtatcgtttctaatagggaaatattgacaggatattcggctaaaaacgggtttgatcatttttagcgcatttttaggtatacatttgag

SEQ ID NO: 8365 - DNA, 941 bp, Heterodera glycines
ccgtgaacaaatgagaacaacaacgaccgcgacgatcgatgaagtgctgaactttctacgtaaccgaatttcaccggtcgcaccgagaaaaggtgaaaactaacacataaatttatgtgaaaatctagttttcttttagtcatttgcgattttgagaaagccgaaatgaacgccgtatggagcagtttctcctctactttgcgaagacgtacatcggaatgacgcagcaacagctgcttgatggtgaaaatgcgtttggagttcgtcctggtggtctttctccattttcgtgtccactttttcattttgttttatttttattaatttgcttttaagcgtttgctgggacatcatttgcgtccgttggatctgaccatacgtactcacggcagcccttgcaatttggcatcgactcgcccgccccctcaacactatcatggccgtcaacagtggagcaaaattcgccgttggtgcagtactcattgagtccatcatcaacgacgacattgcagccaggcatagagaaattcccaaaattgttgatttaaaaaattttaagcccgtccttgggaagaacccgtcgttcgtcgcgcactgttcccaattccatattggaacgtgcactcgcatgcggcttctgccctcgctcggaccaacaatggcctcgaagcaacccatcttcatttctctgtatttattacttataaaaccccaaataaaataattttagaagggtctttgtcatcacccagccctttccgatttcatttctgaagtcagcggaagcatcgacagacaagttgacgcagcgaggtcagcaaggaacttcatacacaaacgacacaaacgctacgtgctgcaggacgcagtcatcatgagaattttggcggatgcaacatacaacaacgatgccgaaattcatgatgttatgacggctcttg

SEQ ID NO: 8366 - DNA, 1421 bp, Heterodera glycines
attaatagagaccgcattttgagggaaatgcctttttttctgcgcactagtttcgatatattaagcataaataacacattttccagttggtttgagccttctacgttgacttttattatgccttttttggcatttttccgttttggtgccttttttggtcttttttccggaaaattccattaaaaacggaataaaatcgggaaaatacacccctaagaattgaaaaattttctcaaaaattgatcgccaaaattcattttttttcttgataataaattttgggcctaaaaattttccttattcgaaaacattataaaatatttaataatgatttaaatgaccaaaattaagtttttggttaagttttacgtattttgcaccttaaaaaaccttagaaaaaatttttttaatgccttttttcatgcctttttcgggattttcgtgccttttcaggccttttttttcaatttttggtgcttattatagtgcctttttcgcgatatttgatgcctttttttgcggtctctaatcattacaacaattataatgatttgatcactgatatggacagcgcataaagcttatcacggacaacagatcagagggtgataaagcacatacaaatgatataatttggggggagggggaaacagcgtcatattgggggatcagcagcagttagaaggggagaagcgtttgttgctcgaattccatcgttcgttcgttcatccgcgggggccgtcctcgagtcgatcattgttcaccgctggagctcttcgacgctattagcagggacagatgaaaaagtggcgaaactcacaaatcaactgaatggtgtacagcaaaccgcaatactgaaagggaagtaagaacaattagtagggcttccatttttaggcacaaaaaatcgcgaaataggcacctaaaaaggcagaaaaaaattgcaaaataggcattaaataggcacaaaaataggcaaaaaaattttttttattaacattttttaggcagcaaaacacgtaaaaatttaaatctttcaaattgtaaatgaaattattaaaagtttttccagataaggacaaattttaaatcaaaaatttttattgagaaaaaaaaattaaaaattaggaattatttttttgaaaatttttcaattcttaagggtgtattttcttaaatcttttttcggtcatttcttaggggtgcatttttcgtttttattgcatttttgttaaggattttttcaaaaaccctaaaataggcaagttaggcacaaaaaccccgaaataggcaaagttaggcattataagtcatcgtagacaccccaaaccaagcggaaaatgcctttttcgtgcttatctaagcgtattaagtgcgcagaaattttaggcatttgccctaaaatggaagccctaacaata

SEQ ID NO: 8367 - DNA, 1067 bp, Heterodera glycines
  unsure (1)..(1067): unsure at all n locations
gctcccacgccgaacgcaatcgcagccacgcatatgtaggagaggatggccttgaggttcatggagaacagcagcggcagaagtgatcggagtcgacgtgtgcacgggcgatgagcagcagaatcagcagcagttagaaggggagaaacgtttgttgttcgaagtccatcgtttgttgttcatccgctgctggggccatcctcgagtcgatcattgagggtctgccaatttgaggaaagtaatcacagtagtatcaaacatacaataatgagaaaattgagtttttgcaaaaatggcgcgcgtccgcgcgtcactcccctcctttttaattgtgacaatgaatttcgacaaaaagacacctgaaaattgctgatcatctcttggatcttcagattggtgttgattttacgcgtttccacatcactcccctccaacaaacgtttacgagcagctgaattcaattgcggacgtccggtcggctccattttgctaatgaaaaaaaaattgatataggatgacaaatacacatatgggatatttaaaataaaatttttaattttattttccggcgggaccacaattctgcagtattaccaaaaaagacagacctggaaatttttgatcagttcctggactttcaattgcgtgttgagacggcgcgtcttttcattgtcggcgatcaagcgcttccgcgctacagagtccatctggactcgtccaattcagaaggaaaacaacttttttgctctcattgtcagcaaaaaaattttgtgaattaagcgatttcagggaaagaatttgtttagatttgggcccccaaaatggtcaattttgaaggtttagaatcaactttttaattgtgacaatgtatttcgacaaaaagatacctgaaaattgctgatcatctcttggatcttcagattggtgttgatactgcgcgtctccgcatcactgcattcaattgatgccggttttttggattcatttttctatgaaaaaaaattgattatattacgatgaaaaaaacacacatatatatatatncggtcggggtcgatttcgcgccg

SEQ ID NO: 8368 - DNA, 1165 bp, Heterodera glycines
  unsure (1)..(1165): unsure at all n locations
gaacctggcgcgaaaacggtggcgcgaaaacgacggcgcgaaancgacctggcccgtatatatatatagcattttgggtaatagtaccgatggtgttcaatacagaaatatgcatatgatcaactcttaaagcatcggcacaaatcgttaaaaccaattttaaactaaaaatcgaaaattcgaattttcgactttgttcaaattcgggttcggaattccaaattggtcgaaatgaaggccggattcgttccgtgtcggagaattcaattctgacatccatttcgacccgcttcgaaccccggacccggactcgaacaaaaagtcgaatatttttttcaacaaaattcacatttatacaccaaaaccggtcaaattgcacgaaatagtatgtcttgcgttcgctttatgtgtttctagattttatttgaagagctacggaatttcacgctgaaaaaagtgcacgaaatgtatgtaggccctaaaatgcactcaattcatcaaaaagttacgggtgcgcaaccaaagcgtgactagacaattggacagtggacaatccgacagtaaatccacggtccgattgtccggagtccaaccaaagtgagcccttttttggcgggacaaaagtatggaaacaaaagttttatttgatgaaaaatcattttacgcagagaaaaaattctggaaaagtttctgctaatctaaattttagtcctgatcaaaaaagtcttttacaccaacttggtccgatcactccttcatggtgatctggaaagtcaaaaatggcttgaaatctgggaaattttcgcgaaaaaaaatccttgggggttaggaaaaattttctgcaaaatttgggtaggcatgtcagaaataggacaaaattctctaccgaattgccttttggatggtgggtcaacgacgtatacccacagagcaagagagcatgaaacattggacatctcaaaaatcacttattttctacagtatttcaaggggaaatgatcaaacaaattgatcatttttatggtactcataatgttttccgtgcttgtgcttctctcatcaagtacaatccgcaaaaaaaaataatatgttaaaagcctaatccgttccctaatcattagccattttatcaacaattactcacaatgaatgaatgaattaatta

SEQ ID NO: 8369 - DNA, 4505 bp, Heterodera glycines
tattagggcaagggcatcggaaaatttggatggacggtaaaaaaaaggcaaaaatagttggcgtaaaaaacaaaaaatgcaacattcaaaacaatacagagtaccttagaaccttttttcggcaacctgggtttttctggaacttaattttcttggattttgtttaaaaaattcaggttcaggtcaaatatgaaaaaaacccaggtccatgtgtctatcaggcacgagaaacctagacaattaaaaatttgttactccgagtgaccactttttgtttcaattatcaaaatgatgaatagactgattaaaataatatatattgtcattaacaagctggatttttctggacctagatctgtacagaaaattcagatccaggctttttccaaaatgccaagctctaatctttattggtagagtaatcctttgatggagtcagttatttaacgaaaagtgaaaccgcaccaacagtaacaggcgaattcaaaaagcaaaatattttgaaaaaataaaagcatcataatacacgaagaatgatgaataatgaatgagtcagaattggaacagcaacaacaacaataatcattcactgattcattcgcttgatcagtccgtttgctgtgctttctgcgctttagtgctgctcctccttcgtctcctgttgctgccccttcccttcccattcctcgtggcgaacgtcgcaattgtcaaaggaccgctccaaggcccagaaacggccgagcgcgccgatgtcccacgcgttccgccacagctccgtccacggccatccacgcaatgttttgtcgtgggcagcgtaaaagtcattcttcaaagttggggaaactatggaaggcaattgcggcggcggacattctctcggccgacctttttgtcaaacggacgctcaacgagcacagagaagagcaaaaagtcgacgagttcaagccgattcccattcaacaggacggtgtactgctcgagccgttcgtctgtaattgttttgaggcttttgttagcatcaaaaaattttcgaaaagccatctcacgaactgccgagccccttccggaataatcgttttgtcccccagtcaaatgtattcaccggcacgagtgctgtgaatggacgccgggatgagcaccatttgctgacgcaactgagccaaacgcgcgcgcagcgcaatttcgtccggattggattttaaagtgaacacaagcgaagccaaggcggcgccgcaagcgacggcctgggaaaatttgggaatttgacgaaggataaccgacatggattaagacaacaagcgaccattagaggatcgaatgaattgcatgtccgtgaccctgacagtcggaaacatatttaaacgcactcgcagcggtcgctgacgcattccaacgacgatgtcgcggaaggaagctgcgtaatcgatggccaactgttgaacgtagcggcccactctggttgtgccgagtcgtgccaacagccgctttgccggtgttgaagaagtagcggcactttcagtcgcggccatcggttccatccagcgaatgtccgccaaagtgacggcggccgcttgttggtgggacgaccgcttctgctggtgatgcatgaaaaacgaagacattgaacagaaaaagaaatggatactgaaaatggggcaaattgaggggcaattaaataatgggacaaaaaacaaaaaagtacaaaattaatatgtaaacaaagataatttgaaacaccaaaattgggattgtatttgatataaagtttaaaaaatcagttgacagataaaactgaaatggaaaacaaacaaaaaaaaccaacaagcaaataaatgtgtatgaagaaagaacgtacataaaactttaaaaaggaaaaatggaatccgaggtggaaatctgggggaacgacagacaaaagcaacgaattgggaaaaggaaacagacgaactcaaacatttggagacatgcaaattgccgaaggcgataaagagcagttgatggggtcattgtgaaagagtgtatttgccgttctatccccccttaaatatgccaccactttcgccccctccccgtaatatttctcgatggcatttgcgtcgtttgcccatgttcaaatggtcatctcctcctcctcttcctcgtattcgtttctgtcctcctccatgcgctcactgacaccgaaatgggccgcacgatgtgccgctttgaatttgcgctcgatggtgtcaaaaatgcgtgccaaatcttccagcccacgcagcagcacatcccccgcggccaccccttcgaccgtttggatacggacgaggattttgtcctccaacggatggggcacgttgtaaccgcaaaactcgacgccgggcctggcaaaatgttcgcaaaaaatgtttggaagaccaacacaatcgctcatatactcacatttggcaaatgatgtgtttgagggcattgccaactgtgtggtcctcctcgtagagaatggcggttatcctgcaaggaccaaatatttattgaaaaaggagcagtctcgagaatgtgaaatcccgaggaatcatcgactggagagaccattgatcgtttcgcaaaactatcggaaaattgaaattttaaaggctaatggagaagagatttgtcgaaagacacaataccctttcttcttgaatttttgagctaattaatgtaagaatgactaatttgtcaaatctttaaaatctttatgaagtcctttcgattgacctccgttttctgtttcccccttctgctattttattttggtctcttcgtcaacagttgttctatgggaaaatggacagcgggacgctaatgaatcaatcagcacggaaatatttaatggcaatcgaaatgggtttcgtattcgtaaccagtagggcaaaagctccaaagttatcccgaaagagaaaagtaaaataaaatacaaaagtaaaataaaatacatgttagaagcttcaaaaaaatgcagaaaacttttttagtcattttagaacaatttcgagtcagcaaagcattcgacataataaattcccagccttagttaacagcgaccctgaaaatcccaacagttttgcattttgattaaaatgaggataatgtacaattactaacttgcccatgccaattccggatgaaatcaatgacaactgtttatttataaactcacattgtccggtccttcttgtagtcctcgatgttcaacagttccactttttgaggtgccaccgtcgggggcagacgcgtccgaccgacggcattccgatttgaaagtccagtctccatttggcttttgtgaaataaggcaaaaattccgttttatgggcatgtttttaattgggaaaagtaatggggtgggaaaaatgaaaatgagccatttgatgacagaccaaacatttggaaagtcataaggtcaaaacgacggaagagaaaactcgtgcctttttcaattaataaatagaaaagtgaacaaaaaatgggtaagtgatcgcacaaagcaaaaaacagagaacggaacaaacaaatgggaggcaaaagaaaagatcagttgaacagagggcagatcagatcattcattgaacggtcaaaaattgagtcaaatgtttgtgagtccttcgtccatccgttccccttcacttcgttcagtcgtccattgtctctttgtcctcgtcaatttttggggccaaaaagaaacgcaaaaatccattgccttcgatgtcatattcgaccaccaacggaacattgtcgcacatggacaaacgcacgcggtcctaaaaagggcacaaataacactgaaattttaattttcacaatttaaaagttaatggacgacagccacctaaggttttttttttgacaaaattcgtcatagcatttgacaattaaatttatggagaaaaaaatacattcatttggccatgcttttgacttttttttgaaaatttgttagagttaccaaaagatttgaatttgcgagatgggcttgcttcataatgcttacaaaactatttaatatattcaaatacaaagtaccgaaagtgaagtggccttggtgaagttggtcaggtacttgatggagaagttgaggttcaccttctccttcacagttatgtccacgcgctaaaaaggatttaaataacaactcaaaatgcttcttcattcacaaacatctttgtcatcgtcgtcatccgccgttttgtccttggagtagcgaattgtgtttgtgaccgaatctgcgaagcgaattgtcaaaaagttgtgcttatcacaactaatttttttgaaaaatttatgaaatttttcattttggagcttttgccaaaacatttttaacgattttcaatcgttacctaattggctatgtttaaggataaataaataagtaaaattgcgtccaccaacctccgctgccgctgaacacaacgccgctctttgtggcggtgatgttcatcgagtcggagaaggaggcaatgtcacggcacactttttggaactcg

SEQ ID NO: 8370 - DNA, 2738 bp, Heterodera glycines
  unsure (1)..(2738): unsure at all n locations
ttaattctctcttagcaattncattcattcgttttttcccttttttcatggcaattcgtacagtgaaaaaaaaactgacaaaaagctgtgatttgcctttcaaacggtaaccacgtgtttaacttaaattcaataaaaccatttgtaataaatacagttttatcattttattttgtacgaattgtcattggccctttcgtgccaaatctttcactttcatacattaaaaagtcggctattcctactccaccccctccgatgcgaatgggctccccattttggtcttttgcgggcgaaaggggagggtcaaacccccgcccccctcccttcactttgtctcattcgacttgttaaggttccgtaagaagtgcggcctgttgtccgacttttccctctcccccacggaatgtgaacggtgtcgactcgccgaggaatgggaggaaacatggcgattgcatgccgagttggagcagcaggagaagaacctccgttttcggcccccactaggctcaaatgttccacgaaaaccaatgacacttccgccggaaaattgaaacagcaaaaatgattttgtaaaatgaattcggatgaataaatgaataatggttaacttcggataatatttttacttactttggcactcatttttaaattcgtttccgtttgcctttgtcttttttcgatgttttaaatttattttttctttgtttttcttctcccatcaatggaactgttgttgtgatgtttagtgattctttcctccttttgctgcggatgaatgatgggaaattgggacgagttccgcctttccttctctcgttctttgccctcttttctctgactgtctgtcgtgtctccatttgtcactacaaatttgtttttctcttgtggtgcgtaaaagaaatgaaaaagagggagagagagagaaggagggtgtagagaaatgggcgagagaaagaaaagacccaaccaatcggcggacggggaaagaaagggcttttgcatatgagcagtaataatttaccaaccattttatatgtcattcaaaggctctcaaaagctcaacgaatagctcattaaaatacaaaattggagtgaaagtccaaaaaattgaattttcgggttacagtaaatttattttcaaattttaattgagtttttatcgcttaaacattcttcctttaaatattatttcttcggatgtttggccctttttcttaaataacgaattaaaacattttaatttatttaaagcactttcatttctcaattataattcaatttcactcccttaattttatgtttagcgccacttcgacccggaaaacatattcgtcttcgccttcccatttttgccgcaaattttggtcttttgtgacagcagctgacttatagaaagaggaaagaaaggagggaaagagcgaaacatccgcggaggtacggcgcggcgcattcgttcgtttccaatgtccctcctttccctcctttctctcctctctctcttctcgtttctctctcctctcctttttctctcgtttctttttccctctctctttttctctctctctctcccctctctctcctcccctctctttctctgtctgaggtgtgtatgtgatgagagagatttttggtcgagtaaacacacagaaaatggatggcgtgctacaactgatcaaaatgaaaacaaacagatgattttagttcgttttcatctgattgttagtccgtcccttttctcactttataatgttttgttgataagaggaaagcaaagtcgggaattaattaaagccctggatatgagtggctttatcctgcccattttagaaggtctatttttggcggattcacgagtccctcccccccccctcccctctcccaatgtgccatttcgcttgcagcagtcgtacatgaaatgaatgggtacgagaactaaccagccaaccgaccaatcttctcagcagtcataggagggaagcgagcagcgctcgtgtggaagcgagcggcgaatgagaaatggggggaggggggggggggcagtgctgctgctgttggaagtgggttctgctggggggggggaaggggcggggactattcgtcgcccgtcccgtggtccatattcgctctgatttgtgcttatttctgagatgactcaccggcccaaaattttttaatttatataaattatgtattttggcacaaaaattctcacaaaaatggccattttatgcctaaatcctcaaattttgtttttagcgaaatgctcaaaatgagaatttaatgaattgatgaaaaacaattatatgcaaaactaaactaggctttataatcatttttttaaatatgctttatttttgaccagcgatgtgcgtattttgtaaaaagttcgatcacaactctctactaaatgcctaaatttttagaaaaacaaaattttccatttcaatttcaaaccaatttttctgtttccaaactcaaattcctactttttcttatttttgtttgtgtttttttttgcccttttcgtatcttctcgttttaccgaaacttttcttcaatcagtcgctgctgagaattaatccgtaaaacaaatgtacactcggcggagatgggaaaaacgcaaatggacgatgaaattaggccggcaaatcagtcccagagaatttggcattatttttgctagagattatagcgaccttttttcgtttgcgcctatgtccaaaatcggttcaaac

SEQ ID NO: 8371 - DNA, 917 bp, Heterodera glycines
ggtaaaaaaaggaaaaaaaagagatagccatttttggtcaagaatttttttgtttgggttcaaaatatcgtaagattgtttgataaggccagacaagagaaggcagctgttggtacctagtttgcagtaaaaaaatgacaaaaaagagatagccattttttggtcaagaattttttttgtttgcgtttcaaatatcgtaagattgtttgatagggccagacaagagaaggcaactgttggtaccaagtttgcggtaaaaaaatgagaaaaaagagataaccatttttggtcaagaattttttttgtttgcgtttcaaatatcgtaagattgttcgatagggccagacaagagaaggcaactgttggtaccaattttgccgtaaaaaaatgagaaaaaagatgtttgatagggccagacaagagaaggcaactgttggtagcaagtttgcggtaaaaaaatgagaaaaaagagataggtattttttggtcaagaattttttttgtttgcgtttcaaatatcgtaagattgtttgatagggccagacaagagaaggcaactgttggtaccaagtttgcggtaaaaaaatgagaaaaaagagatagctatccccccggtgtctgctgctgcccttcccttccctttctctcccattccgattctcttcgctcttctcattcactcattgagtcttgagtcttatgactttctgtcccctcccttctcccgccaagattattgcccccccccaaaaaaaaaaactcaaataattcctccccttattcacgtgcaattccgcccgtgccgtggggtccacctcgtttcggcgccagcccaatttttggactataacttttttctttttccaccgaatctaacattgttggtatcattcgagagcccttctgatgctctatta

SEQ ID NO: 8372 - DNA, 961 bp, Heterodera glycines
tttgacttagacttgggataattgtgtcattcgtctcatgaccatccatcgttgctcccttctccgctgatgatcatcgcccccattcactgagtccgccattgccccattgatcctccctcccttcctccacatataaatagccagcccaacgaatcaacgctcttcgcttgcatcatattggacatttcatcaagcagtaaaaagtgctggattgaaaggggagagaaagatgatggagaatgaatggagggagtataaaagatgatgatgatgacgagttgacgacgaaagcgaccaaaacggtgaataaattgggcggaggagggggggggggagcaaaggcgaggaacagcagcgaagggagggggaacaaacactgttcattagttagttattagaccgctcctcaccgccacccttcctccatttaaaaaaacaagaagcagctggaagaagagatggaagaagactcatttcccttcccttccctttgttctccaaggcgggggggggggtgaccatttgggtttgaattcaaacgattacacaataagtattaaacaaatatatgtatatgtaaatgttgaattgcagctttaacctatgtcaaaaaggggcgctattttgcagcaaatttgtctgtctcctaaaatgcttattcctctccctgtccataatttacaactttgtcctttcccttggctttgcctcttcccgcgctttttggtctctggtccattttcctgcaaatttccgttgttttttccaacatcgtcctttacgttttctcttatttagcatcaacaaaaacaaactgtcaatacggcaccatacaacaaaaataaaaagcaaagggaaaaacaaacgacgccaaaaggcagcaaaaatagctgagccaaaagtgaagaaaataatggaattggccaaggaactcatcgccgaagtgttacggaccgaa

SEQ ID NO: 8373 - DNA, 1891 bp, Heterodera glycines
tttcttcgggagacaatgcaaagttcggcctggcgttgcccttcgccgaccgttttctggccgaaggagcggcagtttccattcatttgatgatggcacacgccaactgcaaagcatcggcgaaagaattttgtgaagcgacacaaacattggaggtgggttcttcggttggtgtcgagtgatgtgtcctattctaatttaaggtttggaccttcaaattgcagagggaagtgccgtacgaagtgagtgcccggccgccaatgctgccgctgttcttgcgccaggcagtccgttcccaattgcatttctcgcctttccgttcttggcttactgcgcgacaacgcgcggggccatccgatgggtttttgcctcttttgcggtagcgaatcttttgctgttttcgtcgcacttcgtccttttgcagtgtgtgtgctgcctctgactccgctgctccgcccttttcttccgatcgtctccaatcccaccaattcccgccttgcttagtccgttcttctctgcccgtcatcaatgtcccgttgcgaaatgtgcagcttaacagcactggtgagccattttggctccgagtgcacgtccaatggctgaagaaggaatgttttctcacaaaagcgccgctatgtccggaaatgaggtcgctggggttggccgagtttgatgggatgactgactttttcaattagcatggagcagcaggacggcctttggccactctcttccacggaccgatgccaaagccgagcgaattgcaatgccatcggagaaaacggcggactcgtagcattgagcggagaagagacagacgaatcgcagtgtacgacgccaaccgaaacactttcaccaattgtacgacgtaaaacgacggattcaaaagaaggcaccaaaatcagagaggaaaagagagcggtggaaggaacacatggaaatgtaaaagtgacggacggaattatgttggaaaaaaggggcacacaaagggcgacggagcggcaaaacgacgacgaaagggagacggacaacagagcaccgctggacagtccccgtagtcagaaccaacactgtacggatgtgctcatcccaacttcaaatcccattttcgccccgtgcgcccggcctttctttcacaacaaaatgccaatcttacgtccaaacaaaagaaatggaccatcactggatgagttacacttggccgatgggattggggccgaatgttttgctgatggaactcatggggaacggaggcgcacttctcggcatcaaattccatccgtttcaatggaaaaatcgaatctccccagcaacaaaaacacgtggcgcactccgtccagattgatctgcaatttcgaggaaagcattctcaacggacgcatcccagcaaatagtgttgtcagcgggtcgttgaaaaattaaatcaatgacagctgaacttcccttttagtttccgtctccaacttacggtcatcggtaacggagtgtctacggacaatcgcctttcattcccggcaagcaaacgcctgacattgccagtgcttacttacttcttcaacgatttgatgtctcaacattcgggacggtttccagtggcggttccgccttcgccgttgcatttggtgaaaaatgcctcgttggattggtccgactaaaacttttttccatttaggctcgctgcgagttggcggcggagacggtccccattccgaaacggtgcacactgcaaatagtgctcttacggtggttacttttcgtagttaccaaatgccactcatttccgtcggttcagtccgtgcggttcggtcgttaagctgttcatggtcgcggtgaatgtgctcgacatgccttccaattcgaggacggtgagcaaaatgaataaacgacaaaa

SEQ ID NO: 8374 - DNA, 706 bp, Heterodera glycines
aattgcaaggtttttttttcaacaggcacagcccttggctgaatgttttggctcggctttcgtttcggtaattttaattttgtcgttttttttaaattttcccaattaaaagggtcactgctttgtgttacgccctttttggtgcttgcgctcggtgtcgatgatgcttatttgatgctgaacgcgtggcagaggcttagaattaggcgagcactagcatttttggcgcaatttactcaaatattggtgcaccataatttcttaatgaaattccagcccagaatttttaaatttaacccagcttccggctgtttttctgaccatttaatggaccctaattattataagtttgagcgctgaaatggctataaaatttttacaaatggtcaggccaattcagtactgtataactgagcgcaataatatattggtgctgaatcagctggcgcagaaataataacctcctaagccatacaaaatttcagtttggaaaaaaagcttgaacatgagggcaagccagtgtcggtggaacaaattgtgcaacggttaatggcccaagtgatggtggacacgggtacgaattttgtgatttttccacaaaattttttaccaatttcttcaaggggcctccatcacgattacggtatggtctggaacaaaatacatggaaaatactggcgctcatcttttaaatgataaaaatttt

SEQ ID NO: 8375 - DNA, 1056 bp, Heterodera glycines
ctcaaattttcaaaattttcacgcggcgcctgtcggcaccaccggcagacgaccccccatttttccgtatttttgaaatgttgaccccaaaatggcaaaaaaatagccccatttttggcacaaaaacgggtaaaaatccctagtttttctctccatcgcttgaatttaaaatgaccggcctaatcaaaattttcccaaccccctaagaattttttctaaaattttccccactttcagtatcttttgtggtgttcagatcgccatgaaggagtaatctgatcatgttggtccaaaagatttttttgttcaccattaaaagtttagaggaaattttttgctctacataaatagatttttgtttaaatttaagaaaaatttgaaaaattttcttaataaacttagttaaaaaataaaatttgtccttggagatttctacaaaaaggcctaattttcatcaaaaaatttgctcaaaatcgtaaacttagtcattttttggaaaaggtacgcagcaaaaaaacggtaggggtcaactccgtctggccaactccgtctcagcaatgttcaaaaaactataacttttttctttgttggccaaacttcacaatcatggtatcattcgaaagccctagatgtttagaagatatttataagctatttctcagtgattaatcagctctcaaaaaagttgtcagtttaaaaccgcaaaaaaggcagaattttcgaagttttttatttctatctttttttatagttcgaaattttctgtactttttagtaggctaatagagcctgtgaagagctttcgaatgatatcaagattgtttgattcggtcaataacttcaagagttatattaactcaaagttggctcagacggagttggccagacggagttggcccgttcctgcaaaaaaagcggattgtgttttggcttctttaaaatatcttttaggaatttttccagcgattaaattccgtttttctaaataaatttaaattaaaaaaatcattagaaaaaaattttttaatcaaggatcactgagtttttggggtgccg

SEQ ID NO: 8376 - DNA, 4062 bp, Heterodera glycines
  unsure (1)..(4062): unsure at all n locations
caaatgatgtcccattaattggagtaccaccgggcgggtgtcatgtgttcgagtgtccaaaaaattaaccagcttatttccagacagtggcatgtcaagggtggccttcctcctccctgtcatctgaagcggcgaaggcaccctgccgactcgcgccggacacccatgnacgcgagaaaagcgacgaccacgcgggcatttccacgcgtttcggcacaccgcccgaacaatttgctcaaggtatggtcaaaaataagcgactatatatgatgtacaatgattattttgcattcccccaggttactgtactactactgtcgtgcacttacgaacacggcgtgtgctgtcgttgtgatgatgattctcacaggtaccatatacatgctgtaaatacagtatccacatgctgtacatacagtatccatccgcttatttccaagcataggtattcaaaaaatggttttaagctaatattaaaaaaactaaaaataaaaacaattaatattgaaattaatatactcttttgcataaatcatatacatcgtgtcagtcaatgcccaaaattacggtagtaaacgcaactttctccgtttttcattatttgctatgctgtattttttaaacacagacccaatcttaacacacacacacacacacggtcgtttatactgtagattgtggagaccttactgtattttatactataaagtaagaacaactttccatatagcctacttgtacgtctccatctttggcctactgaacatccgtgctgagttgcggcctgagcagctgtttttgcgctcctctgacgtcattgagctgttgcatctgcgcaacgagttgccaataaattttgaaaattttgcgccaaatttaaattaaatttttttctcacccagatacatcatgccattctatgcagtgtgcatggtttttgtgaacaaaccaggcaatttctccgacccggttcagcgtcagagatggcattcgctggtgcgcgcgataattagcaaaaaaaatctcaaaattttttgtcttaaaattttcaggtttccgattttgaggggttgcccagctctgttggccgcttctccaccaaattttggctacgcgactatgagcaatttgtggagcaggacccggaggcaagaataaagtttttgaaaatttggattgatatgaaattaaattttttatttaaagcgcagggctagtttttagaaaattagaattttcaatgtttttaaaaaataaggagccagggtttgtttttgttttttttttgtttatttaggagactcgggatttttttgaaaatttcatttttttcctcccttaaaacatccttgggttcaaagcaaaatttaggatgcagcacctccattgaacgacctagcagcctttgaaggtaggaggggttaggattttttttttaaattttttttttgaatttttcatccgttacaaattaggcatccccttaactgaacgaaagcgcaacgaactggccgaatttcttcaatggcccgaatttcaagtgatcatttatttattttccttaatttcgatcaacgcacatatgtaaaaaacaattttgtttgaatatttgatttttcatatcccaattgttagcgctaaattttttgggacccagttactaggttacgaaatacaaaatttttttagttttggaatggttttctgaggctagaatcatccagcaacacaacaaacagctctgccaattcgtcggagctggtgctgagccgcttcttcttcacaacggcttcttatgggacagagttgcgcgaatggtccaagcgcgagctgttgcttggtcaatgggcgcagggttgccgattcggtgaggagttttgtttttctttttacaaaaatttttacagtatcccgagctggaggtcagcgtgtacgtaagtgatttgtaattttaacttaattccgctgagttggcctaagatttatgcaatattttaaatctgctcgcgtatttgcttaattggtctggttaggaaaatttattaagaattgaattgcctaatagctctccattttcctcattacgcttaatttgcacacatcattaagtccaattatgttcaggaagatgacgccaaatttttggatctgatcccgacaatggtatgtaaaacgtctcaaataaatttaaagcttgccattttgatcggttttttttgtgtcatttcgttttcttcccccatagattccgcagacaattcagtcctctgcctgcactttgttatgtatgtttctcgtctgtctgctgttcatgaccaacccaggcgctctattggtctcaaattttgccattttctccacttgcattggtgcgttcaaattttgaacattttttcctaaattttggcgaaatgttttccaggcgtttttggcatccaatcgttactcggcactctgcttgatcccatttttatgaggtagtggtgtaaatatttatcacatatgtacattgcaaaatgaaaagcaaattactggagtctatttgtgattcgtccttaaatccaagggcagtccttgatttagtagcctgcttgatgtattgtaatggatctaatttttatgaaaaattgctggtttgaaaataatgaattaattttttttttgacaaagttaaaagctgaaaatcctaatgcaccatacatattacagtattaacttaaaaaaaccgtatcactggcaataattttttgaaatttatcagtgctgccatcatgtcaattggattctctgtggacattccggcacacattgcctatcatttctacaagacgagcgttggcgaaaaggcaggcaccagcttagatgtggaacaacgactgatggactgcttggctaccattggtcagtcagtttttgtgtgcaaagagtaaattacggttagtgtgtcccttataaagtaacagtatagcttgaggttttcgtatgactcaatatacggtatttgtacgattaaggtgacctgaattattcggtatttgtagcttgcgattttagcgtaatccaatacgcatgttattgtgaccnccgctgaaatatacaattatggtagttcgaaatgagacaattaaacgatacttcattctagcttattgttaatctgatccagtgtaatgtatttttgatttgtttttgcaaggctttcctgtgctggaagctggtctgtccacgctgatctgtacctcgtcactgttctttgttgacttgcacatggccagggcaagttgtatacaatagcctttgattacagtatactctggctactgtatacgtacctacagttgctaaattttggtacaaatataggtgtttgcccgcacaatgacgctggttgtggccatcggtttgctgcacgggctgttggtcatcccggtgatgttttccttgtgcaacaccatacggcgacgagagcggcagcgccctactgtaaccggacatgccgttatatggcctactacagtacttgaaaatggccacagtagcgcaacagaagagttatcagcaactaaacatcatcgacaaagtgaacgacgacgacgatcaatgttgtcaacttgcaagggctccatcggcgtgccgcccaccattcttacagtaaaccagtgcgaccgatgagaaaaagtacggaagccggatagccgctactgtagtcggaaaatgtataatttattgtactgaattagctagtgctctcaaattcgcctcgaatacaaataaaacaaaaagtatttacgggttattacctaaataattgtcaattttccaattttactctgcatatttgttattactatcgatgggttacggtacatttttattctgtaaactatgcagtaattattctttcatttgaattttatgcctttaacccttcgcatttattcattttttacttggaatattttgttatttaaattaccgcggatagccatatatttttatttacttttataataattttgataaaaagggaatttaccattggctatctattcaaatagaaat

SEQ ID NO: 8377 - DNA, 4635 bp, Heterodera glycines
tcgcaaaaaatgcacctgaaattgcaatgggcgaacagtgccaaaagcatggtgaatgagtaaagcagacgaagcgcaaattgccgatttgaaatgcacaatgaactggccggattggtggaggtgcacaacggcacgttgaacagcgcaatgcaaacgggcaaagcgataagaaaggcaccgacaatgtgccgagtagcccactggtgaagacaatgcaaaagcggacggcgactgagtagaggaagtccgatgaggacgacgacagctgaacagagcgaagcggaaacattgccaataagcgacgatcaaacggtgccatccctaatcgaattttaccggtgaggaaaaccgaagccgtagcaatgtaaaggaaaaaaggcagagagacgccgatgttcggttggacgaggaacagaagggagcaaatgataaagatcagagcagacacttggcaaaatgagtgggaattgaggaagggcccaataatttgccaatgacaccgaaaatgtcgatgaacacgccagaatagcggtagcgtggccgtcgcgaccgttgttgctgctgcttcgactcggcggcggcggaggccaacagaacgggaccgatggaaccgccacggttccgttccaactgggcccggtcaataagaaggtggttaaatgaccgggtcaaacgaccatggttatttgacctggtcaaatgaccacgaagttggtggtaaaccgagtcaataagaaaatgaccacgaagtgccgttttgactaccaacctccgtcaaactaccatgaactatcttcttattgacccgggtcatttaactacatgcaattttggggcagattcacataaaaattttgtttttttcttctatttatgtgataatgagggatacgtggtcctattagagggataaaattaatttataattagtttattttaaagaattttaaaaaatgtttaaattggctcaaaaattaccacaattgattatcgagaaaaattattttatggatgtgtttttggttaattctttgttattttcgtaaaaattatttgtctctcgaaattttttttgtcgagttttgactacctttgtaaaaagtggttttaaaaatacttaacattaagataaattttttattttggtatcagaagaaagagcacacttcaatctataagaatcttatttttgtttatttttatctcacaattttccgtgtcaaaaggctcatggtaaatatggctaccatgggtaggatggtggtagcatttctaaccaccaactcccgtcaaatgaccatgaactacgttcttattgacagggtaaaaaagagggtcatggtcatggttaaatgaccaccaacttcgtggttgtttgaccaaagttcgtggtagctcttgttgaccgaggtttaccaccaacttcatggttttttaaccattaccaccttcttattgaccgggccccgttctctagttttttccacataaaattgttccatattttgacggttgaacattttgaaaatttatcattaaaaaaatattttttttcttaaattagaatttttacaggcaaaaattgattgagtcatttcaaaaataattccatttccaccgtaaccccaattaaaattggtcacctaccgtttccgctctgttcgaatgcttcgatattttcatcattcagcgattcttccgtcctttccattcgttgcaattttgcgattctcgcctttagaaatcgtaattcgtcggttatttttcgtttagccatttataaatcttaatttgtaaccaatcttaaaaatggagggaaagtaaagttaaattagcatattacaaatagaccaatttattctctaaatgagtttactttaaatactgttaaaatttattgaacaaaaaatatagagaataaaatgaaaaatgacctttattttactacctattttccccatatttgaattgttctttattggatcaataaaacacattagtaaaatgatgagatgaccctttaaagactgaggagatcaaaaccaaattactactaatctttatttcttgctcatttaaaagtccactcttacaaaaagagctcgtaaatgtgatgcttagcctcttttgaggtaaaattcaaaaagctccttctttcaggggacaaactgaactattaccaaaatacgttttccttgtaattaataaattagaattttgcttcgaattcgcatacggattttggaatttcaaaacaaaagtcattttcctaatcagcgtcacaaattaccctagaaatgattttttatctaaaattcatgggggggggtctcaaaacagaaaagtgccggcaagagtctcaaaattatgcggcattttttgtggaatgatcttccaacttattccccccgtttatatcatatagtttagtttatcttatgtatcagtcacagattaaaaaaaaagacattggagatcaacgaacatgtgaaaaagaacattttaaaaaaatttttaatttttaaattttcacgtaattcacgcaaaatacgtgatagcatcaaataaacgtctgattcgtgttcagcgcttaaaattacgctagaaatgaaattttgaaaaatatttgggggggggggtgtgacaaaccccggaagaaccttcctctaatcttaatatttattattttcacagcttcctctgataattttttcgttgttccatcttttgcggatgattcttttcatccgttcatttctatgtgggattttgatgaccaaattgaggcaaattttgggcccaatttaaattcggtttgccaactctctgaggaagaaagattaattaaagttgatcacttttccaatcgaatattacttttttagtcgacattttggagcttttcttgactttaattccaagccctagttaccaagtatttaaaaaaaaatttgcgattcgctcaagccgactccaaccgaatgcaacctccggcgccgaatgcgaataaatttgccaattcgtacacactaaacagcggttgcgatgtgccaatcgactcgctgccgtgcttcgcctgtctcgccacgttaagcgcctggacggcaagtgcactgtttatggcgggtggtgctcgctataagacagtcacgaatgagcgacgcgacaatagggttagccgacttttgcgccgcagacatttgcgccgcgccatttgcgccgcgacacttgcgccgctcagcaaaaaagactcttgcgccgcggacatttgcgccgtgccatttgcgccgcgacacttgcgccgcctaacaaaaacgacatttgcgccgcgacatttgcgccgtacagcgaaaaaagacatttgcgctctgattaaaataaatttatgtgctttatagaataagaattgatagatattcattattaattcctttttcgaaaaataatgcgaaaaatggtaaaataggagcgaaaatttgaaaatcagtgcgttttttcaatgaaattaaattaaaatcgatgaaaataacttattgagaaaattaattacaaaggaattgaatttcattcttttttcgaagcaaaaaaataattggggtttctacagaaaattctttttttcagttttttgttagtttgtattcttaatcattttttcatatctttgatgaacctattcaatgttaagattttaatggttaaaaaattgaatgtcaatctttgtgactagtaattttttcgaattttcaattagttatttttgtcgatggcttatagttttagtaaaacttattgataatagtggaatttttatgaatataatatttttgacagcgcggcgcaaaagtccatttttgctgggcggcgcaaatggagcggcgcaaatatccgcggcgcaactgtctgcggcgcaaatggcgcggcgcaagtgtcgactttgctgagcggcgcaaatggcgcggcgcaaatgtctcatcacggcgacagcgagcaaatcgcactgacacaattattcatttttttatagaacatataaatataaattaattttattatgggatgtaaaatgagcgagggagaaatagatcagatgcactatttgctcaatgctcttgtttctttttcaacaaaaagaggcactgaactatttgtatttgttcaaaattacccaatcaacaaaaaacgttagttaattcctttttggacattttggaatttgaaaaattgaaagaagatgtttttatttagaatggtaaaagaaaaaattgttaaatacggcgtaataatcattgttaattttatatgctaaaaccctgaaatatgaaataaaatatatactaaaaattgctaaaaatatgtgctaaaaaccaaaaaaaaaatgcaaaaatatgtgcgaaaatatatgctaaaaattagaaaaagcaagtctatttatgcaaaaaaaaatcccagaaaaccatatttttttttatctttctcgccagcacagttgcaaatcaaatcaaatacatttcaaggttttcgggggtaaacaggtccttatcaaaaattattcggagaaaatgccatttttgggcttctctcgccataattaaatcgcaaaaaaatatgtaaaaacataaaaatcccagc

SEQ ID NO: 8378 - DNA, 4179 bp, Heterodera glycines
  unsure (1)..(4179): unsure at all n locations
tttccttttttaggcacaaaaaatcgcaaaataggcattaaattggcacaaaaaccttaaaatgggcacaaaaataggcataaaaaatcgtaaaataggcacctaaaaaggcataaaaaaatcgtaaaataggcacctaaaaaggcataaaaaaatcgtaaaataggcaaaaaaatttttttattaacgcttttttggtattaaaacaagtaaaaacaaatatttcaattgcaaatgaaattattaaataaggacaaaattttaaacaaaaatttttattaagaaaaaaatatattaaattttgggatcatttttttgaaaattttttcaattcttaagggtgtattttctgaaatttttttgggtcatttcttaggggtgtgaaacgcgtttttcgtgcttatctttgcgtatttagtgcgcaaagttttaggcatttgcctaaaaaaggaagccctattaattattcatctttttttatcgtcaaattgcaaaaaatcggaaattttcattaaaaataactgtcaaagtggcaagaaggtgcttaagaaaatgtcttagattaaaaaaatgggattaaacaaaaacaaaccacataaaatcccttttgaatatccctcatttttagaattgcgggatttgcgtgattgaatgaaatttaataggattaatccggtagggccgtcacgcaaaaacttaagttccaaccccgaagcgggtgaattttcagtttgaaattttgaataaataatcaaacataagggattatgtaatactaaggaaatcaaaaatatgtacaagtggtcaaaatatataccaaatatgtaaattaaattttttaatggttattttttgtaaaaaaaattcttcgtaaatgctgaaataggtacaaaaataggcttagaatcatattttaatattttaaaaataatttttggtatttttttatttgaaaaaacctatttttaggcatacattttcaaaaaaatttttaatttttcaaaaaaatttttgtaacaaaaaaaaatgaaaatatgtacgaaaaaattgcgaaattttgggatttttgtaggcttctttggatttgaattgtgcattttgttgattcttcatatctgagaaaatatttttttttgcaaattaatttatatacctaaatgcaaaaaaaaaaattttttgcacgtctttttgttgaccgaagtttttttttctctatttatatgcaaaatttgtacaaattggtattgatggtaaaaaagttaattggagagaagaagcaaatgttgttttttacactgttaaaaatgaagggaattaattttcaattcattttattagaaaaaaagagattaattcaatccatcaaattcttttctggtcttagcctcttttttaggtcatcattttgccgtaattttttatttgtgccctcccctaaaaaaatgtctccatttttgtctctttttccaaatacacttttttagtatgtacttttatttgtatatttaccatttttaaaaattttatttttattaaaatatcgagattttcgaggagacaataaaagatgacataattgtcattattttttgaataatttttgaataatttatttattcaaaaataaaataaccaaaagaagggcatatgccacttacacttttgatgaaaatgaggaaaggtaaatgaatagatgaaaaaagacaattgaatttctagaagcatatagtcagacctccagcgagaaaaaaaaattttttttgaggaaaaaattttgttgagaaattggaagtactggaagaaaatgtttttttttttgtttagaggaaatattttggaggtctgacagaactatttattaaaaagatgagggtattgttttttgagcgattgaatttggtgaacaattttgtcggtgggtggcaatgatattaatgctgcataacatgcgaggattttttggtcaaaaacatccggtggtttggaaacgtcttcactggcctcgttctggtttggtcctttagcaacatcgggtgtctggtcatttgtcgtttttgggagctgggttggaggtgccggtggagctgggttttgttgacgttttcggagacgcgcttcgtattcctctttgagttgttctttggacagcgccggacggacgaacagacggttcaggttctgttgggaacggagccgagcacgctcgcgcttccatcctccgagtaccacatgttggtgtgtgggtgttggcatgaccaccttgagcgggcgtggtgttgttcgctgcgggtcgtatcgtccgagtcgaaagacggccgttggttgggcctcaacttcaagatggtccaggatttttgtgatggcttccctgtcttcctgaacacgctccgatgggcggatggcattgctttccgggaggccaatgaagaccagggtgcgttggcgttcttgctcttcgagtgtggcagtgttttggtccaggtccagtgcaggtggcattgcacgtttggcgcgaggtggagtgatgtttgatgcgttggttcgcttcatgtcgattaattaggaaagaaaatttgttgttttttgcgatcttatttggacaattaattgccatgtatcataatctaacaaatatttcagtttctcatgtccaaatcagtgattgatgggataaagttgatactgagcacagctgagcattcggatgtccactttttggtggacaaaatcttctaccaaatttcataaaaacaaaaaatatttctcttctcaattagttttttgaatcaagccttaaatcagcaataagttacatctttttatattcttcataaatttatttagcaaatgaacataaattttcagagttttcccggagcgcctattggccctccggacgcttgctttgtaaattggtttttgacgagaattcgttctttctcagatttttaattttaattttattttngaatttttctttgccagctaaaattaaacgatagtaatgtgttttactggtctcgaaatttttaaaacgtttcaaggcgcgttttagagttctgaataagaattaggctttctttttctgccaattccgaaccccgcatccgaacatattttcaaaaaaattattcttaccaaaatcatgaaagcgtatttcgaatggttttcagggtagctgatcatgaatccgggcaattctggaaaactcacatatttattgacattttttccaattttttggcaactattttggcatttttctgcattttagcaaatttttctgcctttttatcaactctttaggtatatatatttctcgatttttagcacataaaaatccatccctatcattgtaatatgttgctttatgaaaccaaaacactttacaaaacataaaaaaatataaaatttaagcaccaagaaaattttgtgccctccaagactctcttctcatcctgctgatttccttcctttcccttttcaatccttctcgaaatgtttacgctattcacatgtaaaatcaatggccaaggtgacgttgtcctcgtctttgttgtacaaccctttgcttgggtccattaattccttaatttaccattacaatattaaaatgtaaattaactaattaatttccactcaccacaaatgaaatgaaatagtgccaaccccaaatcagcgttgcattgttaaaaattctttttacagggaattcgttcttaaaatcatccacaccgttcttttgagagacaattcgaagtgttgccgaacatttgcggctccaatttccatcttaaagcaaattaaataataatcaaatttatattttcacgcatttcctttaaaaaatcacttctaattttatgttaaaaaattactgtttaagtcttttcaataattaattacaccaattttatgacaaaataattacatttctattatataatttgataagcaaaccttcttcagaagcatcgcacaaaaggaaaaagcccaaccatttctcattgtcagtgctttcatctttcttatttattagtgccacaattttccatggcattccctttatgtacacagcagtttcactgttacgttcacttccttcgatttctcgctcaaattccgatagcttttcaattaccgtagaaagtgtgccgttggatttgtttggatcggaaa

SEQ ID NO: 8379 - DNA, 4466 bp, Heterodera glycines
ctgtctaatcgtgaagtgattgagaatttcccacccccaactaatgtcaaagaaataaaaagattccttggaatggtttcattttttagaaaatttatcccaaactttgcacaaatagcatacccattaaacaaattaacccgaggaggagcaattgaatttgaatggggagagaacgaggaaaaagcaatgaatttgttaaaaaatcacttacttaagtcgccgagtcttcgggcgccaaattatgcactaccgttttacttattcacggatgcatcagctttggcttatggtggagcattaatgcaagccggaaatggagaaatgtttgcaatcgggtattggtctcgaaccttaactgacgtggaaagtcgtctcccccccacccatggtgagctagcagcaatagttcatgccgtgcataatttccgaccaattgtttatggaacagagcttgtaattctaacggatcatcgccctcttacttttcttttcaataaagcaagttcaaacccaaaattgaaccgttggcttatggccatacaagagtttgaaccgaaagtaatttatctcgagggacgagccaataaagttgctgatgcattgtcccgtgtccccattgcatggaatagtattgaggcacaatttaaggacgaaatacctcatttgctagcgatcgaagaagcaattgatagggaaaaattggaaagggagacgaaaagtgatcatttattatcaagagtgatcacaaaaataagggagaattggatagacccgattgaggaagaattattaccatattaccaatctcgagacagtctgtatatggaaggagggttaattaggaagcgaccaaacggattaattgttgtgccaaagacaatgcaaattcaaattttggaagttattcacaaagcacattttggtattgttcggagtaaggccaaagcgcggaagcatgtttggtggccaaaaattacggaagatatagaaaattttgttaaagaatgtgtaatttgtcaacggaatgcagcctctccaccaagaattgaccctgagcatcgttggcccgaatcgagatttccctttgaaagggtgcatgcagatttagcaggacctatttggggcgcgtattttttggtgatagttgacgcttattcaaaatttccttttgtgcatcaattaaattcaacaaattctttctccataataagtgttttctgcgaaatatttggcatctttgggtcaccccgtctttggtgacggataatggccctcaatttgtgtcagcagaaatggaagaatttttgtttgctgaaggggtaatacacaaaacatcggccccttaccaccctgccagtaatggggaggcggaaagatttgtgagaactgtgaaggatggactcaaaaagttgctggaggcgggaaataacctcaaaagggcccaatttatatttctacaggaataccgctcatccccgtgtcctacattagatgggaattgcccggcacaattgtttttaaaaagggaaatgcgcaccggcatggaccgaataaaaatgccgaaaatgaaagacactaatggggcagaccctcaagtgggggatgaaatgaggaatgttcaaaggaaaggcgcggagagtcgccacaattcaaagcgtaactttgagccaggggatgcggtgtgggcccaacaggcgggtgagaaaaacagatggggccctggagtactgcttgagccaataggcgaacggatgtggagaatggaattggaaggaggcggagagaagactgtgcatgtggaccagataaaagagcgaagaattgcgtccgctcgtcattgatgaagtccggcgctggggatgtctgcagaactcgcaggaaatgctgtttctttttttgcttatttttgtgtattttctctgaatccaatgtccattcctccttctttctttattatttttgatcaactaattttctttttttaagttccttttttcttctctcccctgtacattcactgtcaatcactttccccaatcaaacaaatggcaccggaggaccaagtcccgaaaatccaggcggagaaggaaaatgttgagccactggcgccactggcggaccccgagaaactgcgcaagcggcgatcaccaccggcaccaatcgttagcgagctgtctcggatgatggatcagttgaaggcctccatggttgcggaaatccagggctgtttggagcgtgtgcgaaatgcgatgatggatgaagtacagctggcgttggacaacttgtgggcaaaaatccaaccggtcatggtggatcatggccggtcgattacggccttggcggatgcatttgatgaaatgaccatgaaagaggccaaggataatatggaggaccccagggcgggaggtccgggggtaaatgacccaccggctaatagcccaccagagagtggaggccaaaataaccaggctgacaataacaacccattacaaagtggaagccagaatgatcagttggctagtcagtctgatcggcccgcccaatggcaaggccgaggttcgcgtggcacttggcgtggtcgtcgagagttcgagaacggggggcctggtcgagtgagctatttgcgacgccagcttgagcgtgagtgcggcggtcgagtgcgcatccagcacccctacatggaattccgccgtggccgtggttatggaccaagtggcacaactgaccgcgcatttggatcatatggaggacaaaactctggggggccaagccgtgtgcgccgtgggaactgatgttgccaaaaatctcatcaaggcggaaggaatgttggatctcgccgatgcctgtctgttttgccatttcttttttaagcattaatctctcttttcccagcctaatgttttccacttaatttataaacatataataataaacataggacaaaaatagaggcaatcaaaagaatagactattatagttgaggcgtgttttggtatgtatatactaaaagtttacatttatatctaaatttcatgaaagacctaagaaaaaacgcaaaaagcaagttgtaatttattatataaataattaacagatcaaaaatttaatatatcaattatcaaaatgcttgttccaacaaaaattaattattagatgtttttatttatgaaaataatacaaacaaataaacactatataattagcaaaataaagaaaaatgataaattaaatttttttttatatatactagaagattaataataataaaaaatgagcggttttaaatttaagtgaaacattacttgttagaaaattgaaagttatagaaagaagtttccatttctatttaatttacatatatgtaaaaattaattatttctatattggcaatatcaaaagtgctctagttattgaaaacagcaattattaatagatgattaaaaaattgaaattcttgaataatgataattacttcatgcacttactagtgaaaagttatttaaatcccttaaatattcattaatgtataaaaataacattatattttattacttaacttttgtttgggaaaactttttgttgctcaaaaaacataattctaataagtagttgcaaataagaaattttttttgattatattgaagtaaagacaatcaaatattttaaaattatttaataaagtttcttaataaatcttctataaaaaattatagaattaaagagataatcaaataataaaaaaataatttgaaaaattattcaacatttttaattctttctaaagaccaattaataatattaaactttttaatttatgcataattaagtttatgaaatctatatttaatataaaagctggtatgaaggaatgcgtcagaaaccctggatagtagcatgaaagaatctaaattagtcaactataaagtcaatacggcagaatctaatagcaaaggcacggtattcattttaattagctgattttatatttattattcaagtacatacaaataatttcctgtcctactaaatagactgtatttatgcatttgtttaaatcctcgaagagtaataaaataaaattaaaggtataacataggtacaatataaaatttcttatcataattcataggacaattatatttaaaaaaaaaatttagaaataatatatttaaaaaatattttaaaaataaaagtaaaagaaaaacattgaaataaatttaataataatttaaaaatgtaaaaaattaaataacaaaggaaatctatatttagagtaattacaaaaagcgttgaaaatttattaaaaattttttctaacaaatatttaatttgaaaaaaatataaatttaattaaacaaaaattttatggaattaaaaatataaatttaattaaacaaaaattttttggaataaataaaaagaaattgcaaaaatctgattttttaccaaattatacagaaata

SEQ ID NO: 8380 - DNA, 1953 bp, Heterodera glycines
ggattatataataaattaattattaaataaagaatgaaattaaattgacaaaatattaaccagttgcattacattaaaacaattggcccggatagaaccacagttgctataattgaaagcactcggacaagaattaaaatgagataaaaaaataatataaagctgaaaaaaatatttattaaaatatgcaattaaaaaataaatgataaataatatcaaaaaatattgtgtaaaggcgctaaagcgctaaaaattaaaagttaaaaatccaaagggagcaaaataaaatttgtaaatctaaacagtctgaaaagtgataaaattggtaaaccaaaaagacacaaaagtgccaaaaaattgtgtcggtaattctgaaggcttgaaaagatcaacagaacaaatttggtatcaaaaatttgctaaactggtcattctcaatcaccaaaaaagaggtacgaaagtacaaaattggtgaccggtcgtgttcattggtatttcgactccatttgctgaaaagctacggtggggagataagttatctaagcgataattaatgatctatttttttaattttgaaaagatttgaaaaaaattaaaaaataaaggaaaaagataatattgtaaattaaaataattagcgcttaaaattaaaaagaaaaccgggttttatgctacaaaatttgttattcctcgacatgagattaatatttaaaaaatctatcaaaaaattaaatatttaattgtataatcagtctctcaaaataaaaatgatgttgacaatccgatacatcaaatataaacaaaataaattctaacaaattaaatattattataaattttaaggatgtgccaaagcaatggtactacggttccgttggttcgctttataaaagaaaatataaaccagcaagaaattaagaaatttgtcaatgtatttattttttaaataatgggataaacgaaaagaaaatagaaatgaatttaaagaatgaataattacaataaaattctatacattgatcaaagattatatattattataacaaacattgaacaaagcattattaagaggaacaaaatacaaaataatatagcatcagcaaaataattatgaatttttaaaaaaatttaaatactataaataaacctaaaaagaatttattgctagcaacataatcagtatgcatcatgagtcactcagcacaaaacccaacttttaacccggacccgttatccgggcccagttttttgaaaatccattatcctttacccgacccggtaggtccgggtacccggataccaaaaataccctggtaataatggggcctgggtcaaattgttgatcaaagttgacggaaatttttttaaatataattaaatttaaaaacgaatgtttcggtgttcatgtggcttagtggttaatcttttggattcgatgcattcgttctcaggttcaatcctccttcctcattgctaactattttgtactttttaaatattttattgaaaactgttattatcatttacataaggaaagctccaaataactatccttattttaatagaattttataaaaatcttaaattttacaatatccccataagaaatttagaacaaattaaaaaacattctatttttcatgccttttcaaaagtataagcttttattctcttgaaaaaaaatttgaaaaaatggattttttaatacccggtttttccgggtacccgacccggtacccggtttcaaaactggtacccgacccggtacccggcatttcaatactcggtaatacccgggcccggtttttcccaaatacccggtaccgtgcaaccctaatttggaacaagagttttacttaattgaaatttccattttaataaaagaacgcattagaaaaaaacagaatataaaatgtaaatcaatcgacaaaaaggcgcttccaaatttataga

SEQ ID NO: 8381 - DNA, 4467 bp, Heterodera glycines
ttggaaatatttatttcattttgtacaactgctcatagtttgtttctttttctttctttctttctcttgtattgataaggggggaaaacgggcgcacgtcaaaaatcaaaatgacaggagtcaatttggggtaattactcataaaaaatttctatctaattgataataagtaaaataattaacttccatattctgtttaaatttcattaggcgtattgcttcccttccctcccatttttgcaaatttgatgcgatttcccttataaaattccctaaaaattggtggtgtgttcctgtttttttggtgctgatctgatttttttaaacctaaaatttcgctatagtgagattggctggttaaacttatcatccgaatttcattgggttttaatctttctacctcttttcctgctgaaggtctctctgtctaaaatcctaaaaatttgtttcaattaccataaaccatccttatttatctataatttaaataaacattgtaattccgattccattctttttttccattgcatttccttaggtttcaaacgaattccttcctttctattgcttggtttattccttttatgcctttttggctaattttatctttcaaatgcgattcaaaaggatgcgtcaaagtgccgttgttgttgatgatgccaaacccgtcgcaaaagatgaaaagtatttgaagaagtgcactctgtctgtggaggggatgacttgctcgtcttgtgtggccaccattgaaaagcaaatcggactcttggcgggtgagttggattttgttggctgccaattgcgatagtgctggagttcccaccccccccccccctccatttttaggaaaaaaagattttcgctaaaagaaaatgttcttgacattttttctagggtaaaaaatgtactgaattataaaaattgaaagcatatttctgtagttttttgagtcgctgattattaatcctgcacaaattttggcatattacgattattattccgttctcgaaatgtttcaaaaaaaaaatcttgaaaaattttaaatcctgggttcgggataagccaaaattgatgtgggatttgaaacatgctttcatgaaataattcttgaaataaaaaatcttttttgaagaattggagagtgataagctccggtattttgccaattgttgcttcatttgacaatttaggtgtccattccatcaatgtcgttctgatgtttctcaaggccaaagttgtgtatgacgacaccgtaattaccgcctcggatattgcccaagctatcgacgacctcggcttcccttgccaagtgatcgaagacgacaacgccggcgacaatgagcgagtccatcttctggtcagttggtatttggctttctccgaagtgctcttccgtttccgatcggtggaatgactcacgcggcatgtgttcggaggatagaatcgcatgtgttggccttgcgcggtgtcgacgcgtgctctctgtccctgcacacttccgttgcgaccattgaattttcgtctgcacttgttggactccgcgacatcatcgaccgtattcaggttcaaacacgcgttggttgacccactgacaatgaaactgtaaagagagcgggggggggggtgcaacaaatggcaaatgtatttatttatttaaaataaaaagaaccaaaagaagggcattgctgccgcttatacttttggtggaaataagggcaagttaatagtgaagaagtcaaatgtcatttggaaataagaaatgggataaaatgaatagttgtaacaaacgataattgaatttgagttgaagtggagaagtcagacctccaacaaaggtaaatcaagttttttttggaattggagagaaaaaaaatttttgtggagagttttgttgagaagatttgaagtttttagagaaattgttggaggtcatagcagaactatttattaaataattgagggaattgttttcggaaggattgcatttggctgattgctttgtctaagaggatttcttcttcaacggggttctgcggtttggaaatgtgttcgttctctgtccgattaatgccatcatttgacagtctctcggctacagtgctgagttggcctctcgcgacaatcgcctcaaacggatagggcacgaagaagacattgtgcggtggcgaacttcctttctgatttcgctgatttttgggatcccagtgatggctttgatgatttattaccattggatcctcaaaactccgatgaaccgcgaccagcaagtccacattttcgcccccgcactctctctggacaatttgatccttttccttttggccactcccgtccaggcgagtcgacaacaataattatttttcactgaccaatgtcaatttatttcatttgcaatattttttttcaagtttttcggaggacgaaatttttacatgcaaagttggaaagcgctcaaacatcggacggcaaatatgtaaattaaattggcaaaaaaagtttagttaatctccttaattttagggatgttttggtcgttttggccacttcgattgcttatgcttattccgtctccgttttgattcttgcctttctgttgcaatggtcgtccagtccaatgactttctttgatgttcccccaatgctttttgtatttatttccttgggccgatggttagaaaacaaagcaaaagtgagtctctctttgaaatgttttaaactttttaaattttattggtttcagggcaaaacctcagaggcattaagcaaactgatgtcaatgcaggcgaaagtggccattttgatcacccgagacgagaaaacgggtcaaatcacttcggagcgcggaattgacactgaattagtgcagagaggcgatctgatcaaagttatggctggggagaaaatccctgtggacgggattgtcgtggagggcaaatcatcggctgacgaatcactgatcacgggcgagtcaatgcacgtcgtgaagaagccaggtgggccggggtggtggcagtggggcaatcagttggattataaaatttctttactataaaaatgacgggggaatgcgggtacattaggtcccacttcagtgttagacaaagttattaatcaaaatgggctatttttgagtgatattcaaaaataaacagatcactgttttgttgttgttgtttcttttgattaaccttaactcgcttcatgccaaataaacagaagaattttgtattcattcgaaagtctgtttttttcaaattgtaagcaaatgtctgtcaatttgacgcacagaaagagttaagagcctttcaaatttgcatttgcttagattctcccgtcatcggcggctccctcaaccagtccggtctgctcatcatccgtgccactcacgtgggccaggactcgactctctcccaaattgtccgactcgtcgaagaagcacagtcgtccaaagtctgtttctcccccccccccccttattcatctttttgctaaggctcctctccaacaaacagcggacaaagtcgccggttatttcgtcccatgcgtcgtcgtcctctcacttttcacttttgtcgtttggctttttgttggagtcttccacaagggacaaacgaaccataaaatggcgacgaatgcttctcatcttcagtctgtctgctctctttttctccctaccttctcacttttcccttagttctcttccccaatccatcgaagggataagcgtggagcaatgggaattcattttgcgcaaggcctttgaatatgcgatcactgtgctgtccatcgcctgtccgtgttcgcttggactggcaacaccaacggccattatggtgggcacgggagtcggagctcggaatggcattctcatcaaaggcggagagccattggagcaggcgcggaaggtaaattgtttaatgttatcggaaacagtcaaaagcatcaattcataatattttaatcccgaaaatacaaagtcccacccccttttggcctaccaattataaggacggttgtggtcaaccctcgcccccccccccccctccatatatatgctacgaatttatagtttggttatttaaacaattctttttatacagattagaacagtagtgtttgataaaacgggcacaatcactgaaggaaagccgcgagttgtcaagctgttcacaactttgcctccgagccaactttcgatccatcggttggcacttttgatgggcagtgccgagtcgaacagtgaacatcccatcggcggcgcaattgtccgttttgcccagaaggtgcattgtccctccagcaatcgctttcattcactttcgttttgctcagtttctccacaatgaccgttgggcccgtgtctccaaattccgtggccagccgggtttggcctgtgctgtgaagtgtccgatctctcattcgtgctaaatgagtccatcgtcacggccactgagatggaatgggctc

SEQ ID NO: 8382 - DNA, 962 bp, Heterodera glycines
cagaattttcctcatgagattcttgcctgtttgaagtttaacatttcttacatatcacatatatatggatttgtgtcaaccataaaataatttttcattgttttgataaaaatattggttaatcgaaaatttttttttttgcgaattagagttttaaaatttaacttacctatataacttttagcggtgggggtcggtttagtctggccggtttagccggtttagtctggccgttttagtctggccggtttagtcagagggtcggtttagtcagagggtcgttttagtctggcaagctgtttttgtcctacattgatccaattctgatttgtttctcgaaaattctttaaaattaacaccataacagattatcaatgtgttaacaacaaaaaaataacaaaacattgaaaaatgaatacgggcatatttcataatttcgagaaataccaacgagaaaattgatgatattatcaggattaacattggcatggtaattttgatcattttggtgagcagggttaatgttgttgatggtattgtaaccctgtaagagtcgaagaattcgtatcaacggcacgatattttcgcgttttttgaggagggacttcaccagcgatgcatcgtgcgatgtctgcatcaattgacttttctcatatcgaattgtgttgatgaagcggaaaacagttggatataaacacagcggcccaattttggcctcccagttccaaaaagatttgcatgtgtggctcagtggtttttgtaagatagtaaagggacaaagggtgttggttcgagtccgttgtgcaacatgaatattttcatttatttttgtccaaaatattaaaaaatgacgaattttgggaattatttttggaggtatttgccaaccaacttggacaatcatggtatcattcgaaagctcttgatgaggagaagcttttcctaagcaaatgctaagcact

SEQ ID NO: 8383 - DNA, 5398 bp, Heterodera glycines
  unsure (1)..(5398): unsure at all n locations
ggattgtccttntaaaattaaattgtaaataaatttcgtaactttccctgccaaatttcagggactcgacacgcatgacgtcggcggttacctcggggtcagtttttcggccatttgtcccctttttccgtcgcccgtctgtccctttccccaaattttccctcattttgtccatattcccaaaggacgcgttgccccggtcggataagcccggactaaagagtctgcgcaccacacggacactgaaggagcgcatgtgcatcaccattgagccgggctgttactttattgactcggtcaatggggagatggaaattcattttgctttttttgaaatttcagttgctggacaaagcactcgccgactccgagctgtccaagcacataaatgccgaccgattgaacgaatttcgggggaccggaggggtgagaaaataattgaccctttaattgctcaataatttaaataattaggatgtccaattaatgccttttaaggttcgcattgaggacgatgtgatcatttgggagaagggcaacgagaatatgaacgcggatgtgccaagaacggtggaagagattgagcagtttatggccaaagcaaagggactttagggacggagaaaacaaacggacaaatgacacttacttacaggggcaatgcaactataataattatattgtgcttttttttttgtttgtttttttaaatttaattcgcaatttttcatcgcgggattaatttaattgatatgtaatattcgaatgaaatgatatgtttttatgctcgagttcttatttaaatgcaaagtttttctacacaccagaaatgtgaattttaagtttttgaagaaatcacttattggcatggaaatcctacacctttctggattataaaaaaaaatattcggatttttcgaaaaaatcaagggcgctttcatatgacatagaattttcgttttgatcaatagattcatgattagcccactaccttaaaaaaagttttggtttgtcggaagggatcatgtaatttttaggaagttgcagcatagcggtttccatttcaaggacagataaagctaaaacatatttccgtttcaaaattccacaaaatgacgcatttgtcaaactgaacaaattgagggattaacgaaaaaaatgaaaatttaatttgcttagctgtgattctgtgatttgaatgggaaatgaaagcacataaaaggagcgaatgaatcagtgaaattattcaactttaatttgactgtgcttccgaattgtcaaaatcattaattaattatcgcaaataatggccaacaaatttttaattgctgcttttattttgacaattgccatttttgtcaatggacaaagtgaggcgccgaacaattcgtcggaaatggcatcggaggagagcaattcggaagagtcgggcagtgaggagcagcagttcaacccattcaaatttcggccattttttggtccttcgtcgtccaacagttcggcaccgccgcccttcggcttttggcccccttttggacgaatgccgccatttaaagtgccttttggcccctcttcgtccaatggttcggcaccgccgccctttgcctttttgcccttttttggacgaatgccgtcgccatttaaccgccccgccaaccgaccgccgtctgacaattgatcactttttgagtgatttgtgtccgtcgatcagtgcgaaatgaaaccgttgatgagcaaatgatttatttgccatttattgttcatttttgactttaaaagaaagaatatattgcataaatttattcaggcactaaccttccctaattatcatttttaaagaatttgaattatttttggctctccgtccccaacaaaacgtttctcgagatcaattttcggtctcagttctctagtcttggaaaattttgactctcgagcagccttatcacatcaacagtcccccttaattatctctaataaaattttgatgaatttaaaaaatgttctttccatttaccgtacttcttcgattatagcccccgggggctctattgttcaacccccctcaaaaggggggctttattcgagagggggttctaatcgaggggggggggatataatcgaagaaatacggtattctttccatcttttgctaagttatatgacagtaattctaattaataccaattccnaaattttggtttaattaatccaagaataattagtcgtacataattttttgcgaactaatcacatcacggaaagcatttgagcattgacatgagaccgaccgacntggttttggcatatccaaaatggatggaaagagacggacgagaacgaattggatcaaaagaacggatttaataaatttatccgatcagaaaaagaaaacgcgaagggatggaagggaaaatgatcaaaggatgaccctgtcgaggataaaggatgaacatgttgtgaaggatcaccatgttttatgagaaatgcccccggagacagcggaaaaattagcgaaaggaaatttaaaaaaaaatgaaagcgaaagcaaacgaaagaaaggcattaattcggagtataaaagcctaatgagcatcaacaaaaatcacatttgtccgatttcttctgctatcctcccaatgttcgcctccgcttgccgcttcgttctgccgcttttccttttcgcccttttggcacttcccccggccaatggcacgggacttcccatgcagaaaatggagtgctgccaacaacagcaaatgtgttgtgccgcaccaatgcaatgcacgccatcgtgcggagggtgcggacggcgccggcggagagaggcgagcgattggggggataactaacaattaacagttcgaatttttaggccgccgttcagccgctgctcagagggaaagaaacgccgtgcccacagacggagtggcaacagctgatggaaaatgtgggaaaaagtgctaaactcagcagctaacccggaaaaatgttaaggcaattgtgccactcgacgacgtccaatcggtgaactccgtccaaaaggcgctcctccgacgctttccggacaacaaatttttggtgatgtgcgcaatggcgggggagggacgcgcggaaggcaaagaagcgctgccaaatgaggtgagccgagggatttggaggatttaaacaaacaattgagcaacaattacaacaataataactcttgcctttccgtctcaaatccgtcgcttatttctaccgtatgcttaggtccacctcagctccagtggccacggctactgtaacgttgtcagcgaacgcatttggtgccaagcggccgcagtcgtcggctgatggcacttatttattattttttcttttatattatattgttttttgaataaaataaatatgatttgtatgggttttaataaattctaagcaaaacaattgttaaatttttgattaagggaaatttctcaactcgaccaacgaaattttatttttgtaatttattgtttgaatttttggttttttatttctgtcttttgtttttggtgcgcttttatcattttcactttaaatatttctcaattttatatttacataaagttacagttgtgtgataatattgagatttaaaatatatttggcgttttgttattttattaatttgaaataaataactgtcttcggcatttggcagtgttttgtgtttgctttgggctattgtctttgctgcgtgctgcaactacattattaaagcccccgacaacaatccctattcttttttacgactgttggccaaattgcaaattataggatttttgaaataaatgaaagatggctccgtattgtccgataaacgcgttcgaagaaattctggaaaatttgaaaaaaaaaaatatttgagactaaatgagcgtgaaaaaaagtaaattcaaaaattgtaacttcttttagggatttgatataaggcctgctcgagagtcaaggttttccgagactcgagagctgtgactgagaattgacccccgagaatcgattttttttttaaattttactaaaaacccagatggagaaggagaataatttaaaatgataattagggaaggttagtgcctgaataaatttatgcaacatattctttttaaattcaaaaatgaatagcaaatgtaaatcatcatccgtttcatttcgcactgatcgacggacaaaaatcactcaaaaagtgatcaattgtcagacggcggtcggttggcggggcggttaaatggcaatggcatttgtccaaaaaagggcaaaaaggcaaagggcggcggtgccgaaccattggacgaagaggggccaaaaggcactttaaatggcggcattcgtccaaaagggggccaaaagccgaagggcggcggtgccgaactgttggacgacgagggaccaaaaaagccgtggccaaaaaatggccgaaatttgaatgggttgaactgctgctcctcactgcccgactcttccgaattgctctcctccgatgccatttccgacgaattgttcggcgcctcactttgcccattgacaaaaatggccattgtcaaaataaaagcagcaattaaaaatttgttggccatttttgcgattaattaattaatgattttgacaattcggaagcacagtcaaattaaagttgaataatttcactgattcattcgctccttttatgtgctttcatttcccattcaaatcacagaatcacagctaagcaaattaaatttcatttttttcgttaatccctcaatttgttcagtttgacaaatgcgtcattttgtggaattttgaaacggaaatatgttttagctttatctgtccttgaaaaggggaataaaatactaaggctgcacgcaattacggattacggaaattacggcgttttggacgaagtaattacggatttggtaaagtgaagaatatgcatcttattgtatagaaattttataccattcggctcctctcggtctgtaataaaataatccgaaattttgcagcgaccactctttaaagagttattgacacgggactgaagtggccaaaacagtttctgagggccttgaaaactttcatttgattgtaactaaaatgttctccactaaattggcctattaaaagctcattttttgccaaatttttcaatggaaaattttacgaaaattgttagtgtccaattttgtgggactcaacaagtcgaagtccgcgttcggttccacctttttttgggacgacggtttaaatccagtccgttccatcattttcaattgaattttccacattaaaatgtccgtttcagatacattttttcttttttaattattgcactgtaacgttgtcagcgaacgcatttggtgccaggcggccgcagttgtcggct

SEQ ID NO: 8384 - DNA, 1119 bp, Heterodera glycines
  unsure (1)..(1119): unsure at all n locations
cccccccccccccgctccctcttggcgatgttaatgatgatgggttgttgcgcgagtcttcttgcgagatttatttgtattgtgtgttttagggatttcctggaggaagttgccgagggatgacagcgacaaagcccggaggaaaagctttatcacagcaaaagagaagcgagagccaacggagtccccgtgggattgatcaccagcaaaaggccagttgataagcaaatccaccttgtgatcagagttatcactatcattagcagcagcatcagttcttttccgcttgaattaatccgctctatgaaaaaggcgctacaaaagtcaaagtcataatggacccaccaaatttccgccacttcgctgcatggacatcattttcgtcccaatttagggagaaaagcgatgctttaccacccaaatttgcgcatatgctttttgccaaataattaacatgaaaataaaataatttctgcttaagagattccggtccaatttgggaatctttctttttctgtccatttctatgacaaaacaaagtgaataattattattacaggcgaaaggagaaggcttttctattgtaaaatctcataattttatttaattaataaaattgtgatttttggcactgttttcattttggcattttccgccattctcccttctgcggactttcgctctctccgccgttccctcagtgacctttcgtcgtccttcaattaattttgtttataatctcgtagaccgcagtcaaaccggattttcggaagagatttactaaaaaatcattagcaaattcaccgatcggaacatttccatgcagcggcaacgaaaatttcgatcggtcgtcgttattctctcgctgtgcagcatccttttaaatgcaggtgagagaattattttttgattaaaaagaataacaattttaactctttttaaacaattcattggtattttcagtcggttgtaaagcagcggaaacagaacaaactcagcgacaaggccaacatcggcgggaaggggacggatgcgcgggcgatcaccggcaccaccaacacggngacggttccgacgacagccattctcatgaacattccccgcggggaaaacgaagtg

SEQ ID NO: 8385 - DNA, 4933 bp, Heterodera glycines
caattctattcaattttaatggaataaatcagtaaatgcttttgagaagtagaggccggcgtgataatgcttgaagacttttggaattgggtctaactaaattctggatgaataaaatttgagtaccatttggttaaagttttgtaaaaaatgacctattttgtgatttagagccaattttttaaagaaaaattaaaggttttggcagctctgacggggaaaattgtaattttgaaacagattttttgagaaaacaatccaagttttcaaaaaattttcatttaaatttgaatattcaaaaaagacaatcgcttcaaaaaatttctttataaatttaaaaatattttgaaataggcctcagaaacaaaattcaatacttaaatctgccttcaaattcttaaatctaataaatttcttagagactcacctttgagtttttaaaaattaatttttgaaattcttttaagaatgattttttaggaatacattaaaacaaaaaattttttccacaagaatttaatataaatctttaaaatcttcaaattttcaagatcatcatcatccggtaaagggcagaggctgcctcggccagtaagtccctcggaggattatgcagttttgccaaggccaatgaattcgagtgctgtggtagggttactcgggatttgtttgtccttttttgtttgaaacgaagggatgcctcttgttgaagcgatggaggtcttagctcttccaagccaataagacttttgattcttgaacatcattcaaagcatgctgtgccttccgttttctgttaagttgtggatgtataggaatagaaggctgtggggctggttgaaagggttcttcctgctgaatgtcagcgggaatttgttgttcttctcttcgccgtgagtctggaggcagttttcttcttctttgtctattagcaattttagaggaagaaggaaccggctcattttgatgaattaattgtcttttgaccccctcctcccatgaggaataaaattcatttgcttccgtttttgggccctagtgccagcttgaggagttggtgaaggtgggactggtggcatttctacatcatcgtcattgtaacggtgatgacggcgttgtcgttggcgactaagtgaagctggaggtttgggtccttcaggccccaaatcaataatttgctcatcatcatcgtcgctttcgttgcctctcagtgtcttcagaccttttgtaatttctacttttgctggtttattttggtgttcatctctcaggtggagataacgggacaattcctggttataatgaacattttttgctgttaaatttactaacatttctttttgtcctttgcaaagcgcgctgaacaaaatccaagttgatgtctcccgaatcactgtttgtgagaccgcgataaatttcatcaggcacaagaacaaattctgatgccatcttaactggttacttctcggaaattgcgcttgaatttatagcggagcgcgtcaaatctattaatattggagtgagcagagccgcaaagaccccgcctagtccgcctccggtttgaactaaaagtttgcgggctcctttctcggttcttcgtcgagcaagactccgaacaaaattggcatatggcaacagacgctttctctggcgagctgtcattttgaaacgttgacaaaggatgtttagacaaatttcaacgagtgttagcaattggtcagcatttgcgcgatttaaaattagttttctttttctgtacgatttagtttttccaatgtgcgaataaaatcaaaatttttatgaacaatatctccaattttataagagcccattttttggaatgaaaatgattttttctccttcttcttcgtcctctttaaatattccgcttcgaagtctcagcaatgggtttgaagcagcgtgcatatcaacgagcagatatccgtacggtctgctggttgcaatgcggtatgccgacagaaaataatccaatttccctggaaacagttgtactccaatgtttctgactgccaaagctgagttgggagcccgcataatcaccaaatattgagcattttgtctcgctactttaatccttttctcaaacaaattttgggtaacaaatacgacggcaaaattctgatgatgagattttttagtgaataatgcactaagatatgcttcgtcaatcgatagcaaaaggtcgtcgaggataagaagcaaaggtttgggtaaacgattaatcagttcctcaggcggaactcccgaatacacattaacgccacatttttggagcgttggcacaatgctagacatctcaccaaaggcataaagaattgaagcaggtttaggatgaataagttcggaagactcggcaataaatcttattaaaaaagtactttttccactccccgatggtccagaaatgagcatgccgaaaggcattttcaatttaagctctttatccgtataaaactgatttccaatcattctgattattaaatttcaaatacatcgcaagacttaaatagttttactgtttacgggaaatcgatgcaattgctgccgcttcttcatcttctgcttccttctttcctttcttctttggcttcttcttctgcgaaacatccaaataggtagttgcagccgaaacactctcaagaaattcatccagaatttcttcgtctgtctgttccttctgtttttcgatcggaggttgctgcttaggttgttcattgctcatacccattgttgcggcggaaatggcagaagcaaactcagaggcgaccccttgttgctgttgtatcatctttggcttgggttgttctgcaccaattcccatggttgccgctgaaataggtccaaagaaattcgaggcgtcggtttgctgctgtctcggctttggattggttttcttttgttccacatccattgccattgtcgctgcggcaattggcgaaaagaaatcagaagcttcggaacggttctgatgtgtcggttgttgagttgacatttgcccaaagtcgagccccgttgttgccgccgaaatagaagaagcgaaatttgactcttggggctgagtttgttgagctgaaggattgacggtagttgcgccaaattcaactcccaaagaggctgccgaaagagcggaaaagaacgccggggcgtccgcttgttgctgttcctgttttctttttgggagttttggtgggggtggtggaggcggtaagtggtagatcggtgcgggcgtctgagtgcaagcatcgctgcgactgccatggtcaacgttaaagactcggcccttgttacggatctacaaatttaaaaaatgtagtgtggtaagaaaaattgttgaaaataccttgaaaaaggtataaccgggaagctcgtaaatgacatcaaaaggcacaaaacgggggctgattttaaatcgagtgcaccaaattgtcacaccctcctttgagatacaccattccgtctcgcattcggttgccttgcactccttgcacttgccgacaatgtcgaaaggaattgttcttgccacggcaatgcgttcgctgctcacagtaattccattaatggtgtggctgatgtcgacagcgggcaaaatattttccataagggattttttgtcacgaaggttaatgctcatttttcaagaaaatagcaaaatgaatctatccaaaaattgccaccttttatatacctctttaatttatacatccgtaatttatttatttatttatcatttaataagatggtccctcttatttgtttcggtcgtaagtgtgacctacattcacattacatatgccattctcgaatgagtgaacagcagagaacgatggctctgttcgatcgactcatcatttgcctattttatgtatgtttgttttttctttatttttagcaaaatatgagccgcccgattttacctatttttaaaaaatcgagtagagcctataatcggcactacagcatcggaacggttgtttaattaaataatttttatattcattataatttatttatttttattcactatttagatgattttttatgaaaattccaagccgcagttctacaacaatttatggcagcgatcgttgatcgctgctgcattcattttcattttttggcttatttggtaatttaaattgtaatttttactattttttaaatgttggattaattttaatttttagggaatgaccaaactctggaaatgttgagatatgccaacattgaaagagaaggaccgaggaatattgataaaatttcaataataaattttgaacccttcgatttaactgtttatttaaatgaccttcaccaaattatttaaataaatggacaaacttataatgatccctgattatttcttttaaaaatttttcctttgtgctccttttctcttttcatattttcttctcctcttctcttctcttgttctcttcacttctcaattctcaacggcctcgtctgcctgtagaaataaaaaaatttttaatttacaaattgattttttttaatttgccacctcctcaattggggtcaatctaccaccgacaaattccgttgaagcctgtaaaaatttgtgattttatttatttgtttgtttgtcatcccctcccctccccctcccccaccgttacaattgggcgctctcgcccggcactcccggccggcaatcgatgatcaaacgaacgctgaattgccaaagattatccaaaaggaaggaaatgaaaaaatgggggggggggggtgcgttcacactcacctcacgacggacaagaaggcgaagcgtacgcgggtggccctcatcattgttggaaacaggcggacgacgcggacgaaggcgctcgatgcggcgcaagcgcgctggcacattgagcaaaattgcccaaaaaatacagacctcaaaattatagaa

SEQ ID NO: 8386 - DNA, 1320 bp, Heterodera glycines
agaattaaagaaaaaaaacttacgatttattaactgaaaattatgggggatcaccaagaaattcaccattggggattaaaattcggaagaaaagtcaatggtgcaatggttttcgggatttcctattagaaattaaaagaataaaactgacaacttattacgtgaaaattataggtggaatcacaagaaaattcaagcattcgggcttaaatccggagaaaagtcaattggtgcaatgtttttgggcagtttgggatttacctatagaattaaagaataaaactgacaacttattaactgaaaattataggtgaatcacaagaaaattcaacattcgggcttaaaatccggagaaaagtcaattggtgcaatgttttcgggatttacctatagaattaaagaataaaactgacaacttattaactgaaaattataggtgaatcacaagaaaattcaacattcgggcttaaaatccggagaaaagtcaattggtgcaatgttttcgggatttacctatagaattaaagaataaaactgagaacttattaactgaaaattataggtgaatcacaagaaaattcaacattcgggcttaaaatccggagaaaagtcaattggtgcaatgttttcgggatttacctatagaattaaagaataaaactgacaacttattaactgaaaattataggtgaatcacaagaaaattcaacattcgggcttaaaatccggagaaaagtcaattggtgcaatgttttcgggatttacctatagaattaaagaataaaactgagaacttattaactgaaaattataggtgaatcacaagaaaattcaacattcgggcttaaaatccggagaaaagtcaattggtgcaatgttttcgggatttacctatagaattaaagaataaaactgagaacttattaactgaaaattataggtgaatcacaagaaaattcaacattcgggcttaaaatccggagaaaagtcaattggtgcaatgttttcgggatttacctatagaattaaagaataaaactgagaacttattaactgaaaattataggtgaatcacaagaaaattcaacattcgggcttaaaatccggagaaaagtcaattggtgcaatgttttcgggatttacctatagaattaaagaataaaactgagaacttattaactgaaaattataggtgaatcacaagaaaattcaacattcgggcttaaaatccggagaaaagtcaattggtgcaatggttttcgggatttacctatagaatataagataaaactgaaaacttattactgaaaatataggtga

SEQ ID NO: 8387 - DNA, 1257 bp, Heterodera glycines
  unsure (1)..(1257): unsure at all n locations
aaatcgggagaaagttcaaatggtgcaaattttttggggatttccctatagaaataaagaataaaactggacactttattactggaaaattataggtgaatcacaaagaaaattcaacattcgggcttaaaatccggagaaaagtcaaatggtgcaaatgttttcgggatttacctatagaattaaagaataaaactgacaacttattaactgaaaattataggtgaatcacaagaaaattcaacattcgggcttaaaatccggagaaaagtcaattggtgcaatgttttcgggatttacctatagaattaaagaataaaactgacaacttattaactgaaaattataggtgaatcacaagaaaattcaacattcgggcttaaaatccggagaaaagtcaattggtgcaatgttttcgggatttacctatagaattaaagaataaaactgacaacttattaactgaaaattataggtgaatcacaagaaaattcaacattcgggcttaaaatccggagaaaagtcaattggtgcaatgttttcgggatttacctatagaattaaagaataaaactgagaacttattaactgaaaattataggtgaatcacaagaaaattcaacattcgggcttaaaatccggagaaaagtcaattggtgcaatgttttcgggatttacctatagaattaaagaataaaactgagaacttattaactgaaaattataggtgaatcacaagaaaattcaacattcgggcttaaaatccggagaaaagtcaattggtgcaatgttttcgggatttacctatagaattaaagaataaaactgagaacttattaactgaaaattataggtgaatcacaagaaaattcaacattcgggcttaaaatccggagaaaagtcaattggtgcaatgttttcgggatttacctatagaattaaagaataaaactgagaacttattaactgaaaattataggtgaatcacaagaaaattcaacattcgggcttaaaatccggagaaaagtcaattggtgcaatgttttcgggatttacctatagaattaaagaataaaactgagaacttattaactgaaaattataggtgtatcacaagaaaattcaacattcgggcttaaaatccggagaaaagtcattggtgcaatgttttcgggatttacctatagaattaaagaataaaactgagaacttattactgaanaatataggtggatcacaagaaaattcatcattcgg

SEQ ID NO: 8388 - DNA, 1008 bp, Heterodera glycines
  unsure (1)..(1008): unsure at all n locations
aatcgacccgaaaaaatttcagaaaatacacccctaagaattgaaattttttttcacaaaattgatccacaaatttaattattttttctgataaaaatttttagtttaaaaattgtatttattagaagaaaacactttaagacaattggaatataatcaaaattaagtttttcattaattttttacgtgttttgatacctaaaaagtgctaataaaaaattttatttgcctattttagtgcctatttgagggtttttgtgcctatttaatgcctattttgcgatttttttatgcctttttaggtgcctatttcgcgattttttgtgcctaaaaatggaagccctactgattataaataaattattataaaaatgtaaaaaatgaaaaagaattttgaataaatttgattctgatcattaataaattttttacaaataattttaaggtaaaatggaagaatatattatttattttgattctgatcacttaataatattataaaaatgtaaaaatgaaaaagaatattgaataaattttattctaaatcatttaaaaattattaagaaaatgtaaaagcggaaagaaaattgtgtaaatttggtgttgaaataaaaaacaaatttttttgaatattggcaccagaggcccttagccggaaaaaatttcttagaggaggggaatccgatgaccctgaaggaaaacattttttctcttctgtccaaaaaatgtgatcttcaatttttttttttcaaaattttctgcgccaaaattgtctattttcataattttttattgtttaattttccatgtcaatttttcacatattttgttcaattttaattttaaataaataacagtgccgtatatttaaaaaaagtcaatttgctttgagatacatattcttccttcattaattaccctaatgattgcaacattttgttcatcccccatctcctcaccccactgttccacacaanaaaaacaattaattagcggcacaaatttatg

SEQ ID NO: 8389 - DNA, 1592 bp, Heterodera glycines
  unsure (1)..(1592): unsure at all n locations
ccgtcgattcttggtactgagttggcaatttaactgtaacttaacaaattctcaaggaaaaaatctgacaaaaaatgctgaaaattttctttttgaatattatacttgtaaaataaatgtgtgaaactcggactataattaaataactgaaacataaacaaaatgccgacaatttctgatttccgacacggccctcaaatgggataatcggcaaaaagtcggaaatagcccgccggtgttaaatcttaatttaatttgtttagcaaaaaaaaactgttcccgatcacaattattaaagtttaaatcatttaaaaaaatttatttttcggggtgaatttttccatttttactttccccccccccccccccttctgatgggcactgttttttgattgatgagttttttgatgatgtgccaagtagtggtggttgttttgggttttgtttacgcttttacgacttcctaatccgtcgaagaattctcggacaataagaaaaatgcatcttgcgcaatttttgatgagcttgtcaccatgaaaatataaatatttttttaaaaatccgatttttccaagcattttaaatctaaaaaataaatttaaattttatatatattttttgaaattctatttaactaatttatttttatgcaatttgggcctcagctttctataaacataaactctcataaaggatggttttttttaacagaaattactgtagttttactgtgccttccccaaaatgtcattcgtcaacaaaaatgccacaattcgcccacaggtgccctctgtgttggctcacaaaacttggcaaaactgtgcataattaaactgtgcagcggcccggaaaaaggtcattcattcattggcgattttagtcagtcgtcaccgaattttggcagaatacaacggtgggatttgctattttcgactcactctcgacactaattattttacacccgaaaatacaatgggaatgatgtggggaaactcagcggatttgcttggaaaaagtgccaatttgttcgcttcaccaatggcatatgacaatgctccggcatcacccgccggatttggccttccacatattgttttagtgattgataattattggattaatacttggagggtcccattttgtaatgggatctgctgtcgaaacaatatttagccgaaattaagagaagaaaatgggattaaaatgacctttcactgaataaaatttatttgttatttagtttttggatttttaaatctcgatgcaattaatcactctcattgccttggagtctcggtgccatttaattgtcgagtcttgcaatgccaaatgctaatgaacttggcgccattgaaactcttcagtctttgtgccaaaacctttttcattcaatgtctcttgaatgccacatacatcgaccggtctctcaattaattttaaaactttttaattttttataaaaaaaataattggataattaacttttcttgtaaaaaaaaatgtgtcaaaatgcgtaaataaaatgcaaaattgaataatcatattgccggcacaatatgcttctcatattacaangtggcacacctgctgcc

SEQ ID NO: 8390 - DNA, 4577 bp, Heterodera glycines
  unsure (1)..(4577): unsure at all n locations
atccatgcncacttttgttaatcgtaggaattatttttgcccccccgccctccggcgctgctctgttgcactaattaatgcctctattcatccatccttcgggcgccaggtgaatgcgcaatttgttggctcccactgtttccaatacaattttgtcatccgtccgtcttcaatttttctcgacaaaatcctccccccccccccccggcgtgaccaattttgagtaaatttgtcacacattttctgtgggtgggttggtcaccataactcaactccgcacaaataatatgcatataattggcttgtcgccgcgaggcacacgccgtcgccgtccgtcgtcgccatcgttgttcagcaacaattcaacaaatgacgccaaattgcccggaaaatgtcatgtcatcatcatcgtcccgcccgcccgccgaggagggcaattttgggggtgggtggtcaccggcgacgggtgggcacgggaaacggtagcacccgcattccccgccccccccccgggggtgccctaccctaataaaaaggttaaaggtgcaccacaacaagtcactgttgcgccgctttttttatgatggaaggatttttttttggacgagacagaatgccaaattgtttgggaaatagtcgaatttagaataaatgaagaatgattaaagtattccatcaaatttattttcacaaatttggaaaacatagtaaaattgttatgggtagaatgccaaaatcaataaagttgctaaaaattaaaaaagccatgccgacagttaaaacggaaaaattcagtcagtatgtcctcttctgacatgttctattaacctttgattgttttctcagagaatcaatcacctattctcctaactattttctattctttagcttctgttaagaccattttatccctgaaacggaaatttcaaaattttcaccgttttacaaaatctccccccccccactctattttgggccaacaggtacacccccaaccaaatctataattcaagaagaatggccatttgggcacactgtgtgtctcgattgaggaagaaagcataagcaacaacaagagcaattaactctgcccccccccccaattggggtggtccttcccccgcggcgacattttccattccgccgaccccccaaaaatctcccaccaaattatccccaaatccctttaatccgctctttaagccgcctctggggggagcgggggaatcgggctgggaggggcggggggcttactaagaattttgtcccccccccccattccccggccccggcaccaccccaaaaaaggcattgttctcagctcagcaggtcaaacccctccggggcgagggtgtccgctttctgtccatcattggcgcggcatataatcggaggtttctgtcaggggggcggcgcggcagcggcggggcggagatgggcacggcgggagtccgcacggagaaaatgatggtgaaaagttggcggccgcgccggtggtggcggcggcgagtgcattattattaatatttagggagggggggtgacctacggacggacaatttgctgtttgattttgcgtgaaaattgaacgactttgacaccttaggtgctcttaattgtgctactatttatatttatttggaaaaaagaaaaattgaaaaataatggaaaaattggcaaagaaattaactattggtgaaaaataggaaaaagtgtgttaataaaattttggggattttaatgaaaattttattgcatgaaagtgaataaaataaaaatttgtaatttcatcaaagataaaaaaaatttatttttttctataaataaaaaaaaatttcttttacttttgaattattaaaattttcatttgctaactgtataatttggttgaaacaatgtagaactttaaaaaaccaatattttaaaatatattttttcattatttattttattttttcaaattttcatttgcctcattcattcgattgtcgtccttcacattttttttaacactcacttcatataaaacacctacagaatgatgtgagggatgtgacccatcataatccattgtaaatccattgtaaatcggtcactgttccaattatccacttgagggacaaagtgcttaaatggaaggaacagtaatacaaaatgaataataatggcatggcacaacggcttacatatttttgtacatatgtgatgtatattaggtggtgttaatgggtgccaaaaaagaaatgcttttgtcaagtgtttttgcataatttaaatattaaaattttacaaaaatgcacaagacaatttgttcaaaagtaattttttcgcctacagcgcctattgttttggaaaattacagtggcaaaaatttttcagaggccgaagaacaaaaaaaaaaaactttttggaccccccccccctaactccgaaaatttttctggttacgggcctggtcacgttggaatatggaaattcattaaaattgacgttcagcaattttgagacaattcttttaaatgatcttttgttttttaatccaatttttgtaaatttttctcatttgccgacatttaacacatcaaaaattcagtgatcaaaaagtttgatcaaaaaagtgcataaatttccctccctaatttcacttttttcacttccatcataaacattttccatgctcttcattttccaaaccaattaatttcatcttcatccagaagaaatgcttcgcttccgcctcttcccatttccatccacttctcacatcccatccacgacttatccttcccaccccgaacatgacgaacacagtaacaacatcatcacaaattttggctcaccaccaaaccaccaaaaccatcccgtcaccttccaagagacgggagcataagggggaaaacccctccatctttaagtgggaagaaaattttcttctttgagagggttcttccacccgcgcccgcgcccgccggcgccgatgccaatgcctcttcatcgccgggggggggggaggcgaggcgagtgagcaatttgtccgtcccgtccccctcccccctcccacttcagcgccatggggggcgagggtggaaagggcgaagaccaactaacccccaagcacctcatcagcattcaagcatggtcgagcatcatccagaaaatatggtgtactgctgatgggccccaccggtgtggggttgggcggggcctgaatcaatcgcactgaattgggtgggagcatcgagtggattttgcggggtacggcaccggccccccggacaacgggggaaggcacagatgagagagtgccaaatggaccgatgaaaattgcgggggacggggggaaatgagtggttggggaaatgaggggtacccaaattgctcagaaatgtttcttttccaagaaaatgcagtgccgtacgatgagtgtttaggtgtgccacatataaagatgtagtaatacagccacggattttcggggagaaagttttttttttgtattttaacccctcccccactgaaaattccaattaactcagtttcttccattgttttgtgattagcctttttgcgtggagagggagggcccccgcaccccccgctttgggaattctcaaggtgtgcctcacatatgcttgttggtccatttatgtgtgtgtgccaccacggcgaaatgccatgccacatttataggcaaccaacggtggcgttttgttgaaattacaatgaaatggccaagggctgcggcggcttaaagaagagatgtggccaactagggacgagtaaagggaacaaagaatgggaccgctaattggtctttcgcgcttctctttgggtggatgaagcggaagaataacaacaagcactgagtcctccaagcctgggggcacaacaaaggcttaatctctgtttagtaatcctttaagtgagtagtggtttcctctaagatgatgttgctcctatgtctttgagggattaaaatgggtcaaatgctcactcaattttgggcttatccctccgaccattcaaggtctcgggattttcaggatttatgatgggtggcatatattttagaggtcgctaatgccaaaataaaatcaatgggttgcaacattctcctgagtctcggtgtgtgatgccagaggaagcggagtgtgggagaaagtgggataaacgatatggctgatagctcagtcggttagagcattccactgaatggaaaggccatgggttcgagtcccatcgggtgagtttccttttctacatcggttagaaaaattctcgagtcatgaatagtttgtcagctgtccatcggcaacgactttcggagtcaaaattcggatttctcgtcacaaatcccattctcgaatagcacaaatggcggcgcaaccaaaattgaactaacaatggcattggcgcacgccggctaagcgcttgcttatccagcgcccatccatccccctttgtcgtcgtgtcatttcgttgtcctccttcgaccctgtcccgcccattttgttcatcatcatcttcattcatcatcacccgcctattcatcccgcccgcttcgcctccgcccatgc

SEQ ID NO: 8391 - DNA, 2305 bp, Heterodera glycines
  unsure (1)..(2305): unsure at all n locations
ttcatatttaaatttattgtaaattatttttgtaaattttcataataaataaatcatttcagctaaatagtatcaatttcatttttacacaacaaacaacaaaggcagcaaatgttaacggaatggtgcataatataattgctaatttaatgacagtgagtcatgcttaatttaaattaaaaaacttttttttttgaattcatacaacaattttgccgatttcaattgagttttttaaaacaataaattttctttatgcatttcaggagaaaaaaattgcatttgcacttgcactaataggccaatcaatcagaaaaaaaaacacaaatgcagcaaaagagttgcacttttccccgtgccattcgaattaatggcgtttctttttgaacatttttttcagaaatccaaatgctttctttttcggccttcttttatcctcctcctcctcctcctcctcctcatcatcatcatcatcagcatcgtcttcttcttcgtcatcatcatcgtcttcttcttcgtcatcatcatccaaatggaaatcaatttcatctttctgtaatttgtagaattaaaaaggggggttttcaatattttattcgcatttttttctaatttacctccactaatggaaggcttttaaacatgatttgaaaaacttcgtacagtcgagatttgaagacaatttaatggtgcttaaattttcaaatgttgccttgcggctccacgcccaccaaattcccttggctttaaagcaaattattttcaaaaaattgatttataaaaaggtatgtttgtgtccctttttaaaattttttttatgccttatgctatgcagccaaataaaaaaaaatttcctaaaatatcggacaaagcgaaaactaatctttaattaaatcacttttggctaaaaataaataaattctaaatatttgtgaatttatatgattatataatatccaaattatgcagtattgtatatataataatgacaccagtagaatgatattcgtaatgatattaaaattttctaattttgtatatacaataatgacaccagtagagtgatgtttgtaaattataaatttgaataattttaaaaatgtatttgctaatatttttaaacgtaatattttgaatttctccttttaagatttgacaataaaaagtttttatggcaataaaattttgtaaaaaaaaatgggtaaaaattattaatggaacaggtcaagaatgaaaaaaagctcaatcaatggaatgcaaattttaagattagctaagcttacatttttctttgtaagttatttttttttgattacggaaccacccttggtacagagcctaagagaaaggtcttcattttctacttaataatgtttttgatcaaaaaaagtgaatatcaaattccacatcatttcaattattttattaagttttatccattttcagaattttgtctttctgtcaggtgttaattatagcctaattatcattttcaatacttctcatgaatggcatttttttaagtgcacatgtagtttgttttatataattatgtttccatggaaaatttgggccaattaatttcatttcgtccatttaaaatgaaaatggtgaaatggcttcctatgtggttagtttgtttaactaattgttagcaaaaatttttgtaagaaaatttttattttaaatttattaataattatgcaaataattttttttatcatttaaatttatggaaaattttatagggtttctttgtgatgaaataatttttaaaacatttaaagtttaattacatcaatttttgctttttaattataaaaaatataataatttttcagtaagttattcatttatttatttttaatacaagcatattttattttgattatatggaaaaatacaaaatatatctaaaattttcacaaattatgttcaaatttcttaaaaaggtataaataaatttcaaaatttttagaaaattatttttattaattaaatggccttccgattgaccatttatacgcttatattcatcgctgcaaattcaattgtttatgggcaaaataattcatcaaattcaactactggtggtggtagtccatcagcagcacaaaatggcatttcaacaatgtttctttttaaatgccatggtgggagtaatttttaaaaaatttaattaattaattattgattttaaatatataggcgtattgatgacattggcatggcttttgctcgcgccgtgcgcaattttatatgtgcgctttttacgagacccgctgaaacgcatattgngcgacca

SEQ ID NO: 8392 - DNA, 2986 bp, Heterodera glycines
atagtttcttattttctattctcttaattaaaaaataacttattatttttttcatattttctaaaatttattaattattttaattttatttttgaatttggatattgaatttatattatatacatttgaggttcatcgattgcttaacacattaaccttcatttgcgtgctaattgcatttatttgtgcaattggcgccaccggcggtgtatggaaaggtccaaccatatacaattcatgggaggaggtgccaaaaagaaaaatgtttaataatacaattttaaaagcattaattcatttataatagaaatttatttaattaaaatttttcattataattaaattggaaatgaattaaaaacaaaaaagagtcagtcaattaaatttattggagggttgggtcaaaatttataaaaatgtaaaacataatcatcatatttaactcgtttttcaataaattctgattcactgaatcattttccggtcacgcccggaaacgggcacatgacaaaaccgggggacggttgtttttcaaaaccgcttttttgcagtgtgctttttccaaaaaacttttggagtattggggggcaggtggtgccaataggcgccgccggtaaaatgtttttataatttttattgcgatttgccaacatatttttccaaaaaatgaccaagtttagcgattttgatttgtcaaaaattgctaattttttgaaaaaaaaaaattcaatagaaattccctatataaaatgccaatcacggatcaaaatcacgaaaaattgaaaaaaaactaataaaacgggggaaaacaatcgggggatcgcccccgcacccctgactggaactgaactcaaaaattggaaaagattttccaattgccagttgatttttttgaattttatttttaataattttttttttcatttttaaaattaatttatttttcaaaattgtcaatattttgtacttttttaaatgcttctttcacagaatttggcatggtcctccattcactcgctgttcggcttcatcgcttttctgttgaccattttccaaccaatttcggcactcttccggtgccatcccgattcgtcctcccgtgtgctgttcaatgttttacacgcattcaccggatacattggatggctttgtgcatgtaataaaattttatatatttaatttaatttttaaattaaattatttttattaaataatctaatctttgaaattgtagtgacaatttaattttggtaaataaaatttcaatttttatttgtccgtattaacagaataattacataaaaattccaaaatataattggattttatagaatccataaaaataagaaggaaaaaactaatattcgcttaattatcagcaactgaaaaacggttttttttcatactttttagagtttcctaggagttcaggaaaaaatcctttactttatttttaattgtattttttgggcaattaaattaattatgaatttttcttcgtatttatgccatattttccaataattattttccagtaattgccatttgcattgcctgcgtacattttggtctgttcgcaaatacaagcgcagcaacagtgctgatcattgtgttccttgtactgcttggcattgttgcactgataatgcaaattgttgcctttcggaagggtcatcaacagcagcaggaacagcacggaacggtgggaggagggggggggggagaacattaattaaaaacaacaataattttaaaaatgaattaattaatataaatgcaaataatttaattatggtttaatattaatgagaatcattttcattgttgataaatatgaaaaaagaatttttgtgcattttttgataattgaattctaaattttttcccgtaatgcgcttatttataatttgaaattcacttaaaaaaatttgaggatgaatcttcaaattccaccctccccctaagtggaaataaaatcataaaattgttgcaaaatcgttctttgtgtgcttgtgcaactatggcttttgaactaataatttttttttgaaattttatgggttaaaaaggaatccaagagccgtcgaatggcactaacaaataagcacctttttggtcgcttatgaatgagcgaaattatgaagaattaaatttcataaatattttatggtaaaaaaaaaatttttttaatttttttagagccgtctaaactgtaataaaggcaaacaatattggcatcattaagttacccattcgattctctctatttacccataaaatttcaaaagatttaatccggtttaaaaacgatcctttatttacccttggcggactttaagaaatggcctcttcacgttttctgattaggacctagttttcaaaaaattcttttctcaattagataatttacatcgtcaatgtggaaagaaaggataaacaaataaattgttttcatacaataataggtattaattgtcatttcttgtttaattaagggttgcattggccagtcccaattgttcttcatattggccctaatttgttgtgcaattgctgtctcaatttcattgctcattatttttgcgtagaaaataatgtttttttatgcttcaaaaagtccatttattatcaaattgtttaaaatcaattaatgggcattgtaacaaaataaattcacataagaattattcgtcattttaagaaaatttttgctttaaaaaagcaaaaatgaaggagaagagtagagattttcgagaatttagtctcgatttgagtttagggccaatttatcatttgcaattgtatatattccagaagtaaaaaccgattttttgttttatattcttatataaacacttttcacctattaatttaaatttagcattgtattcattttttgccgttttggaaaaattaaaattatgtaattcaatcaatttacaaattccattatttggtaaatttagtgcacattttgcgtttttgc

SEQ ID NO: 8393 - DNA, 2175 bp, Heterodera glycines
  unsure (1)..(2175): unsure at all n locations
attttaaatgttgtttctaaaaattagaaataatatacaataagtacataaataatttttgtagctcgcctctagcgtcaccgagaaaggatggttgatggaggagcagatttataagtgagacttattatctattaactctcaatctttcaaaaattattcttagatatctggatcgccttcattgagtaaaaggacacacaatataaaaagtttcaattaataaaatagaataagataacctttttataaaaaattttaacgcgcaaaaatgaatgatcgaatttaaggcataactagagtaatatttatagttttttcaattttatttcatggcctccctgggacgagaattaaaggaataatgtgttttgtcccccctccccccccccnccccaccttagcaaaaaaaaaaaaattcaaaaatttaatgtcgtaaaaaagttactgggattttcaataccccattagcggtattacccctgctctatccatggtaccaaatttatatacgttttccggtttacaattttgggtggttaccttgttaatttcttaaataaacaatgttttggtatatttagaaaggcggggcttggtcccaaagaagcggagggctcgaagaaggaatggacgtcggagcagctgcgtgccggtgacgctatcatcggcttgcaaatgggctcaaacaaaggcgccaatcaaagcggggtatcgccacctaattttgagttgctaatcgcattttaaaaagatgattatgggaaacacgcgtcacatgtgaaaagaagggacagactgtgaaggaccggaattttgtgtaattacttcacttaaaagccttttgtttgtgatagtgctgaattgaccttaccacggataacacccttaatacattccttcttgccttgacacttttgcaattccatttaaaatccaagatgcatatttctaaattatcatagaataaattagtatgttttgtttacatgaaaaagtacaaaattatttgttacattacagttaatattttaatatttaagtcagacataatattacttcatttacttgagattctttgggattcattgtcattttcattaaacactacaaaatgcggttggtttttctctattcattctggagattgtttttctgacaggctccacatcgatggcctaagtgtactgtttccctatgaatatgtttatccggagcaacttttatacatggaacaactgaagaaagtgttggatgcgccagtaagcagttgggagtgttttcggtgctgtcctttgaatgggggagagatttgttttgagtcgataactgcgaatatgacatccattttgacattaaaactattggctaattaattataaagaaaatgtattttagggccattgtttgcttgaaatgccttccggaactggcaaaactgtttctctactggcgcttgtcgttgcttatatgagaaagtatccggtattttcacgatctcccatttaggctatttaaatttttacaggaaagactccacaagctgatttattgctcacggacaattcctgagatagagaaatgtgtcgaagagcttaaaaggctgtttcgctattataccaatgtcaccggagtgcgtttcacattttctcttttttaaattgttttctctaagtccgcccccgatttccttgccctcactctctccgctcgtaaaaatctgtgcatcaataaatccgtcgtcagttttcggtatggttcggccgtcgacggagcttgtcaacgtttgacggcgagttacgttcgggcgaaaaggcggctgaatccgaaccttccctgttgttcctttttcgaaaaatttgacgagaaaagggacatgactttgccgaagggtgtttacaatttggtgagttgattttctcatttctttcctaattgagtgctgatgcctaatcagtcagacttgcgggggtggggcaaagagcactgcatgtgtccgtatttcgtcgcgcggcacttggtaaatcgtgccgacatcatcgtctattcctaccattatctgttggacccgaaaatcgccgaattggtatcgcgtgaacttagaccccagtcttgcgttgtgttcgacgaggcgcataacatcgacaatgtgtgcatcgagtcgatgagtgtgac

SEQ ID NO: 8394 - DNA, 2224 bp, Heterodera glycines
cgaaattggtggaaaccttcggagagttgaaaagtccccccctgaggatgagagggcatggacaaaccctgtgcttccctcagaaattctgagagaagcggtgccggggaccattcgcacggcggaacattttttgacggttgtttggctgactgatcagccaaataatttgttatttcagttcatgaggaggataatggaatatgtgaagcatcgaatgcgggtgaagaatgtgcaaatcgaaagtccggccgcctttctcagagacattaagtccagggtttttgtcgaccgtaagccgatgaggttgttctgtcgtgccttccttcatttccctcttttcattcatacgctgttttaggttttgctctgagcgattcgcctccctctcaaaaacgcttgagttgtccgacatttctgacttcagtgcccttgtcaaactcacgactttcgcgaccattgtcagcacatattccgtcgggttttctctcgtttttgagcctcctgaagatggaagttccgttggtgactacgccattcatctcaattgtatggacgcctcaatcgcaattcgacccgttttggaacgttttcagtcagtcgttatcacttcaggggtaattctattctttatccagctgtttttactttacacatttttacaattagactctttctccgttggatatgtacccaaaaattttggactttgaccccgttgtaaaggcgagcctttcgatgactttggcgcgccaatgcatttcaccaatgattatttcaaaaggtaatgcaaaattggacctgtctaacaaaacatgaagagatttgcttgttcaattgagtgttagacagaaatttaatggtctataaaaaattttaacaatctgtttttataatttttaaactttaatttctcctttttttaagaaaacattttaaaatttaaatgacaaatgagtttatgtttcttcgttttccaggaaatgaccaagtcgaaataacaagtcgttttgagagtcgggaagatccttcggtagtacgaaattatggcactttggttttggagttggcctcaattgttccggacggaattgttgtctttttcaccagttacgtatatatggaaaatgtggttgctgcgtggtacgaacaggtgaattcaccaaaaatcattgctttaaattgttttctctgtccagcgaatgatcgacgaattggtgaagctgaaacttttgttcatcgaaacaaccgatgcactcgaaacatcggtggcattggaaaaatacgtcgaagcgtgtgaaagcggacggggggcaattctcttctcagtggcgaggggaaaagtgtctgagggaattgacttttcacatcatttgggtaggggaacaattcgtttattcactcctttcgctttgctaacacaggaagagcagtcgtaatgcttggcattccgtatgtttacacggagagtcgaattctcagggcacggctcgaatatttacgcgaccaattcggaataaggtgctgggggaggggcagaaaggaaagaatttcgtatttaaaggcattttttattactccaaaattcaagtcttttccccaatgtttctctgttgtatagagaaaacgactttctcacttttgatgcaatgcgccacgctgcgcaatgtgtgggccgagcaattagaggaaaaaccgattacggactgattatcttcgccgacaaagtctggacggaatggagaagactttttaattttttttcggtttttagcgcttttgtcgaaatgacaaacgtggaaaattacccaaatggatccaggaacatctgacggacgcgcaaaccaatctgagtatcgaagaggctgttatggcagcaaaacgatggtttccgttgatggcacaaccattcacgaaagagcatcagttgggagtttcgctgctgtccaaagaattgctcgggagtaaacaagacgacatattgagcaagtttcgaggaagtgttgttactgaaatggactgaccttacaagcaggttgcaaattggccgtcattgatctatttataccatttttaatttgcatttttaccatttattgttttttgatcacacaaatttttacctggaaaataatcttcaaatggtatttcttaacttgtttttttttcatttaaatattgtatggattgtcctattgtctcatcttttcattagtaaataaat

SEQ ID NO: 8395 - DNA, 1674 bp, Heterodera glycines
aaaaccgaggttggattgacaggcaatattttaatccatcactcattaattcaattaattgtaaggtaatcgaacagggcgaattaagcgctgtggtaaaaactgaggcggagagtcaaaactcaacggaagtgcaaaattatgctttggtggaccttgattgggtgaacaactcgcagaagagccatgtgctcttgcagatgatgaatgtgtgaagggatttgtgacatttgaacttcgcacttttcaggcgatgggctacgaacatggcaagggacttggcaaaagggggcagggcattgtggagccgatcaaagccaacccaaaccaggggaagaaagcatttggggccaaccacgacagccgtatgattcttactcaatgttgggccaaagaatgatgcttaattaattgcataggacgaaaagggaggcggaggcgaagaacgagggaaagcggacacatggaaggacaacaaacggacagcggaaaaaacgcaatcgccgaacagcagcaaaaggacgaatggaagagacggccgaatccgtcacggagggcgcaaatgcattacgaagacaatgtgagggacacgctgaggacggcggggctttccgaacaatcggcggaggaaatttggcaggcgcttggcattctcgcgaggcaccaaataatggtattggtcaatcagggaagtgtttggttatgcaatttgaatggttaattcagccacttggcatgggacttggacttgtaaaacggcgagcgggaagaagacgcattgaaatggaggccaaaaacgaagggaaggcagaattttgaagtgacatggacacattaattattctttgtgacaaattgtataaaagtgtaattaaatggacccatcccggataagaaaaagacaattgccaccatcggttgccctgtcggtttattgtattgccttttgtttgtcttgtatgtttctttcgaattatatcttttaagccttttcaatgccgttcttccccaatttgcctctttttcggtgttcgcctcaattgcataggtttcgtcctgcgccgctttctctctcattccgccgtgccatttcactgagtgtcgtccatcggaagggccattcgcattggcaaaacaccaaagacgtaaaggcaaagaatgacgcgattcgcgcgagtgggctgaacgaaatgatgaagcagacgaggaaggcggtcaaagatgggtacgacccgaaaaccaacagacggctccagaagataatggaagtgagattctcgccaaagggaccaaattcaaagcgcgaaataaatctttcccatcgttccaggacatgaagaaacagtcgctgcctttggataaattccgcacttttttggaaaagttaaaggtgataaatcacgggctaatttattacgaaaaggaagggcaacaaaagaatgtttgaaagaccaaattggcatttttacgcccttttaccgacgagaataaatctcccgttttagcaaaatgcaccaaaggaggacgaaaacaaggaataggtccgttttctgctgatagatcataaaatatttctcccttcaagtgttattcttttattatttttgttttggaaaatctgagcattttttgtccttttatttttcattaggataaattgcagcacttcacaca

SEQ ID NO: 8396 - DNA, 1585 bp, Heterodera glycines
aacgtgaagctaattctcgtgttcggaaaacattgaattattccgaagcaggggcgtcttcgtcttccattattgacacaagacaagaagagtccgaaactgcggttttctgtgacctggatcaggacaatttgaacaatacacccgcagaacttctgacaaaatgtgtgtgagaatttggttcgaaaaacattgacttcttccgcagtagggacgtcttcgtcttccaatattgacacaagacaagaagagtccgaagttgctgttttatgtgacctggagcaggacaatttgacaaatactccgacaacgccgatgacaaaaagccgaaaattggatcaaccattttcggcatcaatggcgccattgactcaagctcaaaatgagcaagtgcgcattgactctttatcaagtgacattttatcggaaggtgacaaaatttctgacatagcaaatgaagacgcccaacaaaacgacgaccttggtctgtttttatatgttgtcacgtgttttagtttaaaactgataaaaatcttaaggaccaagggccgggggacgaccatcaaaaaagatccgcggaccaggacggaagaccttaacaaatgatgttgggagaggagtcacccctttgtttgaagacagtccgtccggcaggggcgaaggtggcgttaacacgcgtcggattacggtgatttcggcgcttttatatgttacattgctaattaattcttaagcttcgaaacaagcatatttgtcaaatcgaaaaggccctttacaatgttttagaggattattcaaaacgtccttggccctcgaagaatcagagtctggattttcaattcataaatgaatttcaacatgttttcagctaagcaaacttggacccgttgcagtgaggggtgtgagtgtttgtctgctgctcaatgtcaacaaaatgcgcaggcttatattgccgtttcgaagtatgaccaagaatttactccaaagaagacaatgccacaaaaaatgaccaaaataaccaaaggctgtcatcataagcatgtttgcgcttccgcaggggcgcatcacagagtaaatgatcgctacgaccaacttttaaattccgctttacatttttcagattgattattatgacagcggtcaattcggcgatgccaactgcaaatattgtggtgctgttcttttggaaagcgaagccaatgcactaaacaagcaggggcgtgtgtcaccttgctgttccaatggccagtgtcacaccgagcaaatgaaggcagaattcgacgagttgcagaaccctccgcaattactgaaagatttggttgcggctccggatgaacgcattcgttttgagtttttggacaacacgatgccacttaacaacacctttgcgtttgcatctgtccatagtgagaaggcaccagcggagcaaatggctggcccgaatggataccgttaaatacaacggtagaattcgttttgttttattttttaaatctattttaaggcgaattttcgttcatgctcagcgaaccttatctctccgcaggggcgtcgtccaacgtttgctcaagtggataccctgatg

SEQ ID NO: 8397 - DNA, 3503 bp, Heterodera glycines
cgtgccacgccctcacatctaagcttaattgtgcgaatggtcgggttagcttttgaagtttgtcgtccattttgcgaaaaataaaatttcctttgaaatgccgaatgtttatttgcttaagcctaatttatagggtcaaattggggagtatagataattatttgcacttcacttgcattttcatcattttctcgaatcgatctcccaattcctttcgaccaaaaaaaaaacaaccaaatgaattacggtcccccaccgcgaaagcgcgctcgccttggcttcaccattgacgaactgcttgagcttcaagatcaacagcagagcggaagcggaccttctcacccctcagcatcaccaacagcacttggaaacggactcgacgcatacgtgatgaaattggatgaggaagtcgaacatgctccacgtttcacaatgacaaaggtgaagtcaaagtttatgatcaaggatttaccagccgacccggaggctctgttgtcacaaatctttcagaaatgccttgatgaagcggtggatgagagcaagcagcatggacacacaccggatcgactcggttgcatgatcagcagtgagctgttgaatcctgacatttggacacccatccgtgaaattaccgacaacacaacggacgtgatcttgaatcgactactgagtactgcccaaagcaaaaagaagaatggagtgtcgccacaaaaaataaccaaaggctgtcatcataagcatgtttgcgcttccgcaggggcgcatcacagagtaaatgatcgctacgacaaacttttaaattccgctttacatttttcagattgattattatgacagcggtcaattcggcgatgccaactgcaaatattgtggtgctgttcttttggaaagcgaagccaatgcaataaacaagcaggggcgtgtgtcaccttgctgttccaatggccagtgtcacaccgagcaaatgaaggcagaattcgacgagttgcagaaccctccgcaattactgaaagatttggttgcggctccggatgaacgcattcgttttgagtttttggacaacacgatgccacttaacaacacctttgcgtttgcatctgtccatagtgagaaggcaccagcggagcaaatggctggccgaatggataccgttaaatacaacggtagaattcgttttgttttattttttaaatctattttaaggcgaattttcgttcatgctcagcgaccttatctctccgcaggggcgtcgtccaacgtttgctcaagtgtatacactgatgccggaggatgctttgaagttgcgtacggaaaatattacacaagccttgtcaaaaaacattcggaatgagattcttgcaaaactggagcttctgatgcgagaaaaccctctcggacaaacatttgtcactgcaggggctaaaattgaagaagcagctaaacaaaatgatggaatactgccacattttcaagtggctgtagcttttttacttttgtatttttggctattaagattgtccttctgacaaatcgtgatctgaaagtagacgcgcttcgtacccgtactgattgtaccattatcgaacgtgctgatgctccaactgctcagcaagtcgcagttatatgggttcaagaggatggtctagcgccagaagtaaatggtaatgtgttgatcaaacatttatgcttttatgtttaatttttgaggtttttggatttgtgacaaggcaggaaaaatgcgggaattgaagagtggaatgccgcagctcgacccttgctgttttcctttgttacacccgaggggcacatttgggtggcgttggtttatgaagaagacaggagcgcaggggcgcccggtaattattttttctcattaaaaaaatctaaaaaacagactgtgcctatgtcttcgcattctaatatgcaaacaggcgaagggggacaacaaaatattgatgattcggtgactgaatttgacaatgatgatatatgtgacaatgagcaaaggcgagaatttgagtctgacgtaaatatttttgctttatttttgcttcataattccctatttaagcctattttttcgacaactgattctgtcattgaacttgcttatgaaacatttccaagaaaacgtcaacttggcattaagaaagttgggccgcaggaaaacatttctgaacgtcaattttaccgataccgtttggcaattcgggaaaacagcaggggcgccttccattggctttggttttcacgccgtctcgcggaatatttcctcattgctgtgctcaatcggattgaacgcaatgaaatggaccatgttaaggcgattcagcaaaaaaagaactatcgccaaacacttgctcgcgattacatcaaggctattgagcaaggactccagcagcaggggcgtaatgcaaaattaggctccgtctttatgatgcctcatacttttgctggatcaagacagtactatcagcaaaaatacgcagatttaatgacagttgttcgtcatttgggaaacccaacctggtatgtacattataagcaaattattttttaaatatttatataaaaggttcgtaacgtttacgggtaatcccagctggcccgagttaaaagaagctctgcaagggcgccaacaatatacccatcgtgcggatattgtgtgtcgtattttcatggacaaggcttctgaatttgtccgtgatttgatcgaaaagaatgtgcttggaaaagtggctgggtggtgttatagtgttgaacaccaaaagcggggttaagaattgttttgttgttttgtcttatttttagttttcaggtatgcctcacattcacatactgcttatacttgaggagcaggggcgtttaactacacccgagatggtagaccaatttgtatgtgcaagaataccaccactgccaccaatggaggatttatcacccgaagccaaccaacaacgtcgtttgtggcactatgttacaacaatgatgttgcatgattgtaatgcagcttgtattgagcttaatggacaaggacgaccaagttgccgcaaacactttccaaaaccatattcagagttgactgaactttccggttgattacagattgttgtactctaatttaatcacaaattcagaggtacgttacactaattatgtgcgtttacctgctgatatggttgatggaacatttcatgcaggggcttctaccatacaccctacagccgttccaaatcatgaaggccatttgctccctaccgatgaccccgaacgtgactggaatgaaatacgttacaagcgagttccaactgaatggcgtggaaagggcttaaaggggccccagagactttatgtttgtcaagctaaaattaaaatgtcaattcaaaattatccttaaggaagagtgtggcttgccatatatgaaaagaaacaaacgcggcaggggcgtatcaattctcgatgatagccgcgtaataccttacaattctttcttgcttctaaaa

SEQ ID NO: 8398 - DNA, 2326 bp, Heterodera glycines
  unsure (1)..(2326): unsure at all n locations
aaaacccgggattgtcaattgattggactcataaaagtcgatcggactcataaagtgcattagagccgtaactttttttattttcaaccaattctaacgatcttggtttcttttttgtaaaatctacaaattatccgatggcttctaaaatccttataaaaaaattggtggaaaatcgcaaaattttgtcttttttggacaaaatcttgttaacaaattgcatttaaaattacaaattttttcccggcggcgcctaccggcaccgccggaccaccgtcccctcccctagttacccaaaaaattgtttttgaaaaaagcgcgcctttaaaaaaccaaaaaagtcattataagggatgtcaaaattatctacaaatatgtatgtaaataaaatatttaaattgttgttttttgggaaaaaaaatttttttggaggggttgaacaatagaaggcccgtgccttcaaatagcggatttacggtaatcatcttttagtattttaaaaatttatttatttatcgataaagaaaaaattgccatcagaagggcgggaaccacttactctgatgactgatcacagtaaaatagtcacagagtaagtgaataaatatcaagtgagatcacaggttaaagataaacaataacgaaaaatttatatgaaaataaaatcgaggtcaaagtcaataaaatgcctcaaaagttaataattctttatacattggtgctttcagaatcaagagtcaattctaataattttttaaaggtgtttaaggagctagacattaacgttttatcaagggcattccaggccttgactgatctgttaacaaaagatttggaagattttttagattgtaatttaacatttaaccggaaaaatgacttatttcgagtatttaggttagttcttttaaacagagaatttgggtccaaatgtgtaaaaccatgtaaaattttgtaagtagttaggaggtcaaaaatttttcttcgtttttcaagagtagctaatttaaaaaattggagccgttggtcatagggaatatatggaagacaacattttctgaaagcaattcgagtaaaatatttttgacatttttcaattttaataatatgtgattttagttgcggattccacgattcaggggaatattctagaagtggacgaatataactaacataaatatttttccaaactgaaattttctttgatttaataacacggaaaagtaaacgcatacggtagtaggcgttacgggtaattttgcttatatgttcggaaaaagtaaatttattgtcaataagaatccctaagtcacgaatagtttcaacttcacaaattgcattatcattaattttatattgttccctggggttattctttccgaagtaaatgataaaagttttattaatagaaattttaatataccatttcttagaccaatcagagagaatatttaaagcatggtgcatagcaattctatcattttttgttttatgtacggaatataatttgacatcatccgcatataattttatagaaatttgtttaggaattaattcaggtaaatcattaatatatatcagaaacaaaagaggcccaagaacagaaccctggggaacgccagagctcattttatactcagaagagagagtattatcaacccgaaccctaaaggtacggtttgaaagaaagtcagatatccagtttaagattttacccctaataccgattctatgaaccttatataaaagtaaattatgggggataacatcaaatgctttcctaaaatctatatagacacaatcgatattcttattattataaataccatcataccaatttttaagggttgaaattaggtgtgttgtggttgatctgccctttataaatccaaattgatggtcggagaataaattgttctttaaaagaaaatcggaaatagcccaaacaataaatttttccataattttgcataaagaacaagttaaggcaataggcctatagttcatagggttacttttttccccttgtttatgcaaggggataataatcgattgtttccatatagtgggaagctttcctgtatcaagggagagtctganaatttcagtaacaaaaggagtaaacganagagaacaatttttttacagtctaaaggtaataccgtccggtgatgntgtatttctnngtaggtaagttttaagaactttaccnacanngaatatattaaatttcacttcgttnattgttggagaagaaaaagaagtatcaaaaatcagagaataattatttacagtaaagttttcagaaaaaatttttgcaaaaatt

SEQ ID NO: 8399 - DNA, 2306 bp, Heterodera glycines
  unsure (1)..(2306): unsure at all n locations
aatgtcgtcacgtctacgaaatccttcggctgttccacaccaatatgaatgtcncggccgaaaggcagcaatataaaatggagttgctgaagcgcctgatgaagtcgatgatgagtcagagcaaagacggcggcaaactttcacgggcattgcagtcggatcaacagtccctatgctttgcactgaattctttaagcccggtatcacaaaaaaaaattgataattgaaaacaaaaaattcatttatacaggaacaacaagggcagcagttgatggcgctttatgagaatacgatggactgttacagaacggtcctcgctcggctcgctcgttatgaaaaagattttattcgatgaccccatctctggttgattgcattgatgggacttgctttttcttgtactgataaatcttatataataaagttgagtgtctgttgtgtgtgtccagtgtttgaatttgtgtggcgttttgtttgagttttgcgttaaaaatgaatttgaaaagagatgaaaagaaattgttttgaaaaagaagagaatataaagaaaagagacgaaaataaatagttaagaagaagaagaaggcaaaagaaatagcacagaaaaagaaggtaaaagatttctcctcctaggatgtagaggttagagggagggatggtgggaaatagtgcaatgtatgactgtctgtctatgcgggcagcggcagatgggaggggcagacaatgaacagacgcgtgctgctgtgcagcagcagtctgttggacgcgtgcgtgtgtgtgggagaaggagggagtgggaaaaaaagagagtaaattgcaatggaaaagaaaagagagtaaaagaaaggaaagggagagataatgggaaatttctctcgcatcccttccttatttataacccattttttattgtataaatatttaacaaaagaaagaggacaccccttagtttgttcactaagaaaatcctataatattaacattgtgttatgttgtataaatgctttgaaaaatgaaatgtttttgttttacatttttttcttttgtcattttgtgtaaaaaagtcttaaaatgtttctttttctttctttgttgtgtgtgttataaattgatttggttttgatatgaaagatattgttttgcttatgtaaatggtaatgaaattttaaatgaatgaatgagaatttgtttgaaaaatttgtatagaagaaaaatgttgtgcgtaagaaaaagtcaagaaacaaggaagaactgttatgccataagaaaatgccaaaagaagagtgcgaggccgctaagcggtcgagccgctgtcggttttatcattcatttccggttattgggtttcgaagaattggtgagattgaattttggtgactggaatggagccgaaggccccagttacgaggccgcgaagcggccgagtgagtacctttgacgcaaaaatttggtgagtggggccgaaggcccccgtacggttgagtcccattgattgaaatgttggggggttgagcccaagtgattgaaatgctggtgggttgagtcccagtgattgaaatgctgttgggttgagcccaagtgattgaaatgctggtggcttgagtcccagtgattgaaatgttggtgggttgtcccagtgattggaatgctggtgggttgagtcccagtgattgaaatgttgttgggttgagtccaagtgattgaaatgctggtgggttgagtcccagtgattgaaatgctggtgggttgagtcccagtgattgaaatgctggtgggttgagtcccagtgattgaaatgctggtgggttgagtcccagtgattgaaatgctggtgggttgagtccaagtgattgaaatgttggtgggttgagtcccagtgattgaaatgctggtgggttgagtcccagtgattgaaatgctggtgggttgagtcccagtgattgaaatgttggtgggttgagtcccagtgattgaaatgcaggagaattgagtcccagtgattgaaatgctggtgggttgagtcccagtgattgcaatgctggtgggttgagtcccagtgattgaaatgctgttgggttgagtcccagtgattgaaatgctggtgggttgagtcccagtgattgaaatgctggtgggttgagtcccagtgattgaaatgctggtgggtagagtcccagtgattgaaatgttggtgggttgagtgccagtgattggaattatggtgggttgagtccccagtgattgaaatgctggtgggttgtgtagacagtgattgaaatgttggtgggttgagtccccagtgattg

SEQ ID NO: 8400 - DNA, 1259 bp, Heterodera glycines
caaattgacattttttaaatttttcagaattattacactcgcaaggctcgccggcgacacaacgaggagcaacagcaacaacagcaacaggtatcgttcaacaacggcaacaacaacaacagttgcatcgcaactggtgctgctgctgttgctgttgctggtggtggtctcctcagcgcaacaaatgccaacggcggccacaacatcggcggcggcgccggcaacaatttgagcgcctttttggtgccaactccgtccgctgctgctgctgctgcgattgctgcaggcatccaacagcaacaacaactacaacagaagcataataaacaggccaataatttgttggccgacattcaggttctaatgatggtggtggtggtgaatgggtttttttgttggcacatttaaaaaaattttttttttccaatcagtcacgaaatagggaaaacttaaattgtcagcaatttgttgccaaaaagaggggttgggtggtaaaaaatttggcgctatgtatgttaaaaagtgaacaattttgaattttatcaaaaagtaaaaacaaaagcaccatttttggcttttgcaaaattttttaaatttttgttctagttcgggttagggcttagaaattggtgaaaatagatgtcgtattcgtgattagcgacctctaaaaccttggataacaaattttcaaaaattgtgcaaaccaaaaggggggtccccccttttgtttttactttttgataaaattcaaaattgttcacttttaacatagcgccaaaattttatgaaaaaaaaaaatttttttttttgacttaccgatttttcccgggggggggtaataaaatttcatcatacagtttttttttgtgcatcatcaacaaaatttactctctgtcacccctttgtaaggacatttccatggttccctcgtgttcgtcgaccgctgtcgctgcttcgattgtcgctgcaacacaacaacagcaacaccccatgggtgttggaggagtacaacagcaacaacagttcatgcacgacgtgcagcagcagcaacacggcacaaacatggaggcagcagcagcaacgcaacacctccacaaccacggcaacagccaccacaacagacggacaattgcctacccgaaaaacagtgccaccgccaaacacaaaagtgccgcggtacgcgcaaaggcccaacaaatcctggcggcacaagcggtgaggagggagagagagagattatgaaatttgttttttaaaat

SEQ ID NO: 8401 - DNA, 4662 bp, Heterodera glycines
gatttttatccaacaatttattttattaccctttaaaatccccggttatagaccctccaaaacccaaaaaaaagagaggagaggaaacctccgccacttaaaaatacttccatactcggcaaattattttttttatttccctaaatctagaaaaaaaaaattttttttttgaaattgcaaatttaatcattttcagcaagcccaggcggcccagcaacagttgggactggtggacgatgaccaggaatgtgatgacgaaaacaacgactacatcatacggaatggcgaagtgttcaactaccggtaccgcattgagtccagcattggcaaaggctcgtttggccaagtgaccaaagcgtacgacatggtggaggaggagatggtggccatcaaaatcatcaagaacaagaaggcattctatgaccaggtgggggaaggggggagggggaatgggaaaaatgtcaacaattatctgaatgtgtgtccatgctttgtccgtgtcatttcggcacggaaccgaaaaaaaaattttttttttttgaaaatatggacttttttaaacttatcaaaaacaagaaaaaacaacaacaacaacaactgaatgttgtcggtgtgtgatttgtccgtatcattttgacatggcgcacgaaattgaaaagaaaattttttttttttttttgaattttggagttttttgaaacagtaagaaaatatttaaaaaaatttagtagaaaaaagctcaatgtaaagaacctagaaaacaatttaaaaaaaattcagaccgggaaaacgtgggggcaactggggttactcccccgaaaaattttaaaaaattcaaatttttttgcgatttttcaattcgaagatttttgaaaaaattaaaaaaataggggcaagcaaaaaaaaaacctaaattttatttgaaagggctcctcactaaactcagcttaaatttaatcctccatcaaaaaaaaaataaataaaaaaattgctaatttccatttccttacggtttcgtttttgtccaggcccaaattgaaatccgtctgctggaactgatgaacagccacaactccgagggtcgctattatgtggtgcagttgcgcaaccattttgtgtggcgccgccatctttgccttgtgttcgaactgctctcatacaatttgtgagaaatttcaaaaaaaatattttcaattttttttattatattttaatttaaaaaaaattaatttaattaagcatattcacagtttttcaattgtttccaggtatgatttgttgcgcaacacaaatttccacggagtgtcgttgaatttgacgcgcaaatttgggcaacaattggccgccactttgctgttcctctcccaacccgacctgaacattatccactggtggaattaaaattatttaaaaattatttaaattatattttcagcgatttaaaaccggaaaatgtgctgctctgcaatccaaaacgttcaacaattaaagtaattattgctcatcaatgcataattaagcaccaattacttaatttattcatttttttacaaatttctgatattacagtattctctctctctctcttcaaggattactatatttatatactgtattttcttatagataatcgactttggctcctcgtgtcagtacgacagtcgcatttaccattacatacagtcgcgtttctaccgttcccctgaagtgttgctgggcatttcctacgacacacaaattgacatgtggtcgttgggtccgtgaatgaattcaaaaaagaaaaactaattttatttaaaatatttgaaaattattaaaaatatatacatgattagtcgttacataaaaacgggcgctttttctacaaaaaaatattgctaaaatggtcgttgattgtgagagttttggatgcttttttcaaaagaattcgaaagcttgatccaaaataaacttttggttttttcttttctagaaaaacaaaaaaaaatgtgctttttcttgttaagcgcatcggttttcataaaatattccaaatttcaaattgttttacaattttaactgcctgaatttatggactttggtgtgagaaatagtggacaaattttgttgagttttgtctacttaaaaaactcataaaacatagataagattttgatagctcattttaaaatgaaaagttaggcctttcgaatgatatattaaattcaataaaattaattatataaaaacgaaaaaaactaatgcaacgacctgttaaaatgttttccccattttcaggctgcattttggtggaaatgcacaccggcgaaccgctgttcccaggccattccgagtttgatcaaatgatgaaaattgttgaggtgctcggcatgccgtcaagccaaatactgaattccgcctcaaaagccaacaaattctttgaattggatgaaagtaaaatccttaaaattaaatatcaataaaaaaaatagtttttttaaatgtatacatggctcagttggtagtaacgtgtgcttgcacgttcttagttccttggttcaattccttaatggtgccggatgattaaatttcaaaacttgtctgatttcggtgacgacaaatggaattcctcgttactgacggcactttttaattttatttcactttttttttctatgccattcatcccttctcgtgaaaattctggaaatcttaatggattttcttaacaaatcacaataaatcaatcccttcacgatgacaacagacaccaaaatgacgcaaaatccgtcattttttgtcgaaaaatttcacttaaattttataaaattaaattggagaaaacatcttggaactgataagcaaaaaagtttcctgcctcctgctgttggtactttccacgaaaagttttttctggatgcgggcctgggttttccggtcattattctgttcccgcaatcgctctattttttggagtgccaatttgaacgatttatctgggcgggcactccaatcattggcttcttttagggccgattgattcaaataaacaccgttaacttttttttgaaatcagatggccaatggcgctgcaagaaggcgcgtgacacaaagtcctacatggcgcctggttcacttcggttgtccgacgtgttgggcgtgtacacgggaggaccgttcgggcggcgacagggcgagcaaggccacaccgtggaggactacatgaaatttaaggtgggaggattccttcccctcgtatcgtttccaccctccgaaaaaaaaaattataatttctaaatttgtaaaaatcttaaaatttttataagaaattgcaagaaaatgttttttaaagcgatttgctcaaaatttttatgatggatagatactatgtttttgaaaatttctccaaaaattgctaaagatatcttatagaaaaatttctatgatttttaaaatttctaacaataagtttgaaaaaataattatttacatattataattagggatgggattcttaggtttttacttattttttctgcggctttaactcgacgagaaatgcacgaaaaacacattttttgttcggaaaactttcgttttcacgcccctatccgaccctagaaatacactcctaagaatcgacccaaaaattttcaaaaaaatacacccctgagaatcgacccttaaatcctgaaaatttctaaatgtacttcatttctaactgtaatcagtaaataaaattgtttgacttaattttaactaatttacatagagaaaacagtaattttgataaattcacccctacatttgaaatttttttgcccctattttcgcccctatttcttgaattttttgcctctatttaggtccctattttggactttttcgcccctaaaaatcccatccctaattataataaagctcattttttgatagggagcatgattttaaaaaagtctcctacctgggtttaatgaatatgccgtaattttaagtcccttctatgagtaattaacagcaatttaagtaattaaaaacttgaggaaaacaaacatttacactgtattttttctctttatatttttatttatacatttttaaatgccgcatttttgcacaggatctgatccagcgcatgttggagttggacccggccaagcggttgcatccgtactacgcggtgcggcacccattcctgcgcaagacgaaccctggcgatgatcaacaacaccagcagctacaacaaaatgttgttggaacagcgagcggcggagttgcggcgcaacaacaacaacagccgaaccgctcgcactcgtcggtggccatttccgccgcgtgccaacaaccccagcaacaacagcacccatcttcctcatcagcatttcacaatcatcatgcacaacagcagcagcaccagactatgccaccaacttttgtaaaaattaaaattaaaaaaattttttttttgtgaaatttgttaaaaattggtccctgtcatgagaggacgggaccttggttttggctttgtgccgaaaagtttgcatgagggagttatgggtgtacaataattttacagggatgtcccagtcctaggatatttgaaaaaaaaattaaaatataatttgtaggaaaatttctttccagcaaatttttcgaaaaaaaaattttttttttttttttcgt

SEQ ID NO: 8402 - DNA, 1737 bp, Heterodera glycines
cctatttttggccttcaattgttgggagccggaaccttctagtacggtaggcagggggggggggagaaatttttaactttaattaaaatttaaattttttttctcaaaaaaattcactaaaaaacataaaaaaatcttcattttttcttttcaaaattttgaaataaactgcaaaaattattagcagaagttagcaaaattttaaaagaagaaaaaaacaattctgattttttgagaaaaacttctaggttttttaattgaaaatttataaaatttttgtacgaattgccattgacctgccattttgccttagaaagcggggcatttggccgttttacagtgttccgattcaagctttcagcaggggttagctagccattttcatattttcgcattttcgctcaaattcagggctgctaacttcttaacaaatttcataaaaattcaaattttctccgccggcgcggcggcgcctgtcagcgacttatattttttgagtcaacattttgaaaaaatttactaattttgttgattcgatttttgaaaatttttgttcgtccacccgtttaaactcgcgcgcccgatttttggaaattttggcgatgaaaaatgcctggaaaattgcggttactgtaacattttttaaaatttttcttagcggtttatttgtgcaaacggacaatgcagaacaaggcgcacttggagctggaggattttgaagcggagaatctggccaagctgcaaaaaatgttcagccgaaaatgggaatttgtgttcatgcaggccgaggcacagtacaagtgggtgcagggagatgaacacggtccaaacatactgtagaaaaaccgaccggtacagtaggacctaatcctgtcaatgttttccactggttctgagatccaggtccggataattggtgggccaatacccaaaaaattggattacatcgtgaaatccggcccgggcccggtgcctgatcctggtgcttgattcggcatttttcaaaatatctgtctctagaatactgtggtgggcggcatactgtatttggggtagaacagtcgtttttaattcagtgtaaaaaaaatggaaaatgaaggacaaaatttctaaaccaaccaaaaaagtgcaatatattagtgaataattgtagataaattttcactagcatacagtaccctgggacaatggatcgtaactatcaatttttacttaattactctaataattaaacatttacattctcacagggtggacaagaagcgggatcggatggagcggcaaattttggacagccaagagagggcattttgggatgtacgattatttttttttgtggtgggggggggggggggtggagatttatggggataaattgggactaattagagcgattaatcggatttctatttccaagaaataatttaattgttattgtttagcttcatcgtccggtgccgggctgtgtgaacaccaccgagttaagtgccttttataggggctcttctgcttctggggcggcgactgatcatttccaatttgctcaccaaaattatggactgattttaatctttattgtgatcaaattttaatgtgaattgatttcaatttaagaggctaaaaatggtgaaaatcattttcagagctgtttttaggagggttgtattttttttttttgcagttttattaaggaattttgataaaacgccaaaattagttttgaatttatttttttca

SEQ ID NO: 8403 - DNA, 3680 bp, Heterodera glycines
taaaaatatcccagctctaattacaccggagaaattttaaagattaagaacgaattctgcaagaaaattacaaaatttgcaaaatttgccaaatttttcttttaattttttcgctggcagaaatcactcaaattttttatacatacatatttatctatcccgaaaaattgctaaattgatcaaaaaaatgtcattgcaccaatgtttggcattttgtttcactgcctccccctaatttcaggtggactttcgcaaattgtcccgctccggtcggcccaaatacagcgcgtccacctcattgttggcacaagcggctgctgcaagcagtagcagcagcagtaccaccacctgcagtaatgggcccgctgctgctgcacaacctacaccaacaaaaacaacagcaaaaactgtgccgacaaggacggcagatgaatgttcatcgacggcatgcacttcgtccgccagttgtgccggcggcggtgactcggccggcacctcgtctggcggtgctgaaacggcgacggcgcccaatcggacaacgtcaaatgccgcttcgagcagttccgtgcgggaagtgaagtaccaccagaggcccggcttccggcgccagacacggctccaggactcaattaagaccgaggtgggcgctgaggaggcggcgctgagttgggccatttgggaaatggtcgagactcattctcgagcgctgtcttgggtgttttttttaatttgttgaaaaaaagacgaaaaattttaaaattctaaaaaactttcatagatcactgatctgcacaatcggttggccaaaaatgtgctcaggacatccaaagtggtcgagaattacctccaatactatgatcaccggtcagtcagatattgtgattgtgtgtgcattgatcagacacaaaattagtgattaatggaacccacagtaatgcttaaagatagatacagtatagcaaacggagaaactcattatagaagagatcatcagcaggataatgttatcagtgatcgaaaatgtctaaatctttttctaaagagtgatttttttttatataagtgatcaaaagattattgattaatggatggaaccacagtagtgcgcagagagagagatagagatacagtaggaatcggtcagagtcattagaaattatcaaaaatgttaaaatctttttcggttcagctatttttttaaattatcgataaaaaatataatgaggtttaatagagtaattaatgattgattaactgtaattaacgaaaaaaacaatgatcagagggaggctgatattaatcatgattattagtcataatgaaggagtcattagggagcagttcgtccctctcctccaccatccgataaaaacttaaaaatcgaaatttcttatagtttgtttttccagtaaaaatatttttaaatcttcaaaagcctctttttaaagcaatttttagtttcgaaaattttaaggaaatctatttttaaaagattttttctaaaaaaaaaactaagaaattttgaaaatgaacgaaaaaaattccaatttttaaaaatttttcgtcaggggaaacttaaagaatatctccattagatgatcattcactaatttagtgtgtgattagcacaaattttccaggatactttttgacgctttcctcgtccaattgggcagtgccaccgacccgttccatggccaaccaaatccgtggatttcggacaccgtcgacttttgggaccacgacaaaatgtacgcggatgtgtccgcgcggcgcctcaaactgtgggaggaatcgttggaggagctgctgaccgatccgctgggccgtgaaacgttgcagaaattcctggacaaagtcggtgttttggcctcaaagcaaaaaaaaaattttcggaaaccccacaaaaattcacgaaaatcaaaagaaaaatttttggaaaacagcgaaatttagccaagccccatagacctgtggaatcgaatgattgcattttttacgcattctctggcactttttggcgccgaaattattatgcattccggcaattatttgtaatttattttttaatttaagaaatgcggaaaatttttatttattaaaaagtttaaaaaaatgtaggggtttcgctcgagtttcacaagaaatctccagaaaatgggttcaaccttatcgagtcgtatcattggattcttgcaattttatatatatttttaatttttaccaggaatactcgggtgaaaatttgcgcttttggatggaggtaaaaacccatttaatcaaaaatgcatatgctaattaattcattaatatttaattacccaaaaggcaaattctcgccaatttttctaggtgcaacggttacgcaaatgcagctgtcgttgtaagtttttgtctaaaaattaataagattcgccgcagggtcgtctcatgaattccgccaagggggcaaaattaaaaaaatatatatatttttaattttaccaattttgggtttgataaattaaaaaaaattatatgccgtattaaaaatgacttggtacggaaatggccccaacccgatttaggcatttggcattttggcgaaacttgcgccaaattggtattattcgatcggaaccgctcagttgggcgccggcacgtttgggcgccagcatgtttttagctataactttttttttatcaaccgaatccaacattgttgatatcattggaaagctcgctctaagtgtccttctattagcctgcaaaattttaaaaaatttagtttaggttcaaaaaagttatggccagaagaattcaaaaaaccaaattttccaacttttttggccataaattggttcaaaattaacaaatttttttggaattttgcaggctattagagcatctgaagagctctcgaatgataccaagattattggattaggatttcaaagaaaaaagttatagtggaaaaacatgtgctggcgcccaacgcctgcgcgcccaactgagttttagaccgcattcgatagctctaaatgtgcaatattaaaatattagcctgcaaaagttcaaaaaagttcgtcaattttctgaaaatttatggccattagaggtcggtcaaaagtcttggggttttcaaacatttgtggtaatatgtagcttttttgaaatttaatgaaatttttttttgaaattttatagcacctaatagagaatatttagggctatcgaatgatatcaagaaaataaaaataatatggttgcttatgagcaaaattagatcaaaaaaaaatttttttttattttgatggttctcccatcgaaaatttgaattttacgcaaaatttacgccccaaaatttgcacagttgtgcccgtgttggtcaccaaaatttacaacgaattcatcgatgccaatgccacctcacccgtgaacattgactgcaaagtgatggagattacggaggagaatctgcgcaacaacccaaatcgatggtcatttgacgacgcggccgatcacattttttgcctgatgaaaaatgattcgtatcagcgctttttgcgatcagaaatgtaccgggaaatggtaagtgtttgttaggtgatctgatctgatgatcaatcaatcaatcaataagtgtgagagagtgaaagtgatcagaatctgaaggtggtgatcggaaatccgccattgaa

SEQ ID NO: 8404 - DNA, 5810 bp, Heterodera glycines
atatcaaaaaaagggcctaaaccgctcttaaatattaaaataactcaagtaaaaaaaaaaaaaaatcaaaatttagtagaaaaaaacctaatatttcctgaaaataaaaaaagaaaattaaattaataaaaaaaaaattcattttttggtacggtcgaaatttaccccagtttcctcaagcagctgcttcacgtagaaaaagtcgggctgcactccgctggcctgaaaaaagtctttctgattcacacactccattgaattgtttgcttgcttccaccaccacccccacgaaaaaatttaaaaaaaaatctgtcaatcatagaattttttggacaatttttttttcgggcgatccaggggatttgatatgggagggggagtattgtgccgtgccgtgccgttcgcatctccaccaccattttcaccacaaccaccgcacctttgcctccgcaattgctttgtcgggcagcaaaaagcgtggaaatgcatacatggcgccctgcacctgttgacagtgcacaccctccacttggttgtacgccttggtgaccagctgtgcacgcttgtgcaacgagtcgagcacagccgttttttcctgaaaatgagaggacaaatccaattattattattattactttgctattttaggaaaataatattatccaaaaaaaacaaacaaacaactctgccagtgtcaaaatcactctaaaaccataaagttttttaaatccattatctgccgggcggatccgaacccatgagaattaaaaaagggaaaatagattaaaaagaattttttttttgctggttttttcctctcgagcacttttttctgatcagttttatggtcagggcaaagagccgaaaattttggttttttttaatttcattaaaaaattcttaggaatttcttaataaaaaaatttcaagaaaaaaattttttgaaagaaatttcagcgattttttttgaaaaacttattagttcataaaatttcaaaaaataaaaaaaatttttttcttgaaactttcttactaagaaattcctgtatttttttttatgaaaatcgaaaatttttttaatttttcggggagggggggggggggggaacgacatgctccgagtttttggttcggtttgggtgaaaatggaaaattaataattaacgcattttctgatatattttttttaaaaactttacaattttatagggcgaatgggaaggaatttttgcaaattaaaatggctgacaaatgaattcgtcctgtgtcaaatgcagtctgttggaaaagtgcattgaaagtaattaccttaagccactggtcgtaggacgggtcgcccggcttcggatggtcaaccacacagtccatggccacctgtcccaggacggtggagcacagtttggcggagatcattttctgcaaaaagaaaatggcaaaaaatttcggtccgaaaatttgcaaattttgagaaggtttcggtcgtttcccctccgaattttttttttaaattttcaaccttaaatttttgcaaaaaaatcttagaatattacacaaaaaaaaattgcaaaatttttttgttgttttggtttattaggaacaataattctgctgtttgaaaattaattattttttcataaatttgctgacgatcaaattatctcatacaatcactttcaatcgttcttcaaagctgtttaggctatcagggattgaaaaaatgtaagtttgaacccgattttggacatcggcacaaatgtggagtaaccttaattttccatacggatttttaaaaaaaggacagttcgccccccttacccattcgtttcccgacgaaattttttttttcaaaaaatttttggcagaaaaattaaaagttcgatttttttgtctcaatttttcaaaaatagcgcctcaattttttttcaaataaaaaagtgattgccttgaaatggacgtacaccgtcgggtcaatgttgtcaaactggacgtaaccaccgcgcagtccgcactcgcccatgtaacccttggaacaggagtagaagctggccaactcgagtctgaaaaatcgtttaaaatttaataaaattcaaataaaatttcataataccaccactcacttgtcaaatggcgcacccatttcgaacatcactttgcggaagctgtgaaattcggcaccctccgcgtacacattttcttggtacaccttaagggttatggaaaaatatttaattttttatttaaattatggagcaatttaatatttatacaaacagaaaacaatttttgtataaataaattgtgaaaatgaaaccaaaaatctcttgcttcaaaattgctaaatttcctttccaagactttctttttaaaaattttttctttttaaaatttccttataaacaatttctaatattttttttgaatgatttgattgaaatttcgaaaaaccgtccgccgatgggacttttgatatacataaaatttggatgagaaaaaaattttcaagaaaaaatggacaaaattttggaaattgtacattttctttagcaaaaactttttccggccggcctccattggaccatttattttttgaaaatttgaccacaaaacgggcaaaaatttgtcatttttggcgcaaaatcgctacaaactcctgctttttcgccgctacgcttgaaattttgaaaaataacacaaaaaaatttttggcccggaaagcaacaaaaaaaagaaaagaaaaaaagttcttcgagtggcctccccaaaattttttttctgggtacgggcctggtctcatgtgatcagctcacttcgtcagcgaagatgtacagtcggtgtttgtgcgcaaattggatgatgctttcaatgttggctcggctcagcacctgcccggttgggttgcccggattgatcaccacaatcgccttcacatcgtgctcactctgtgtatacaagggggaaaatgcgtgcaaaatgatggcaaatcggatttgttgtgttttgaaaatgttgaaatttacgtacgggcgaggcgaattagtgccaatttaggaggacaacgaataatttaaactaccgtcggacaaataccaagcttggacgaataagaataaataaaccaaatttatttttttgcaaactttttgggccaaaaaacgtgttaaaatttttatgtgggaaaacacatacaaaaatcctcagtctgtttaattttcagccgttagcccaaaatttaaaaaatggacaaaaaaaaattgaattgtttttccaactaaccaacctccttcaatgcccgttccaattcgtccatgtccagcgcccaattgttttcttcgtccaggtaatagcccacctggcccaggttgtactcctcaatcgatgctgaacatttgttgcatgtttaaagatttgcataaacaaatttaagcagaatcgcttcggacgagcgaacagaaaattttggcccgggccaaataatttgagaccgtatttttgtcaggatccatccattcaaatgctggcaataaagcggaacaaaagccagcaaaaatcggggatcaaagcggaagaaatcgaggtccggtgctttcttatgaaaaaattaattcaaatttttctaatgaattaaaaatgtttttttatttccattaaaaatcgcaaaaaaacttttaaaggattttttcgtgaaattttcttgttgttagaaatttttagtaaactttttttgaaaatttttaaattttcggagagaaaacgtacggggaggaggacttaggtcgctaatcacgaatctgacatgtattttgactaatttctaatccctaacccgaactcgaataaaaatcgaaattttgaatttttaaaattatgatttttttgttcaaatttagattaggaaatcggaattgatcaaaataattgaaggattcgtgatcggggaccccaaaaaccccagagaataaatttttatgactatcacaaaaaaaattttgcaaaacaaaagggtcccccccttttgaaaaaattttcaaaatctgtcactttgcatatagtgccaaaaaattaaagcaaaaaaaaagtaaataaaataaattttttcataaaaatccgggattcccatttaaaaaatcggcgatgaaacccatgtaaatttgtcgaacaatgtaggcttacccgagtaaagtgggtactgcggaatgggcaccagaatgccggccttttggccacccgtgccgatgttgggccggacgaacagcttgagcacgttgcgaatggactcggacgcaccgccggagatgcacacactttccggatcacaggggaaaccgtcacgtctaaagggggacggacggacattttgcactgaaacccgtcgcaggcgaaattttttttttttttaataaaattaacggcgaacccttaattccgttttttatgtatcgttcacaaacatatagaaaaaaattttcggtgggtcaaaccaatttttttttttttttgctccgggttaaaactttttttatccaatgtgtcatcattgttcggaaaattgagcgccgggaaaaaagtaagaaaatcttagccgttttcgttgaaaactgaccatttttgtctttttggagttaaatttccgaaaatatgacaaaattgggggtggtggccgataggaaacaaaaaaataattgatttttaaaaaattcaagatatatttattagaaaattgtttacttgattactttgaaatagtaaaaattctattttttctaaaataattttgttggaatgggggcaaaggaatgaagtgtttgttacatcccaaatctgagagtatttcaatagaattttgtcaatgcgaatttcaatttttcggtgccactacctttccacaaattgggccacatgctgccggatcaggtcaatgccggtgctctgtgtgtacgcgccggcactgccgccaccgcaggcgcgcaacagtgaggccaccttgcgctgcacgtcctccgggaacaggttgggctgttgctgcaaaaaatgttattttagtcaaggttttttccggaaatcagcaccgccgggcgggtagggaggggttttacccatatttgcggcccgagctaaatgggagattttcggcccggacatttacaccccattttcttaagggtcattatccgtgatactttgcagagtcccaaagtttttcgcatatgcttactaaatattcttcgtagtaaacatatccttaaaagagcgctataattataaaaatcgacgaaaatcatatgtgaagtaaacctacttaaaaatggtgtaagtaaaaatcgtaattacgctcaaaaagcttctcaaacaattttagcgcatccaattccttctacaatcgcctttatacatcccattatgaacgctaaaattatcagagtgccgaaaatcgcatgtgatctaagcctagcaaaaaatggtgtaagtaaaaatcgtaattacgctcaaaaagctcctcaaacaattttagcgcttccaattccttctacaatcgcctttatacatcccattatgagcgctaaaattatcagagtgccgaaaatcgcatgtgatctaagcctagcaaaaaatggtgtaagtaaaaatcgtaattacgctcaaaaagcttctcaaccaattttagcgcatccaatcaattccttctacaatcgcctttatacatcccattatgagcgctaaattatcagagtgccgaaaatcgcatgtgatctaagcctagcaaaaaatggtgtaagtaaaaatcgtaattacgctcaaaaagctcctcaaac

SEQ ID NO: 8405 - DNA, 2429 bp, Heterodera glycines
ccccccccccccccctccaaaccttgatcagtgcgggctccgtaatgccggcaatcacttggcgaatgaaagtgatcggcgtctgtcccatggcatgtgcgtcgccaatgttcgctctgatcacgctggggaacggcaacgactaaattggattgatttactataacaaactgatcaataaaataatttggaagaaaaggcgccgccgccaaaattctcatttttaaaaaatattttcggacaaattttttgcggagtcggctgaaataaacataacgagcccacattttttgttcgacaaaattgtaagtaaaaatcggtgcgtcaattcagtactaaatggctctcaacagcggactgggagaaatgggcgccagctcggtttttagagaataactcctttcattgttgtcctaattgaataaatttgatagcattcaaaagcaaactaattgttcctatttaccttcaaaattttgaaaaatttggttacgtttcaaaaaagttacgaccagaaaggttttgattaaagtttttttggtcatatgttttgggaaacttaccaaatttttcaaaatttcgtaggaaaaatagagaacattcagttctatagaatgatatcaaattcattcattcaaaacgttatttccttatgaaaatttgtaggccgatctctagcaatggtataaaaattaaattaaaaatttcatggcttcttatcacccctctcggatgaggaattaatattcgaaaaagcggaacctctttcttggccaactgcttctccaattcaaccgcacggataacaattgggccacggactgcgtattcctagaaaaaaaatcgaaatgtaaaagaatttcgattttttttttcattgaccatggtgataacgttggggttgatcgtgtccacggtgagcaccttttgctgctgcagtttgtcgctggacgacattgtccggttcgagccgaccacagaagcttggcacaatttggtcctgttcaatactgaaaaaaatggaaaaattcaatgaatgccacggtgttcgctttttcatttcgaaggatttgggtttaggtttcacgaactctccaaaaaatttcttaaaaaatatgccaggaaagcaaaaagcctaagggatttaattaattagttaattgccatttatttattcaaatgaaaagtccaatagaaaggacgcaaaaggccgcttactctttgggaaagacgtggatggtctgggaaacatagtgaaatgtcaggtctccaacaagaatctattcaaaaatttataaatagggttgtaaattatatggattaacatattttttctgcgcatatgctatgaagaaaggggcttaaaaatagcatttctacgttaaaattttttgatttggtgaaggtttttagtccatataaatccatattttgggggttttcgggaataaatccatatttcgccatttttgggtttttagtccatattttggccattttttggaaattttcacaagaaaaatgaaaaaaaaacgaaaaatacacccctaaagatcaactttttggaaatttttaaaaattacaccccacaaaacacgaaaaatttgagttttcgtcgtcattttggcattttcaataaatattttcgtcatttttttgcgaacatttcttttttttaatgagaattttttcgaaatttggcaaacttggaggtgtttttgatacaacgaacaacaataaaaaatatgcatttttaagttttaaaccccattttttggttgtttattgtactttttaggtttatttaagcaaatattaaatatgcacaccttttttgggatttttgggggtttacaacatatattttggcattttttatccatattttggtccatatttggccatttttgtcctttttagtccatatttcgggcttttttagtccatatttaatgtccatatttcgcgttttttagtccatataatttacaaccctactgatgatgaatatataaatcgctacagttgtatgtgttttctattcaaaaatttataaaacagtattttctttagaattttaaaaaataacaattttctaattattcctggcggattatttctttttttttaaattagaggaatataaacgtcggattcggcttcaaagaaaagctttttggaggatgtttgaaacatgttgcctgaaattcctatcccatttattagcacgagaaatttccgaaaattctattcatttttcatattaattgaacaaatgataccaagactattttaatttgattgtgtttaagaaaaatcatgaagagtttttatcgaaaaatttatgttcagaataatgcaaaaattttcaaatatatttccattttatacttaagaaacaatcaaaaaataatacatgtcagttatcg

SEQ ID NO: 8406 - DNA, 1666 bp, Heterodera glycines
  unsure (1)..(1666): unsure at all n locations
taaatgcatggggaaagagttctattttcaacaaaaaatncggaattnttgggcaaaaaaaaagctccggaatttcggaattcaacattcttagtaaaaaaaacaaataaccaattttcacaatttatgtattttgtgtttgtaccaaaaagttcggctcattaagggatttgtttgaaaatttttataaattttatttaagaaattatagtgcgattggtgcatttgtagcagtcagggaaattattatttttttgaaaatttggtgcgattaaaacacacaagccatgcttattagtagataaattacatacatagcaacaaaaaataagttctatatcgcatttattataaaattattaaaaaacaaattttagtggacctacgaaaaaaaaaaattatttcgaaagtcaaaacatatatttccgaggacttttatgggtcgattatcaagaatcaggcatcctagacaaatactgaatcccgggctcgaattcgaacaaaaagtcgaaaatttgaatgctcgattttgtttggactaaaaataatttaaatattttttaagtatttgtgtgatttcaatttgtttccgtaatcctcttaaaaatatttcatgacttttgaaaacaaaaaagatttaaaaaatcggctcaattaaactgtaagcatcggattccagtaaattgttaaagtgccaaataattattttaatttttgtgcccaccttgcacagtccacgtggtcaccctgcgcggccatgtgcagcggggcaagtccattttttgttttggcagaaattggcgcaccacgttccagcaacagctccacaaccgtgtcatggcctgaatgttgttgtaatcggaatcacaaattcaggcaaaaatagctctattttgaggaccattgggtcaaaattttaagaaaatatatcagaaaaaatacggtgtcgaaatgcggcgatggtgaaaaatttatagagcgaaatttttttgattggtttacacaaattctcaaagtttccttaattttttgaatttttttaaaaattatttcgggggaagaaagtggcagagggatccctatttccctctggttagggcccggattataccagggatgtaatttagatgcctaaagtgttggaaaccgaaacacacaggctccaatgatttcgaatttgaaaattccgacacgaaaaatcgaaattcagattcttcaaaaaattcggacatcgaattccgacccaaaaatgttggaaatcgaatttcggtggtgttatatctctgagtcataataacattactatcaattcctggtaaaaacatttattacacatttatcttggtaacatttaccgctacgcgccgcgcagtgcagcggtgtgagcaggtcgcgcgtccgacagtcaatgatcgcgccacggtccaacaacagttcgaccagcttaacacgaccccatttggcggctacatgaagcggactgatgttgtgacgagccttacaaaatcatagtacatatacttgtaacaagattatgtattaagaatggtccaagaccatcgggcagaaatatcgggcttcgcgggtggggatgcaaatttccgaccaaatttgccggggattttttggggggatcatcaattttttgcaataccgtattttctct

SEQ ID NO: 8407 - DNA, 4306 bp, Heterodera glycines
gcggtatatatactcacgggttctttcttaatttgtaagaaatattcgtggtttcaaggcaatttttctttgtattccttataaagtattaatttaatagtttttttctggcatttctagtttttcttcctgggcccacctgaaagttcacattggcacccttttcgatcagcagctggccaatgttctcgttcccataatgcgccttcaatatttttttgtaattaatcatttaaattgtaaaaaaatagggattaaatgtttttagaagatgataaataagttgattttttaaaaagtataatttgttttatgaaaaatataattatcatataattatagaagaatgtcatttttttgcttctcatgtttaataaaaaaaaaattgtataaaagaaaccgagtatttatatatatatacaaaattttttccataaaattcgctctttaatgcattaaatccgtttttattaaaattaattgctaaattagttccattattttgtgtgattttgggctttttctagatgtaatttaaaaatgtaagaaaaaatcagagatatttatgtaaatttgaaacaaaaatttttcttcataaaattccttaaatagttacaatattttaatcaactattttttaaattaattccatattttgtgtgattttcggctttttctatatgataatttaaaaattgtgtaaaaaatcagagatatttatgtaaacaaaaaatttttcttcataaattccctcactaattttaaattcattttttaaaattaattgctaaattatttccattattttgtgtcattttgggcttattcatatgtgaataaaaaatgtataaaaatcaatttatttatataaatttaaatcattcgcataaatattccctctcaaatttatattaatttaataaatttaaattcatttttaaaattaattgctaaattaattccattaatttgtgtgattttggtaaaaaaaaaaatcaaaaaatagttatgtaaagaaactttataaagcaaaaatacatattttgcttcataatgtttgtctctctaattgcatcattttaatcactttaaatccattaaaaaaaattaattccattattttgtctcctaaataccgcaatgtgcagcggggtgaagccgctcttcgacgtcacgttcgggttctgctcgctttccagcagcagcgtggcggaccgcacatcgtcctttttggccgcaatgtgcagcgcgggcagcttcaccttgctggtgttgtcgttctccagcaacagcgccacaatacggtcatggccctgctgcagcgcaacggccaacggtgtgaagccatcctatggtgaaaaaaagggtaattagagagagattacggtggtggatttggcccgtgtccagcagcagcagcagcagcagttgaaaagggtggcacatacacccaaaaaattaattcgccattttgggcgcctattttcaggatttccggaaaaatccttaacaaaaaaaaacaataaaaaatgcttctaagtattgaaaaattttctcaaaaatttgattcccgaaaatatttgttttttcttgataaaaatttttggtttaaaatgtgtccttattcgaaaaaaaaaactttaaaatcttcaacaatttcatttaaaattgaaatataatcatgttaaattttttgattaagctttatctgttttgataaataaaaagggtttaatttttatttgcctatttagcgatttttctgcctttttaggtgtctatttcgtgttttttttttgtacctaaaaaacgaatcgctccctaatgatgagttactgaaaacaatatttgttggcaaaatcattttaaattttattccgcttaaaagttgtctaaattttccattgaaaatttttctctggatttgtggtgctaaatgccgacaaacagtaacattcccatttaattaaattataaaatgctattattttcttcaaaatattgcccacctctgtggccaatgcctggttggctccgtgggcgagcaggtagcgcaccaccacctcatggttctcctgggccgccatgtacaacggggtgaagccgttcaccgactgtgcattcacattggccccatgttcgaccaaaattgtgacaaccttaaccaacatttctcggttgaatcaaaggaagtgtctatttgaacagatgggctggcactcataaaaaagaagaatcgaatttgatcaatggcattgcaaaaggcagaaaaaaaaatattgtagatactaattgaatgcattgattaaggaacataatcagtggcacaaagaaatcttactgagtttgggcatataaaaattttatggattagcgttcgcgctccaaatttaacaaaaatggatagggataattttataaatttatttattttatttaaaaaggtatttaaattaaattttattcggccatgaaagtcccattattttcaaaccttctgaacgctttaatgtccccttttataggtttaacacaaaatataaattaggcaaaaaatttattccctttgcggggagggctacaaaattgtggaatcagctggataaagaaatcattaaaataaattctttaaatcaatttaaaactaaaattaaactccttaacgtataaaatgaccggaaaagtgaattatctctttaattcaagatattatatattttatatagtgatttggtttttattaatcattgacctcattcttatatttaattttgttgtgatttctttttttgtttaatttttaatccatattactcgaggacgatttaatctatgacacgtccgcagagtaagtggattactcccttttgtggacttttttctttttttgcataaaataaaaaagaattgaaacaataaatttatttgggtcattccaatcaaaaagtgatgccaaaatccaatcaaaatttgtggattaattttcggaaacaaatttattggttgagaaattttcttctcccccgccaccatattgttccggatatattcgccccaatcgcctcatcatttttcgacacacatcactttcatacaaaatcatcaaaaaaaattttgtttccattttttaaaacaaaaaataattcctgaaaaacgaaaaataaacatatttgatcaatttaaatcaatgaaaattgaggataaaacattgttttaaacatgataaaactaattcatttgactaaatttttaaaaaatctgcttccgtttttgaaaacacttcgtgaacagttaagaaaatgtaatgccgaaattaagcgctgatttttcaggaatagccatcctatattttgggtgtccgaacaatccatcactggacaatcaattagttagtggacaatcccgtcagcaaattttttttaaactattaacaaaattttgcgaaaaaaagtaagaaatgttataaattttttttacataaaaatatggcatttgcaaatacaaattatgctgacggattattgtccactgatggattgtccgagagctttagttttcaacagaaaaattttaacttttttcaccctccgcttctccaactttttttagtctttttttttacaattttctatccttattatatgcaaaatttctcgctcattttctgccttcaataaatgcctcattaatttctcacgaatttcagggaaaaaaaaagttttttacgggtgaaggtacacccaaccaaaacgggaaagtaaaagtgcctctgcgcccgtccgccgccgccaacgtcgtcatttagctgctggctgctctgctccaaccccaacaaatccaaccccaaacccatcacattagtgtgtgtagatggattatttggcggcggcgtcaaaatccggcgcaccaaaccaaacgcggatttcacccaccacagcaaacaacaacaaaaaaaaaagcgacgctgccgccgcgcagcggtgaaagtcatatcgccccggggcatcgccaccgcgcgggaatatatgcatttttttgttttgttttcgccatgcctttcttttgtcaccatttttgaccccctaggggggggaaataatgggcgagtgaaaggacttttttggggaattcactttcatccgtccaccgccgccgccgccgtgcctccgctatatccgcaaactgaaattccttccccatctgctgctctgacaatgagcagcaggtgattcgatttcttgggctttctttggcgtccgttttgtgcactacatatgtagcctagagctctagctacatacaacaa

SEQ ID NO: 8408 - DNA, 1986 bp, Heterodera glycines
ataatttgtcactttcttcacaatttctcatctgctgctgtctctttttatgttcatcactgacaaatgctgaagaagaaaacatggtgaagcaggaacagaagcaactggtgatgaacagaccggacattggtgaagggggacgaaacaattgaaaattatttaatttaaaaaagctaaaataaaaaaaaatatttttcaatttttagttaagcagtattattgtattgtaaaaaattttccaaaaataaccatcttttttagtttacataatagaaaaattccttaatttaccttaaaatattgctttttacccatgattttataatttaattaccattaatagaaaaattaaatttgaaaataaaattgttaaaattaaaaaatatcaaatcatttatttaaaatttaaaatcattaaaaaaaatttttagccttttgcgaagggtcaatcagtgcattttttgtaagcggtaagtcattatcatgaattaattatttaaattaactttaattatttaaattaaagcaaatgtcagcgtaagaggggcgaatgcatcggcaacaattctcgaaagcagtgaacaacaatgtgccaaatattgtgcagacaacagggacaatcggggcagaacattattgtgtaagttctgaatattattttttaattaatttctatgggtaattttttaattttcttttttaattattttttttttgattaaaataatttatcatagttcatagattaaaaaatttaattggctaaagcaaaattttaaatcagcactattttattattgaacaaaataataaaagtttaatttaattttaattttgttttttaatttaatagaaaaaagaaatataaattatttaaatttttaaaatttttttaggtggttccgcactttacgaaagtgacacgcgtcagtgcaaattgtaccgtaaatccaggcaaatttttagcaaaataattttgtcacaatttttaaataatttaaatttaagtgcacctgatggcgaattgaaacgctttgcagagaatggacggcgatattatgaaaaattttgtttgcccggtaagcaaaaataataattaataattttttgaaataattttgttctaagatgacgtgccaatggattgcgcattcacacattttgcccgtgtggatgaccacattttgaaggggtaaaaatgggatgggagtaaaccagggatggcacggaattccgaattccgacatttttagggtcggaattccgatttccgatatttttggggtcggaattgcgatttccgacatttttggggtcgtaattgcgatttccgaaaaaattttggacttcggaattccgatttccgacctttttgggagtcggaattccgatttccgacatttttggggtcgtaattgctatttccgaaaaaattttggacttcggaattccgatttccgacctttttgggagtcggaattccgatttccgacatttttggggtcggaattgcgatttccgacctttttggggtcggaattccgatttccgacatttttggggtcggaattccgatttccgacatttttggggtcgtaattgctatttccgaaaaaattttggacttcggaattccgatttccgacatttttggggtcggaattgcgattaccgacctttttgggagtcggaattccgatttcgacctttttggggtcggaattccgatttccgacatttttggagtcggaattccgatttcgacctttttggggtcggaattccgatttccgacatttttgggagtcggaattccgatttccgaaaaaaaatttggacttcggaattccgagttccgatttccgaaattttatataaaaagtcggaaatttacggaaattttttttttgaatttttttcaaaaaaattagcaattttgtacaaattctgttaatatattgcattgaagttttcaattttttt

SEQ ID NO: 8409 - DNA, 3323 bp, Heterodera glycines
gcagcggttagttgccaaaaacggaaacattttaactcaaacgagatcgtaattttgaaacccgggaacgggaactgatcttggatttttgacaagaaacgccgttctattgtaccatggccgcgccggaaatgtggattttaggattcgataaaatggccatcataatgaaacaaaattcgacgttccaaattattccttgttggaatccgcttaattaaaagatatatttatttgttaaatcctaacccaaagcataaattttcgaattgcttactccctccccaacgactgagcttttttagtgatagaaatatgaaaagggaaggaataaagtttttcgaagattcaattggatttcaaattatataaaaaaaaatattttttcaggaggagtcctttcgcgatccgaccaatttacaagcgaagatccagaagcatgatgcttttgttgcagaagttcaggtcggaaactggtgaagagaatttaattaattttggattgaattttcaagaaaataaatatttaaaaggcattcctttaatgattcatactatttaaaagtcagcccaaaattgtttttttcatcttggagaatttttttattgttcgaaatttttgactataaattttcatataaatttttcgtaatttatttttaattaataaaataatatttaacattttgtgggccaataaaaatttttgaatttaaattctttaagcttttctcttttttgtttatttaagaatttaacaattttttcttcgaaatttggtaaaagttcttttaaaaattgctttcttggcattttgtctaccgcctctttaaggcccattcgaacgcgatcaccaagctggacaagaccggcaacgacatgatccagcatgatcactacgagaaggaaaccattcgcaaacgtttggaccgtcttcatgagctgtgggaccgactgttcgccatgctggagaacaagggcatcaaactgcagcagacgctgaaactgctccaatttgtgcgcaaatgtgacgagatgctctactggatcaaggataaggtgaggggggaattgatcaatccaaggcttgatcaagaactgatcagattatggttgattgggttaaaaaattgattatacagaactcatgacatttccacagtgattaggttaagacttgattagaaatgactgatcagttttggcttgaccgttcaccgggggcttgatgaattgcgctaattctgatcagacacaatgaccaattaatttaatttcacaaaaaaaacatatcgataagtacactttttgatagaatatttgccaaatattaagactaatttatttgctaagttcagattcaattcgtttccacggacgacctgggcgccgacctcgaacatgtggaggtgatgcagcgcaaatttgacgagtttctaaaggagttgaaaagtcatgaggtatacgattgcctgcgcctttttaaggcatttttttatttttgtaaatttttaaaaatatttcagtcccgggtcttggacataaaccacgaggcaaatgcactcattgacgaaggccatccggaacaacagcaaatccatggcaaacgggacgaagtgaacgaggcatggcacaagctgggcacactgacatcaacaaggtgggggaagagagtgcacgacgtccccccgcccttcgaataagaaaattttaaaaaaatttcaaaactaaaaatagaaaatgaagaaaaatatgccaaaaatgcaaaagatcaaataaatttgatttttttgaatatgcgaaaataatttcaaaaggattacgaattgtatttttagctggacgtctttttatttccatatttttgtaatattttagtttttgtccatttttccgtacttgaaatccatattcggcattttcacaaaaaattcgaaaaatagacccttcaaaatggaaatttttcaattttttggaaataggcccctaaataggggactcaattatggaattcgaattaatcgtgtattaaaatgacttttttcattcatacaaattaccagggcttccttttttatgtaagaaaaatcgcgaaatatgtaaataaaatattataaaaatgctaaaatatgtatgaaatatgtacaaaaaccaagaaatatgtatgaaaatatgtaaataaaatttttttaatgtttattttttggaaaaatttctcgtaaaggggtcaaataggctcaaaatgccataacaatgacctaaataggcttagaaatcaccttttcatatcttaaaaattaatttttggtatctcacatttggaaaaaactgattttttggggtacattatcaaatttttttttaaaatttttacaaaaacttctataaattctcaaaaccccaattaaatatgtacaaaaaaatgaaaatatgtacgaaaaattgcgaaatatgtatgaaaagtccaaaatatatataaaaatatgtaaatatgtaataaatgccggtccctagtatcagccagcaaaaaattaatagagatattcctcaaattttcataataccaagcaatttaacatttatatggaactgttgttttagtttttaaagcggcaaaacttaattaaaaattccaaaaattaaaatgcatcgcttaaatttggcttaccagtcgaaaaaagccatgcgtaagtgccaacaatgatgtaggttttattgattctgacaaattgcattgagatgtaaattacggcggaaattgaatcgaacaaacttatgataagcacttggagaaacgactaaatattatttataagttaaattaaatttttttttgtaatagaattaaatgttattacaatggaaagccattttattagcaaattttcaagtaaaacttttttttgttcttcggtccctaaaatttttccaattgtattgttcaaaaataacatttattgagttttttaccaaaaattaattatttattcatttcgatcaggaggtggttggaatcacccgtttctacccccccccccccccccgctgattacgggcctgatgactttggcatttttcaaaaatatttatttaaggggagaagcgctgttcggtgcccagcaaattcagcgcttttaccgcgatatcgacgaaacattggcatggatgggcgagaaagagcttacgctggccaccgacgactttgggcgcgatctgaacaatgtgcaggcactgcagcgaaagcacgagggcaccgagcgcgacttggccgcattggagtcgaaggtggcacggcacggggaaatttgatcagtgacgatcag

SEQ ID NO: 8410 - DNA, 1697 bp, Heterodera glycines
ttattttcaaaaaaaataaataaataattttccgtttggtgagggagtggcgggaattttccacgctgttttccgcctgattacaggcctggtgattttggcaatttttcttaaatatttatttaggggcgaagcgttgttcggtgcccagcaaattcaacgcttttaccgcgatattgacgaaacgttggcatggatgggcgagaaagagcttacgttggccaccgacgactttgggcgcgatctgaataatgtgcaagcactgcagcgcaagcacgagggcaccgagcgcgacttggccgcattggagtcgaaggtggcacggcacggggaaatttgatcagtgacgatcagaacattgttaacttgaggacgtctgatcagtgcgatgagaaaatgattagtgcattattcagttagggatggtctgatccatacatggacaaggagggggggttagaaatttctaccaaaaaaaatatcccccacccccccccccctcagaggccaaaattttaacgaaatgcaattcaaaatcataaaaattttgggtttttggcacaaaattttgattatttttttcaatttcgtaaaaatttcccatctttaccagtgctttttaggttttggccgaaaattttacgaaattgcctcggacccccgtacgatttacgaaattgaccccccccccccttgtccacgtatgcgtatgttctgataggcacaatgatcagaaacatgatcaatgatgagctgttcagaataagtctctctgtattatataggaacggggaaggcaataaaatcacaaaagatggcactaaatgttttaggaaagggcaaagtaatttaatataattttcctacttttacccaagatggacaaactcggcacggagacgaaccacttgtgccaactgtacccggaaaagtcggaggacattgccgcgaaggtggacgaggcacgtggccggtgggaggcgctaaagctgagcgcagagcagcgcaagcggggccttgaccggtcgtacaacaggcaccgcttcatggccgactaccgcgagttggtcgagtggaccaagggcattcaggtgatcgggcacagtccgtgccaaatttgatttttactctggtattgtggtttttgaataaaaatggtataatgtaaattatctgttgagctgaatatttggcatacacaatgcatttttgtgatttggtttctggcaaagaaatcttttcacagatttacttaatctttaaatttttccggctgcgcttatcttttctgccattcaaatccttccattttcgaagaaattttgaaaaaatacccaggaaattttctgagatgaagaaaaataaacgtgttgagatgaattatggtgatgaatataaaaaatgtgagtattataaatgagttttttagttttcgaattagtttttttcaaaatttagagctgaaatttaaaatcatgttttaccttataaaatcaaacactttggttttaagaggatttataagcgttttccttatttattgtaattaatcattgttggtctaaatatatgaaatgttcatcttaaatttttccccatttggctatcgcacacctaagatttgtcgcatcggtaattttatcggtactttcctgttttgaggccacacccaaaaatttaaaaaaatcaacaaaagg

SEQ ID NO: 8411 - DNA, 5524 bp, Heterodera glycines
taattatattttctcaaatatgggtttaatccaatagtcccttaaagtgcctaattaagccaagaaaatgacccgcctttggtgtcggctaaatagtgctcaaagaaaaagcggccctttcgtttcagttcgatcagatcagccaaagggatggcacgcaaaatgaagtgcaattcgggaaaacgatcggccacaatttgaacggtggccaaacgccaatcgatgagacgggcaaagggaagcgccgccgggcgatgggaacagaggacggggacggaccatgaaagagaagaggacaaatggcaatgattaagcaggcaataaaatgataatgtaaatttatatggaagtagaaaagtgcaacaaaaccgtctgatttttaaaattaatttggtccataaatttaccggtcagcagagactcgtaaaacaattcttaaaatttaaaatatgttattaatgatgacgaggaattggaattcgtctttacgttggaacgatggcatttcggggaacaaaagaacggtgaagacggactgacggcccatgcgcaaccgatcatccgcagccgcgtaacagaggtgatcagcagaagaagcggaggaggaggaggagggacactccaagtcgatcagatgggagtcgcgggaagagtcccaaaatgagaggaaaaaggggaaaagatggaaacaaagggtgatcggaatgactgagtttgtgatcaaaataattaaaattcaactattatttcagaaaagtcaaatgatttgacagagaaagtctcaaaaattcctagcagtatccattgtttaaactcaaaagcaaagaccaaaaagcatttgctttactgcactaaaaagccaccatcgatgttttgagttgggccaaatcgtccatttggcgccggctgagcagtgccggattggccaccaaacaaacaaagtattttcgcatcaccggcaacagagggggcaactcgcgccaacggtcgacgctcggcgccggcacattcaaatggagcggaagcaggcgctgctcacttttgcgaaagagaagagaacggtcagacaatggcggagaaagaaaagtgtgccaaaaaacaaaatacggtacaaaattactgtaagacaatgttccaaatttcctttttgttctcccctaagcgatgctttttcctttttgcttttacagcccccccccccccgtgggggggaggtcgaccccattcagcagcactgttcgaccgacctgcggcgcattgccgcgtgagcagccggccgtggcgtgaccaccaccgccgcgcccagcagcgaacggtcgacggcgcccaaatgtccgtgcaagtcaaacaccttagaattaagccatgagcttataatccatcaaaaaacagcagagaaatgatcccactcaactcatacaaacagactgttaattttgcattcaaaactgcgaaaagatatttgcatatttcaaatattctctaaggagacaaacaacagaaccgcatcagaacgaatgaataagacccgtagattcatgttatgtgcgaagccgcaaatgttcgattttggcttgggccgtaaatgtttgaatcctttgaaaacggcactttcgtgccaaattatttttttaatttcgaaccgacgaggggcttagcccattttgccaaaatggcattttcaatgccccgtgccaccattcgtattcaccaaatggtttttgcctccactgatggcaaagtgttggcggaacaaagtgccttcaatgcgatgcttttccccttttgccgttgtttttgtgccgttttcgtccgccctcgccatttgtcctccatcgtcagcaacagtgtcaatgatcgaaacgaacagacatgcatttgctgggatggcggtgatcgacgcaatttgttggcccgaaacgaattggcgatggaattggtcggccaaggcggaggaaacgggggaattagcggtgccgttgatggacgacgacgacaaaggggggaaaacaaacaaaggcatcgaagggatggcaatggaacagcggctaaaaaggggaggggggaaaggatggcaaattgaaaaaagcaaaattcacaaaatcatttttaatttaaaaaaacactaatttattgttagcattgcccggcgccggtctgggcaaagataagtctggtgatagagaagtaggcccagatccgggaaacatttatttctcaaggaaaacggtgcattttttgaaaatttgcgcctataattttgaaaaaaatctgtaagaattcgaagagcaaaaaatcttcgttttccccttttcgagattattcgctcgttgcgacaaaaaattgtaaaaatattcatatgctttcatagcatttggtttttttttgtttttcaggtcctcaaaaaaatcccatcgcgttctgccgaaccatcaaaataaagagcagcatcaaatgatggcttacaattagctatgctatgctaatccctctccccctcggcacttaaaaattaaaaatggcacacctaaaatacgaatgggctttctgcgcgacattccgccgcctgtcagtcctctcgaaagtgttcgcctctctttggcggagagtgtggcaattgaacgcgtacagcgcgactgtcgctgtactctctctgcaacaacttcaactcctccactcgcagctccaatttggcaagttcggcctctgaaaagggcacattttgaaggaagaaaaggggaagaaatgaaatattttttttaattaaaaaatgtgaaaatttgtgaaaatgtttaaatttgcagctcattggcctcgaattggcaatgccaaaaagcgccgctagaaaaatcattattttagaaatttaaatttgtggtgcgatttgcaagatggacgaattatggaaaataaaaattttacaattggttgtgattttgttaaatacgttagggaaacttttgagtttttaattggattttaaagaggcacaaaaaagccaaaaaaaaaaatcgcacctttctcgcccattttcgcttcgattgcgtccattttcgcctgcgcttcgttcagtttggccagcaattcgatgtgctccctgcgcaccgattggaaaacgcgtgcctccgtctccgccggcacaaaatgcccgcgccaaccatcggcacattggcaacatttaggcggcaccgccaaaccattgccatcatcgccaaggccatcggagttggcataggacgaaaacttgctaagaaaatccacaaaattagaaaatattgatcgaaagagcgataaacttaggaaaaattcggtggcaatttctgttggtcataaaagttgaggaaatgcttttcgtttcccattttgtaattctctttttggccattccgttgaaaagcgtccagttttgaaatggaattgacaaatttgaataaaatcaattggcttgagacacactaaatccgaaccccaaatttaaaaaaatcacccgtccgacccatggccattaaaaatgagggcccatttcgacggaaattccaccaaaagtgccaaaacggtcagcaggagaaggcagaaaagcgtaagtgccaatcggacaaaaggccgtcggccgaagaggagtcttttgacgagtcggcagtggcctctgttttgttgcagcattgtgcacaataagccattatttgtgtacatattacaattaaattaagaacaggcgcggggtaatactttaccgtaaagtaaccaaaaattttatatatgactttcatcaagtacttgattttttccaaaatttttaattctttaagtattttctttccaatgagcagggctgccaaaaatatgcaaatgcatatttttttcctggcttttccatgctctaaatagtaggaaaaacactttcttttttgtgtttgcgtataaaagtctggacttttatttgcatatttgggtttttctgcatattttgccattttttgtgcatattttcagattttttgcttattttgccattttttgtgcatatttttagaattttttgcatattttgccattttttgtgcatattttcagattttttgcatattttgccatttttcgtcaaatattttccgatttgaatatcccttcggaaaaaaattgattgcctaaaattaaatccaaatctgaatgggtgcgcgagtgggtcaactgtgagcttcactgccgaaaaccttgagaaatttttgatttgaaattgcaaaaacaacctgtaaaattatgaggaataaaattttttaaattaatttacactagagtgcatcgggaccgggaattcccggtcctcagaggtcccggtcccgggttttgaaaatctcaggtcccggtagggcaaccaggaaccgggaaaaacaagcactggtaagaatgggggtctgagtgaaaaattagtgatgaatagggccgcaacttttagtgacgaaaaatctcgaaatagttaactaaaatagtgagtaaaaatgccaaaatagtgaagaaatagtgacaaatagtccgaagtagtgacataatttttagccaaaaattgagcaaaaataatttttattcactgattgcagttgcaaatgaggtactttccaaattttgaggcaaaaaaacgcatcagattaccgaataaaaaagttttgtaaatagagaaagtccgttcaacatcgcaagaagtcaggggcgcgaatttgtagaacggaattaaagtgggcggaacatcgcaatcaacactttttccggaaaggatttggcaaaatttggcaatttgatcaaatgagggattttttgagacaatgaaagagattttttggctgattatttctgctttctcgccggctgctttgtccaattggttgtgaacgtccgcaaaaatttccatcgattcgtttatcgacagtccatgtgactccaattttgcaatggcagggcataaattgccaaagttggtgtgaatgtacgcgaggtcttgccatgttgacaaagtgaagcacgactgactttctcttatgcatgatgcatcagttgggtcgaacgagttgaccacctaaatgcgtaatcctaaaaaagcttaatctttcacatacttccaccgagtccttcgttgacgaaccgagcaattgccgcgctatcaactttctccaagcatttgacggaaatcaaatgtggggtgtgccatttttgtccatccaattttccaatcagcaaattggccaccgctcttcccattttgtctgttgtttcgtccaccgaaatccaaacgaaagagtcgccaatattgttcttaattttctccattgtctaaaattaatttttgttattggtttgtttttggagtgacctggtcacaagttaaccgcaagtaatttttttgaagagtggttcgatggggcatttcacgcttacaatatttttccaaaaaaattttaaatttttcattctccaatttgtggaaaggaatgttagctgagacaaaggcttcacacaaatcaaggttgaa

SEQ ID NO: 8412 - DNA, 935 bp, Heterodera glycines
gaagcatactaatatggtctaaatacttttgatcggtcggttcatcactctgatcgaataccgttaccattcgtttaattgctgcatcattttgttttccggcctttttcatgtatgctgcggcgtccgtgacaagtagtaaaactcgatttttgtcaaacccattcgaaaaaaattatctaaagagataaaatttatttgcctcggtttggtttttaccgagtgcttcgttgacgaaccgagcaattgccgcgctatcaactttctccaagcatttgacggaaatcaaatgtgggttgtgcgatttttgtccatccaattttccaatcagcaattggccaccgttcttcccattttgtctgtcgtttcgtccaccgaaatccaaagaaagagtcgccaatatattttctaaaattaattactgtttttgttttttgaatgaccttgtcaaaagtcagccgcaagtaatttttttgaagtttgtaacgatggggcatttcccgtttacaatatttttccaaaaaaattttgaatttttcattctccaatttttgaaaggaatctttgctgagacaaaggcttcacacaaatcaaggttaaattggtttggaacattgtttggtgttgtcaaaaattgctgctgttgtcctccattgttccgttccaattttgctttgtgttttaccgtttcgttgtgttgtttgagatgcgcgaattgcgtgcaaggaatctgtgaattttttattaagttgtcgttgttacctgttgttcacataactgtcaataaattattttgccagttgttgaataaaagtcggttcctccgatccgtcgaatccatttacgaaagttggcctattttgatttaatttttggcatattttaagtctaaatttaagaatagaaaacatttattgcggtatttagttgttctt

SEQ ID NO: 8413 - DNA, 2603 bp, Heterodera glycines
caaaaaaaaccgacttaaaaccaaaaaattaaaaaaacatgttttggtcatttttgaaataaattctgttaccaatccgaaagccatttttcaaaattttttcggcggcgcctaccggcaccgcccgcccccaactgtcccggaagttttaaaaaacgcgccgcaaaaaaaaaaggtggaaaaatggacaaataataaagtttgtttctaaaataaatatatttcatgaaaatattttttaattttcatgaaaaaattttaaagatttttgtttggatttttcatgacttggactcggtttaaaaactaggactctgacccggctttctgtacccggcaataccctgacccggtatttgcccaaatacccaggcccgtacccctaatttaatatacgattttgaagttttttaaattaaaaataaggctacagaaaaaattgaaaaactctcgcctctcgtcctctcgcctctcgccaactctcgtgtttttggggactctcgcctctcgccaaactctcgctctcgtctttttggggactctcgcctctcgccaaactctcgctctcgtctttttggggactctcgcctctcgccaaactctcgctctcgtcttttctgagacaagtcacacccctgcttggtatcattcaaaactatatgtttagaagattttataagcttttctaaataaaaagttaaagcttgaaaattgaaaaaaactcagaattttttaactatttttgttcttttcgaatcattacgaattttgcttatctgataatgtaaaggaactttcgaatgataccatgtttgtttgatttgtccaacaaagaaaaacagttatgtaaagttgtctctcagacgcagttggcccgttccgtcccgttcataatttaaatcgacctgaaatacattaattaaatgaaatttaattggtttttttaatccgggccaaagccattcgggactcaaccgtcggggcgcaaaaatttggtccgtcccttccgcattgtgtgaaatggttgctgttcggtgggacacatcttttttttcgtcacaggcggaagcgccaatttgaaagaaagggaacaccgaccgaacggcggagggacgaaagggcaaaatcgaaaaccaaaaattggtctcccgtccccaaaaaatttattattttttttcaaccactcgtaagtttctgcgttccattccattgctcatccgtacgtttttgtcccccgaaatatttgccgataagctaaaatatttttaaaatttagaaaatttatttttgctttagatttgcttattttaaagatatatttttgcttgcacataaaagggtgatttcagccttacaaatcacaattttttaacaaatccaagcatcctttagctataatagcttcttttctttaatttctttttttaaataatattctttatataatggaaaatgcggataggcgccgccggaaaattttgaaaatttgattgtgaagtgttaacagattttcaccaaaaaaagacaaaatttttgcgattttggtcaatttgttaagaaaaattgtgcgttattttttggggttgggcggtgccattggcgctgccgggagaaaaattataacttttgacccttttaaacagattttcattgaaaattgtctatttctaggttaaatttagtaaaaattaataattgttttgacaaaaggccaaaaaatttaattttttttttcataaaatctacatttttacttcatacgcaaaaatgcgatttccaagtacaatcttggaaaaaagtacagttaaacttttccaagcacaaaagccgaaatccaagtatgtacttggcattcaagtacgaatccgagccctgaactattataatgcgaaaaatactaatattttaataataaatttaataaatcagatttaagcaattgtttaattcatattcattcattatggattcatataatcactgattatttttaatcattttttggcaatttattaattaaagaattggccatccagaaacaaaaagtcacaaaatgaacgtttattcggcccaaacttattacaacaacgcatcgccagcagaagtgaaaaaggcaatccactggaattggattttgttcatcgccttttgctcggcatacaaaatgacaatttgtgggcaatcgaagcgaggcgaattcaaaattttgtaatttttgtgaaagcgccatattatccagttgcaaaaaagttattgccagatatgcacaaaaaagcgactttggaaaacttttacggacaagtttaatcttgattttcagtttggaaagaaagagcatttagtggtatcgaatatatcaagattttcaaattggttggttatgaaaaaatagacactgttaaaagtcaaaatgggtcaaaatatgaagctaattttaaagcagaagtcaatcgaatcaatggaaaattggcagcagaacagaactcattatacggagataattgacgaaagctcagagcaacagaacaataattatggacaggggcgatcaaaacgccaattggcaaattgtaaaatatgcggacgacaatgtcagtacattt

SEQ ID NO: 8414 - DNA, 3177 bp, Heterodera glycines
  unsure (1)..(3177): unsure at all n locations
cttttgctcggcatacaaaatgacaatttgtgggcaaccctaaagaggcgcacncaaaannnngnaacncccgngaaagctttatagcanccagnngcaaaaaagnnanngccagaaangcacaaaaaagcgacnnnggaaaacnnnnacggacaagnggaanccggannnccagnggggaaagaaagagcannnagggggagcgaananancaagagnnncaaannggnnggngangaaaaaagagacacggnnaaaagtcaaaatgggtcaaaatatgaagctaattttaaagcagaagtcaatcgaatcaagggaaaatgggcagcagaacagaacccattatacggagataatggacgaaagctcagagcaacagaacaataattatggacaagggcgatcaaaacgccaattggcaaattgtaaaatatgcggacgacaatgtcagtacattttctacggtgtcaaaagctgtgaaagtgagcagatttgtttcaaaaatgagaaaatgcaataaaatttttaattgatttttttattattatattaatttaccagattaaatattaattaaattggaattgtcggatattgaaattaatttttgccaaaatcaattaaaatatttattttcataggtatggtaaaatgccgcggctgtcgcttggacaaatgccttgtggccggcatggacccgactcttatcaatgtgccaccctcggacaagttcaagcagttcttgaccgaattagagaagcgcaaattgagcgcaatgctgactcattcggaaaagaattaaaaaacaaaattatttgacaattgttttaagtttttgttttgaaaaactaagtttaacttaaaaacaaaaaaataatttttctatattttttgatagataattttttacccattctttattcagttatttatatttatttggctttatcaattatttattcttatttactagtattttattgcttaaacggcacttattgatcgcattttttggcaatgcttctccatagccttttctttttatgtttacgttcttttactcataaacaattcatgacaaaaaaacttcggccaatttttgttgaaatatttggcgaagaatgggcaaataaaataattggagaaaataaaaatgagactgtgatcaaaatgcaaattatcgcagaatgatcaaaatgaattaaaattttttcttgaaaattaagaaatttttgcccgagcccagctacctttggcaatgactatggcgctacttacaaagtggactattttgaaaatttttcaccttattttatacacattaaatgttttgctttaaagagccgtgaaaacatttactaggggttttttgtgtcgctaagcaccaaaatggcattcattttgacctctttcgaaccatggacccgaattcgaacaaattcgaaaattcaaaattttcaaatttaacttttgtgtttgaattcgggtcaggggtttcgaaatcactaacttacctctttagattaagctgtccaaatctttgcaatgttatggctacataaaattatgggtttttaaattacagattttttaaaaatgtgcaaagaacgtctttggacaacggatttccttaaatcttttgtaaccaagccaaattgaccaaacataattaatcatggaaaatccctgttttacttttcttgccgcagcccttttttgccatgtcaaaagctttttgccaacatttggtcatgcccaattatgcattggtaaatttcccgcaaaaattcataatcgcgcattatgcggaaatacaacaaattaaatgcctaaaaaagaatgcattttcgattcgcgtttcggtcttgcactaaaccttatttttttcttgaaaattttgacttttaatttttttaactgatatgaaaaattgtattcaaaaatcgctggaatcagtgaaaaattaattgattgtgttctgtgatattaatttttgcacaaattttgcactctggtcataaatgtttggtttatttaaattattagtttaagagtcaaatttattttgtcattcctcgatcccaacatctatgtaaaggtctaaaagttcaacaaaaatataaaatgaaatataaaaaagcaaaatattttttgtattaaaattaattttaagcactattttaaaattggacaagattatcgtgtaattttgatttataaaatatatacattaaaattataataaataatgatttactgtttgagcgttgtacgcttgctcaaaatatgttcgaggaaatggcgacggaaaaaacgtaattggacaacttggatgaaaagcctaaataggaatgaagcagaatttaatttggatttcaacaaaaaaaaatttccctaaataagaatttcaaaatggctcaaaatatcccaaaagttgaaattcttggacaaatgtaataataaattttaacaaaaaatcaatcgctgtttcaaccgacattacctttgatcaaagtcttctttaagcccattttgcacattttttatccattgttttgcttgtttaattaacttctccgtttgaaatctgcttaattgttttccgatgtcgaccgtataatcagttaccgtatattttccttaagttaatctattttttatgataaaaataatagataaatgaaattttacaaaaaatgtttttttggcagtgtgtattcgtaagcaaattacacaacataatttatattgtgcgcggagttttcagtaacaaattgtgaaattgttttgaaaattataattaaagaatttaattaaattaattttttattcaataatcatctgaacttgacgcgtcgacagtttcagcagatttatttttgggtggtgccgagtccgaaaaacttatgaataaaattaaaatcataagaatttcggggaaaattttttcaatatgcatatttactaaaatgaattaaatatgtaagaattggaattttatgaatattcttttttaaaaattctcaaaaatatacagtaaaaaatctaggttgaaaaaagaatttccattcgaaaatttattctaaataaaaataaatttataaatcgattttcttttatgctctttttataaggaaataaaattattagaccggaagcaatggcgcggaagccaac

SEQ ID NO: 8415 - DNA, 1491 bp, Heterodera glycines
ggtccccaaaggtcgggtcaccaaatgtcgggatccccaaatgtcgggatccccaaaggtcgggtccccaaatgtcggggtccccaaatgtcgggaaccctaagtgtcggatccccaaaagtcgggtccccaaatgtcgggatccccaaatgtcgggtccccaaatgtcgggatccccaaatgtcgggaaccctaagtgtcggatccccaaaagtcgggtccccaaatgtcgggatccccaaatgtcgggtccccaaatgacgggtccccaagttgcaaatccccaaaagtcgggtagccaaattcagcacattacatcaaacaagctaatgctaaaagcctatttttgtaatgtttgtgaattataagcaaaaaacattacgagaataatttttcaaattttgttagtgccggaattgtagcatttgcataatttttatttgcaatctcatcacttattttgatcattaaaatttaatataatcaattgaaaaaagctccgaaattttagatttaaagtgccttataaaattaaaatgaactttttaaataacttagttttttatgatagaataaaatttattgagtccaaaattttgtgtgaggggactctcattttttgcgggtttaccaagcgagagcggaactaaaaatttaattattgtaattaggaataaaatttatttatgataaaattttgaagaaaatccttttataaattaaaaacaataataaataaatttaataattgttcgtctcgctttctcgccttttcagcttctcgttatcgcatttttagcagaaaattgagacttttctgcactgttaagaaatgaagttcagaaataaaaattattagaaatcttgtaattattaattaaatgtatcactttaattcgtgtcaacgatattttggcaaacaatatactatgatgctttaacttaaatttcaaaatttttcccggcaatgcatatggcacagcctttccaaaaactctaaaaaaaagccattaattggccattttgggaaaatctgttaacaaatggcatttaattttcaaatttttccaccgactgcgcctatcggcaccgccgagtccatctcttcaattttcataaaaattgagtcagaagccaagaaactcgatcatttttcggacgaaatctgttggctgttctgttaagacataaaattttttgaacaaaaatagctaaatgatttcaaattgattgtaatcacatagcgctccaataattacaattcgcatcatttttggtttttttaaatttcaaaaaatttataatatggacaattgagttctgctagaaatgagcaccccagccctggtattttttttgccggaaagactgaatgcaaaccacaagctcggccataatcctattttagggatccattgttaaacctttttagatcactttataccattaagggaagagggaaaatttgaggttgatgacacatattaacga

SEQ ID NO: 8416 - DNA, 1175 bp, Heterodera glycines
acaactgttcacctttatccgattgatcgcctcccatgccaatttgtcaccggtgggacaactgagtgcaccgaacagagtaccgttcagtctgatcatgaagcagtgaatgatcgcaacaaatttcttattgttcattttaagcttgaagcggcgattaatcacaataatgtccaagtttagcaagtaaatgccacgggccaaccgaaggccttcgcttttcaccaattttgacgactaaatgagaatatttaaatagttagaccatttcaaggccatgtcataaaacgattttttgtgaaaaaatggcaaaaaaattaattggcatattaaaagcaattccttttttacccctggcagtgccacttcaaaatcagtgtctgtcccaattttgaagctcacttccgttctggtggcaccctctggagtaaaaaatggcataaattaatcaattagtaattaatgactcatttgaattaattaccctttttgacactcaatagttcaacaattacactttttatattggcatcggtaagtgcttcgatgctgatcatctgctgttccgtgttggtgaattttatcatgaaaatttggtcaacgtattttgtcggacaatttgattggccggcggatggcattttcagatcggatggtccaacggaatccgaaggttggataaactcaaaggaattaaatttaataaaatggaaacttttattaaaaattgaatttttattatttttcataaatctgggaccaaagggggaggccagggaaaacagaaaaattggcaaatccctaaaatatggtcccttattattggaatgcctttctttttacccatgcttcaatgaggcatttggagctgcggtggatgaacagctccatcttcagctgttctctttgttcttctgtttggtgtgccatcggcagcatgtcaagtccaagaagccaaaggtcggcataatccgacaaaaaagacggaccatttgaacgaaggaaatcattttgcatggcacgaccaccgaagtctgagaatggcattttgggaaagccgagaatgccaatttaaaatatatataataatttttcaccattttccaccgatgaaaagcgagtgaatggctcattacgagcagtttgattcaaagcaaaaagtacagaaaatttgt

SEQ ID NO: 8417 - DNA, 2457 bp, Heterodera glycines
atttccatatagcccagaaaaagataaataggtaaatccctaaaatatggtcccttattattggaatgcctttctttttacccatgcttcaatgaggcatttggagctgcggctgatgaacagctccatcttcagctgttctgtttgctcttctgtttggtgtgccatcggcagcatgtcaagtccaagaagccaaaggtcggcataatccgacaaaaaagacggaccatttgaacgaaggaaatcattttgcatggcacggccaccgaagtctgagaatggcattttgggaaagccgagaatgccaatttaaaatatataataatttttcaccattttccaccgatgaaaagcgagtgaatggctcattgtcagcagtttgattcaaagcaaaaagtacagaaaatttgtgttgtcctgcactcaaattatatcttaaaatatttaaaaaattattttaatacaaatttaattttataaaatgtaaaattaaaatacaaaaaaatttggtacttttgcttaaaatacttagtaacattaactgtttatttaaggaaattgatgtttccaaaataataattcttccattgttttggttattttgctttggcattgtgcgcagtttaattccacgccaaattattgtgccattttcgcggccattctttgccatattttgcacacattcttttccaagcgaattgtcctggggagaattaattaggtaatttattaattagctacccaaaatttaccattttagcttcaactataaattttcttgtaactttaaaatttctgcttttctccaaatgattattgcctcgttgaagaagtgccgggtaacagacgaggaggctattaattgaaaatataattatttgcattaattattttggagttttttcacccatcgtcacaatttccgccttcccgaggcatacgaaattcaattccgtaaggcttatttgcggtttcttttgatccattgttggcatggcattgtgccaaagtttgaatttgcacttctttgaatcctccgccgccatccgtcaaatggacacttaaattataatttgaaatgtaattgcttcaaaagtttacgaatgattagatgggaattgacaattgctgaacattaagcaaacctttaaaagcaaaattacattctcaattaaaaaagtcattgactctgaaaatatcaaatattttaaaagaaatatttattcaattatattaaattttgaaatgttttactttttaaattataaagcaaaattttattttattatagaacagaaaattgtttggaatattaatgaattctgtgatcatttaaaagtgatggcaatggatatcagcagatgattcagcattttttatggaaattaatgaaattttgtgtttttctctcgcactctctttttgttcgcacatatcttttttttcttgcatagtttttcgacctatgattactgatcatctttgatcactggtcatctgctgaatgtgccaactcagcaacaaatgacaatttgagaccattcggctgccatcccaagattcagaaatttattttatgcgcaaatcatattttgcgattttatgcgtatataataaattatatgtcctactaataaaaattatttccaaaaaatgaaaaaaaatggtttttcacccatcggcaaagccttcagagctgaggcaaacaaaattcaaattccgtgaggattctttgcggttttatggcaatttaaaaagccatttgtactattaaatactaaaaaataataattaaatatataataactaaatatttatttaatattaattgtttttcacattcaaaaatatttttacttttaacggaataaagcaaagttttattttattatacaacagcagaaaattgtttggaatattaatgaattctgccgatcagagaaattgatggatgggaatggacagcagcagatgattcaccattttgatataaattaaatgcaaaaataaaaatataattaaataaatcgtaaaaagaaaaaaacatttatgaatttaataactcaaaattaaacagtaattttaatttgcgagtcctgttaatgattgggttttaaattttcatggatacggttagtccgacaaaaccctgtaaatattgtttttcgggaaaattaaaatttcctggttggatacttgaaaaatctgttatataaatattatttacaaattaaaagaatttgcttacaaatagtcggaaaaaatggaaataaaattatgtgcttattaatgcttttcgagacaatctgtctcgaatctctccggcaatttatggctgagtgttaaatggcttataaacaattcctttcactcctaatcgattttgtatcaattttctaaatgttggatctgtcattcaaaaaacccaagatatatttaaaatatttaaataaa

SEQ ID NO: 8418 - DNA, 2073 bp, Heterodera glycines
  unsure (1)..(2073): unsure at all n locations
cagggctggacgtaattacgaatgacggattccgtaattgaaaatccagttacgtccagccctgttgtacaggcgcacaatgtcctttcgcgtgagatatgcaaaaatagacataattaaaaattcatagttggcatttttaattcgtaggatctcactttttatcgactcgaaatgtcatttaatcttcaacatttctatttttaataaaaattatttaaaatttttaaattgagaaaaataattctcaaaaaaatgtttcctgcatttttaggacagatttttgcacttttgcaaattttctaaatacatatgccaactataaaaatagaacaaaatttttttgcgaattttttgtctttactggctattttgaagtttttaagcttatttcatccatattctgaaatttttcgtccattttttaatgcatttttggattttatttttgtccattcaaatccggtctgcgcgagaacctttcccaaatgaaactcgccaattttcgaggaaaattcaaattttaactgacaaactttgaaactttctattataatttcattaaaaaatccttccttttttcgttttatttttaaaattagacatttaacttgccttcgaatttactaaaataattttattggacataaatttgtgaaaattcacagtgtaaacattttaaaattataaatttgctttcataaatttttttatttaaaaattgaactcaatttttgagaaactttttgtctgcagttaggcgttaattgtttattctatgatcagcctgtcacctgatttcgttaaacagttgggggctgaacgaacgtgcgcgagaaccttccacaattgaagctcgccaattttcgaggaaatccaaattttaactgataaactttaaaactttgttttataattgcaattttttttttcgtttgttttaaaattttattttgttgtagtatttgttatgcataaattgaggtgaatttaaaaatgtttcttattttatttttgtataaatttcttttcaatttatttttgtgcttattcatcttttcattctttcttccgacattttaattatttttttcattctttggctttttcatcttgacattaacacattgttaaaataatgaacataaaaaatgttttcttcttttttgcttattcatcgctgtaaatcaactgcaaattgttcaaatttttaaagatgaataatttctgaatatatattttttctatttaacaaaaatcatttcaattatttgcaattaaataattataattttattataataaggaattaataatagattattttgtatttgtgtaaaaattatgcattgataaattaagtttatataaagtttgttaagtgtattatgtatttattatttattaatttcttcacattttttaccgtactattcaactccgtcaatggccaatgcttcttcccctctgaagagtaattttacattattaatttttattttaagtaatgttcaggtcgaatgccactcagacggaaaatcaatgctgcggtgaaaaagtaaattcaataataccgtatcactaggtttggtacggtcattcaagaaacgatttaagtgccaatatatgtcaaaatgttcaaattcaagatggcctacacgatgaaactgaatgagtcgtgtgcaattcttggcaaaaagttcgattgttcatttgcgtggcttttggagcggtacaaactgtcggacaaatacgcaatcaaagcgaacactgaggtaaaatacacaattaaattttaataattcatcaaaataataaaaatacttctctttaattgtaatatttatttaatttaataatccatttcaacagttatcatttctaataacttttttcttttcattttcaattactattccattttgagtgttttgtgcaaaaacctttctttttatttttcattaattattgcaaatgcaattagtaaataaacgaatcattcattttttaatatttaataattaagaannaatataaaaaatattttattgtaaaaatcaggtcaattccccg

SEQ ID NO: 8419 - DNA, 3758 bp, Heterodera glycines
tttttatggatactgacatgaacaaaaaaaaactgtgcttttacaaatttcggaatgcacccattggactgtgtcgtcttcatcccgctccctccctggcccaaaacacgaacaattttctgcagttcatctgccgccgaatcgatcagtgagccgagcgagctgatcaggaacggacaacgctggcgcaacacgtcgttcagtgcgccaaacaacaggtcccgaaaggcgatgatctcgccgatgatgataacccgttggaggagcgattcgatggcggacggtgccgccgttgcggtcgacgcacatgttgaagctgtacagacggaggaggagccgggcaacgaagtggacgaatttgcaactgacgaagaggtgaaggaggacgcataatgttggtggtgatgatggtggttcgtccgtcgattgttttccttgcaattcaaatcggaagaagacgaagcagtacaacaaccactgagttgggcaacaatctgtgaaatgtttttgtttaaaaacaaaaatttattgcacaaaaaagtttaaatttaattttaaaacttttttaaatttttgggtgttgtataactgcggcgatcagtcaaatcgctgaaaaactgatgagagcaaaaggagagagagagaaagtgagagaaagagaaagccaaaaaaagagcattgagaacgcacttctcgcagttttgccggcttgtcaaagttgacgcgtgccgcgtgcagtgtctccctgttctccctgaccagcttgaacagctccgtgatttggcttgcaatttgccacaccagccgctcctccatcgccttgatgccgtaagggccgatcagttgggcaagcgcgcgcaattcccgcgggtccgtgtaactttcggcgaacaatgcaccggcgccggtggcggcactcgtctgctgttgctgcggctgttcactggtcacaaatgcttgcaaatggtccgagtacagcaactgtccggtgctcgccttgcgcaacagcacctccaaatacctataaaatggcacgtgatttttttggcataatgtggaagagtgcagcgtcgcatggcattgtaatgctgcaatggcagaggaaatccaacaagtaccgcttctcgagaccacattatgacgagacacaaagaaaaaattcaatgaaagaaactgaaaaaccacccttgtgggttgtgattgtaagtagagtccgggactgggagttttttactgagggttgattttaaaaagtcgaaaaatttggcccccaaattctcatggcttacgacgagacgaaaatacgtcagttctcgatactaattgaatcaaaatccatttatagggaggacctctcgtctcaccattttgagtacacttcggccaatgtctcctgcccatgggcgtcctcccgctgcgattgttggagcatcgcgtcgcggaacagacacacaatgtcataggccactacaaaatgtgtaggggtgccaattttttccaccatgagtcaaaatgcggcacggaccccacaaaaacccggcaaacgcctttgttttccggcaaattatttgaaaaagtgtgaaataaaaataacccacaaaatgtgtccaagtcctgcagcgcgtgcatttgggcacagagaaatgccagcatttcggacgggcgccgaggatgcggtgacataggacaattggcggtggttgtgttgctgtcattctgtgccatcgccggcccggcgccgcctcctacgttcggtgccgtcccggacgttgtcgtcgctgttgcgaaacgtaaatgccggaccagcgacgtcttcagatgccgttccaagttttggtagaggaattcacggggcacaaaaatgtgcctgaaaatttttgggggaattaagcgatttgctttgttttttttctaacaaaaaactctttttcaaaattttcaattaaaaatgattgatttggcgaaatgtttatatgagtacgctgtagagtaaaacaaaaaatgcacttggaaatgtgaatttctttggcactgccaatggcatggcacagctcggccaagtaaagcgcggtggagtcgccggcggagacgggttggcccgcttcgcgaatgctctcgtggccgggcattcgttcgtccgccattttttgttgctgcgcaagctcacacttatctgtttatgaatagggcatatagtaaattaaataaggagtagttcaaagacaaatgccgacggaggaaaaaaagattttggctcaaatgacatacttttggggtgggccaaattttttaaaaatgtataatttttggctcaaaatgacaaaactttttgacattggggtcatatttttaaaaaaatcaagggaattcaagcttgtgccgtcataaaatgcttttgttttccaagaaatcactcattttcatttttaaaaaaaccatttttctgtctccccccccccgtcgttgaagaccaacccaccgtcattttcagctgctgccaacagtttgtaagtggcggccaaaatgcgtgcgcatgtgtgcggcgattggttcaactccatttggtgtttgtccgtgcacagtttgccaaacacttcgatgaccttcttggacagctcgtccaacgcgctgttgcacgtttttagtcctgaaaaacacaaaaaatgatgaaatatataaaagaaattttacgtaaaaaatttaattaattcttagaatttttgcaaaaaagaaacaaattctgaggtaaaagtcgctacatactttgagggtttttaattatttcaaatgatcgcggttaatcacgcgtaattttttcaaatttataaaattttcaaaaaaacagaaaattttttataaatttttgagcacctttctcaatgacaaggtcccgctcttccgggcacatttcgtgcaacgcattctcaaagtttgtggcaatgtgcgcaaaagcaatggagaagcgggactggacgggaaagtcgagcgcatggcgaagatgggcatcgaacaaatgggcatggaaactgaaagaaaatgttcactaatttttttaaataattttttagtttaagtactaaacgattttcagtgtttaattaagcattttactatatttcctatttttattttggaaatttgagtgctttttggattttttaaaagaaattttgcgaaattttttgagagattttgataggaaagccttggaggggatacgaacaaggaaagaaaatttagtcagggattcatgaaaaattgtgtaaattttaaattgccgccgggaaaatgcgttgaaaaacgtgccaataaatactgaggtcgctggtctcgcccagcaacgcgtgcaagtcgtcaatttgcttcaggtggaaaatggcggtgttcagcgccaccgccaaattggcatgggtgtgcagtttgaaggcggaccggctcacgctgctgttggcctggaagcggaaccagtcgagacggacagcacgcgagtccaccacaatgccatcgactggacaaaatttccatggactattgttctcggaattataatgtccaatccatgccatgcctttgacgctttccaacgcgtcggcacatgcacggaggagcagcgcctcgtagtcggacagttcagcaccatcggcactgagctggtggagctgttcagccaacaatggtgcgtcgtagccagcaacgtattcggcatggtaatgggcaatgatgtcggcatgtttcagcaccaagttgcgcagttcgca

SEQ ID NO: 8420 - DNA, 1587 bp, Heterodera glycines
ccgctttttttttttcaaatttttcaattttttttcctttttattgtcacaattgctttaaatatcaaataaacgagctttatgtgcttattgggtacaattccgcgatttgggtccacaaattataaaaaatatccggtcctccaaattgcttacgccacaaaaaatcagaaatgtatgtggaaacaacgtgatgctgtgagtgccaaatctcgctttatgttcttcgtctggtagagccaaaactttgaataaagcatcaagttttaaatttttaagtgtttccattaatctaaaagcaattgtgacaataaaaaggaaaaaaaattgaaaaatgcgaaaaaaaaaaagcggatacaaagtaaattagtacccaaaaaaaaaggtgaaaattaaaaatttgtaattttgtcaactcttaaatttttaatttcttatatttcttggtacaaatcttctctgattgtcataaccattacatacaatgttcaatttgcactgatttgcgtccattgcggtgaacagttgcaaaatggcgtccttcaagtcgagcaagtccgcaaaagtgtagtagtacagggacagcttcttcagaatgtcccctttcatttcattcacacatgaaaaagcggtctaaaattcgtttaaaaaatttttatgtctaaccaaaatttgaaaaatgcggatttagcggtgctagcatttaaaatttcggaaatttaagcgaaatcaaactcaaactaaattaaaaaatgcatttttttccataaaattgcgtaaaaaatttaaattaattaacacttccctctaacagagcattttttcacctaatggtaaaaaatttaaaatttataaaattcccctagtttttcgaaccgaattccgtttgatgtcaatgatcggaaagcgtttgacaatggtggaaatagccgagtcaagtgatttgtcattcaaaaactgtggccttgacttcgggtctgcacacgccttcttcatgttgtagaagcgggtcaacatgccgactgtacggtctgacaaacaatttgtaaggcattttgcttgctataagccaaactcaccgtttaaaatgaccaatttctccgcaaatttcagctgtgatgggtctgacccgatcttgtaggtcattttttgcttaaaacagtcactcataaaaatagataaaccgtaaataaaaaaataacgaaatcaaaagataggtaggctcattcattatttgaaggatttttggccttggaaacaaatatgcttgccgggcactcaaaaaaagtcgagaatccgcgacccatagcttttttgagatgttttggcgctatatgaaaagtggccgattttgaattttatcaaaaacaaaaggggggagagacccttttgttttgcaaaatttttttatgataacacggcgagtcaattttgggctccaagtacaattaagttggttttttcgtcttagtggtctgtgagttagtcaccaaaaagtgggtctcaggttcaaatcctccttatgttgtgtgttaatttcaatttcttcttttaaagaagaaggcagaattttttttcattaataaa

SEQ ID NO: 8421 - DNA, 538 bp, Heterodera glycines
  unsure (1)..(538): unsure at all n locations
gaataggcccctggtttantggtaaactcaccatcccaaattcccatcctccgttcttcaagtttatccgagtacatataaagccgaccaaatccctttccagtcatattcttcatcccattaattccattcacatttttttgataatttttttttcagttcacttcttcaattttctctgattaccaattgaaaaaatgtctgacaatccgaaggaagcggagaaagaaatggaaaaagcaatgtaacaattaaattttgaatttccatgttaatcattttgctgtttcagcttcatcgctgccgactgttggttggaagtgttcggtttgcttccacgctttcaacttggactgggaattgcgatgattagccaccgttttgaccgccgcgtggatgaacatttcaaaacgcgcaaatggacattgggacgaattgtaattcaacgcaaaattggagagaacggcgcaaaggaaatggaaattgtcaattccaatggaaaatgattgccaattccgcaaaatccgttccgaacaaa

SEQ ID NO: 8422 - DNA, 2539 bp, Heterodera glycines
tgcaggtcactttttcgttacaccaaaattaaaaaaactgaccaggttttcagttttattgtattttgatgctcatttttcttttgtttaggctcgcgaaatttggaacaaattgcttgagggggaacagtcgccctttccttggcttgaggcaattgctctcgaacgttcttacggcgatatttgtggctattttattttgcgtgttattccgcattattctgagctttttagggtacgcacgtcgtctctttttcaaggcacttgacgccgtcacttatcgtcaggatgaaatatttggccgatttgtacaatttgaacgggaggaggggacgagggaacaattggacttggcattggcacgagtgaacgccaaagcgacggaatacaacgcatggatggaacagcagaagtacagcaaaaccaaaccgaaaatgggacgaacgaacgaaatgaatgggcaaaaaacggcgaagaaaaaagaaaaaaaagaaaagggaaatgagacgtcaaaaagggcacagaaaaaggcaaatggacggcaggaagaaaaacgacaaaaggctcagaaggaggaaaaggaaggagaagaggaggaggaacaacgagaaaacatggaagaggagaggggggagacaagtcaaatggacgtcaacgaatgcacaaccgcaacatttgaggcaagtggaaaaaaacgaaaaatcgaagatttaacagtctttgattttgaaatcatatgacaattctgtggcagattcggaaatagtacctccgattttcctgctgaagtaaagttggctagaatgagaccaataaatcgaaaattatgccaattatttttaggcggtataaataattatgaaacgcctaatattttcagacttcttccatcccaatgggccccgttcttccgtgcattggccaaaacaataaaaagcacgaagtgatgaaaaagaaggagaaaaatgacgagaaaatgaccttggaaacgaacaaaatggcgggtgaaaagcgaaaaaggccgcagagtttgtccgagaaaagttttccatacaacgccggactggagaagaacaaattgtttgtgaagaaattggattggtcgtgtacgggcgaggaactcaaagtaactaagaaaaggggaaatggagtaagattatgctttttaagaaatttttcgagaaattcggaactgtagtggacgcgcgaattgtcaccaaatggaacggtcgctccaagggttgtgcttacgtcgattttgccgacgaacaaagcgcctccgccgctttgatgggggcggacggaacggagataaggggcagaaaaatatcagtttatttgagcaatcctccgcccacaaaacggatgaaaatggaagaggcaacattggacgaccacaatttgacaaccgataaaacgaatggagcgacaacctcaaagactgtggacgggaaaactgaacaaaaacaagcgaaacaacagacgaagccctcaaggctgatgccacgggcggcttttctgaccggcgctggacaaaggatcggaaaagcaagccgattgatgttgccgatgagcggcatttcgaagagaagcggaaatatcgcaacggaaggaaagagtgaatcgcccgtcggcgttgtcactgaatcaacgaaagatatgagcttatagaggcagaggcgaacggacaaatgatgaaaatgattaaatatccattcaattgtttcccaacgaagagtaaccaaaagactaaaatcgcaaaattcggtccttttttgacaaaatttgttaacaaattgcactaattcgaaaaactcccggccggaccccacccgccatttgaaagcacaaagactaaagaagctaacacataaaatctcagcgtttaggcttgccaaaaacatttgattaatttagtgattgttgattattttcgtttgcaactttcggtacttgtgtggtttacgggacagatttcatatacatttttcaaatgcctataaatgtattcattttttaatgaaaataggttttaagaggattttggggtcggtgatcacgaatccgggctcagatcagcgctaccgttcactacatgagctgtacagggacaaagaattgataggcttcctgaacaaataataccctcattggcaagatgcccatgaatataccataggtacgatatacatactatatgtatagcgaattacgggcaaccttttgcgtataaagccgatgaagaattctttattgtttaaaataaaaaatgtacattctatgatcagagtataatttttggaattctcttaaaacattttattttaaatttaattataagtttcgggcggagcctagcggcaccgctcttcattagatattataatatcgtttactaaaaatatttagtcaaaataaatgaagatctctggaagatgatggtattcctaaaaagtttgagatattatagccgaaaatgcccctgatatgtgccgccatcgagcaccaacttgacccttctgacaaaacttcttcagag

SEQ ID NO: 8423 - DNA, 2777 bp, Heterodera glycines
ataggcatttgaaaaatgtatgtgaaatctgtcaggtaaatcacacaagtacccaactttctctaaatgttagaattatcttgttttctcatattattacagtattcaaactttgtgctttcgaatgatactctaaaaatagggtttgttcaaacatgaaaaaattgttgttgaaaaaaccgagtattttcaattgattagactcataaaaatacctatctttgtcaagccccttaagtcaatatgagtcgtttgctgtaagacaaaaatacgggccaactttaccgctgtacgaatgatattacaaattaggataattaattgaataaattgggagttcccatcagtaagcactcattcattctgatagcatcatcgagcatttctttccctgaaacaataaagggctatactgtgactagttttgccaatttactttaacgagagcgagaacgacggctgtagctcggagatcggctgcgctcgcgaagcggaggagagcggcttcgggaacggcgaggagtgcgagaacgcgacctgaaaagattgaattggtagaaaattttcttggaggaatggaagaagagtgattttggaagggttttaaactatttcggcatttttccatccaagtttaaggaaaaaccataaaatgtttgggtggatggatgaatttttttgttcctcttgttgcgaaggaagagggtgccaagactgacaatgagaagagatggggtggatggcattatgtgagggttgagattggaagatggagtttgagggagaattgaggagaagggcaacaagatgggatggttgatgaagaaaagctaaatttgacaaattgaagtttataaacttcgaccactcatccgcgcaatgttcaagtttcgaaaaaagcttcaacgaattaatttcattaataccttgaacgataacgacggtcgcgatcacggtcataacgatcacgaccataacggtctgagagaaacaaatttgaagttttcggaagattacggcctttaccgtcataacgtccccctccgcctcgaaaaccgcgtccgccccctcttccgctcccatgagaaagctctacgcgggccttgacgccacaaatcctcctaaacacaattgagcgactgctatttaggaaatcacatacgttccgtcgagtgcacgcacagcatcttcagcgtctcgtgcatcctcaaactcgacaaaagcaaagccaggaggacgacgagcaacccagatttttcgtatgcgtccaaagcgatgaaacgcatcgtccaactataaaattaaaattcaattataaaaacaatatctagcttgtgcgtccaatacgactcaatcggaattacagcctatttttgttttagtttgatatatacagtttcagtcaataaataaactttactagcggattggacgcctaaaagacattggatgcgtaattggaatgagtaaaaacctcttcagaagttgcatcctcaggtaaaccaccaacataaatcttaactgttttttgaaaaattattgtagaaaaacctaaaaccttcgcatcgagatattcatttcttcgagaagacattattcatcaacaaataaaataatacgtagtaaaaatggcaacttgtgcctttctgttatatgtaaaagctatgaaaagatggaaaccgcgaaaataggtttttacgagtcttcctttatctcctctcttacttctctctttcttctccattctctttccctcctctctctctctccctcacttcatttctccctcactccctttctcttaatctcatctctctctctctccctctccccctctctcttaacctcttatctctctctcttcctttctcttttcgcattccactttcagtctctcaatcattttctctcttactcttcatcttttcctttctcaatccattctcttagtctctctttctctctcctctctcccccccccctctcactcattctctctctttatctctctctctctctcttaatctcatctctctcttccctttttctctcctcactgcacctcttaacaacgcccaaaaaaactcggttttcgtgcgtcaaattaattactttctttaattaatctactaggtattttaatttaattttaaatttttagtatacgaaagatggagacacaaaattcgtccaagagctttgatgattctgacgtaaaaatggaggaagttaaagaacagttggatgaaaaggtttgcttggattgaggattgtttcagcaataaataatttagacgaagcctgagttcgacaaattcctaaatgagatcgaaaatgaagtccaaaagcaagtttttcaagaaaaggtaatttgttaatttctttttgctatttcaaattagagaaattaaaggcggcaccgacagcaaaacgtgaaggggccttggtaaagtcggctgcgttaggggaccaccgccacagaatgaccgaaaaagaggaagacgagcaactgctgcaacagagcgttcgaagcgacgacagtccgttcatcttcgagaattccccacctttcatcaaaaacggggaaatgcgcgactaccaagtccgtggactgaattggttgattcaattggaacacaaccgaatcaacggcattttggcggacgaaatggggtaaaatgcttttgcttcctctaattttatgacctttccaatgcgttaagtcttggcaaaacccttcagacgatcgccgttcttggatttttgaagttttacag

SEQ ID NO: 8424 - DNA, 2569 bp, Heterodera glycines
tgaaatagaaaacaatgcttatgccttttcttccaagccaatacgcagtaatcatcgcccgaatctcaatcctctcgaaagtcatcttcactttccgaaaccatctttttgcctttcttagccgctatctggaaaaaattaataaaaatttaggattttcatagttcacctttgaagttgttttattggttttggtttttggaggagctctcgatttcttaataaatttgtttaaaatttaaaataaaaacaacgaatgcctttggtttaggttcatcttccttctctacaggatcatcatcagaaccctctaggtcaatttcgtcatcgtcttcactttccaaaaccttctttttgcctttcttggccgctatctggaaattaatgaataaaaatttaggcttttcatatttcacctttgaagttgttttattgattttggtttttggaggtgctctcgctttcttaataaatttgtttaaaatttaaaataaaaacaacgaatgcctttgcttttggtgcatcctcctcctctacatcatcatctccagaatgctcaaagtcaccttcgtcataatctagccctaaaccttcgtcttctccatcctttccctcttccatctccaattctctaattattgcatccatatctatgcctaaatcatcttcatcgttatcatccatattgccgtcattatcatctatgttgtcgtcgtcatcgcccatagaatcgtcatcttttaccaaattgtcgtcatcttcctcaatttccaattgtaatttctgttcttcgctatacttaattgtatggtcaccgcccttttttatcttctctccaatttttttcatttttggacgaattgatgataattcctatgtcaaaatgggatccaaattatcaaaaacatagattataaggtcaaaaccaaaaaggcataaatgtaaatggatcttaaactataaatttggtctttcctatcaattacaatttatacctccaaaaattcaacttctttgtccagtttgctcactgatatgtcaaattttgtacaggttttctcattcaatacaatttgcgtgtttccgtgcgtaaaagtcttgaatgtagacgaatcttcgcgactgcattttacttttacataataaattgggtctgcctcatggtccaacagtgggtcaatggttaaattgaagtaacttggaaatttgacttgtttatatgttgtgtcttttttaattgcaactccattgtctactacgaactcggtttgccggagctaaattttgtttttcagttatttcataaagcaaattaaaaatcattaccaaatttccccatttttttgatactaaattttcccattttgatttttcttttgacatttcttttgggtagtctacccatttctcgtatataggccatacgttgattttgtattttttgcatagttgtccttttatgtcgggcttcatcttttcgctcccaattggtgtaaaaactttgtaattggaatttatcactacatttgctaaggacttggtgtacgttttgaactcaaaatggttattgtcagcgcaataaacattcactcgataaacaatttccgaattttcatccaatttcggcgatatatccagcttgaaatagctgccaaattcaattcttttcgttgcgtcaacattgccatcaataaacacaattggtggttccagcataattggttttagctagaatttttatgaataattgtttaaaattaaatttattatatcatgcccaagggctccagatagtgtccttcttgatcaaagcaatgccaatttcgaaccctttttcgcaatcattattgccaagtcccaaagtgacaaagtcgctttcgtttcgatgcgtaaaggattcatgtgttatgtgtgttcgtgtggacacttcagttttggacccttcttcagttgcggactgtacagtttggcgacagaaggcttctgactaaaatgtgagaagctaaataaatgaatgcccatttctaattaacgacgacttacgaaatactcatattccccgagactagcaacgcccggtagcacatagagtgttgccatatatttattatcatcgttctcaacagcaaaacaaatgccgaagaacggaaggaaaagaagaagaggtagcattaatggaataatagttcctaaaaaaatttaaatgataattttgttgtaaatctttccttttatgttgcattgctttttcctcttcaattgcgacgcaaaacgcagaaaaaattatgtcagagggttggatttattgcgtggctattgacttttacaattggtagggcatatagaatatgcgaatacgtaagaattggcagagagtgggatttatttcgtggctattgacttttattaatggttattgccaaggcaaaaaaatattttacaaacgtaaaattgagtcaaattggattatataatataatgtttgaaaatataaatcatagtcctcaaagtcaaaaccgctcaaaaaggttggaatcggttttagaagggcccaaaacattgagaaaaa

SEQ ID NO: 8425 - DNA, 1588 bp, Heterodera glycines
  unsure (1)..(1588): unsure at all n locations
aaagtcaaaccgctcaaaaaggtggatcgggtttagaagggccaanaacattgagaaaacgcnaattggggagcgcttgncattttcaggaaanaatcgggtgctgaattgtncactaggtggggcgtgcgttaaggtacttgcggcccggacatntgcgcctcagacaaatgcggcncatttcttaagggccattttcaggcacggaacgccaaattatcagcagttgactaattaattcatttaaccaataaattcttgaacaattcaataataatcgaattttaataatttcaacaaatttttcaattcttctttttaatttcgccaaaattttattgttttagttcaataatgtcgcaataatatttctccatttcttttaggttaggttattaactggtactcccggtgttcagttaggcatgttttcggcctcggttttcggttttggccaaaaaagccgtttttgatttcggttaaacgacagtgcactactatcttaatctttttcttcaagattatcatatcgttgaatcaagcctgttacagctctgtcattctcaacatattcttcaatcggtcttgactcaattctcttgtaagataaattcatagacgtgatcagaagcgccgcgctacgacagaaattgaaagaattttttaatttgcttaacaaacaaaagttatgctgcttcttgcaaagaagacttacaaaggaaggtccccaggtgtccgtgggatttccgaatgaaactttgtgggtgaatagagcacctatgggttcttaagaaaaatggtttcaatttctgccaaataagtacgggtgccgagttatgacgtgccaaactttttttatcccaataaattgaataatcaattgctccactttgtgctgttcggtggcgcaaaggttgtgcgctcgctttcactttttgccgcacaagttcgaatccctcttacgtaaatttatttttttaattttgccattgaataccctttttgaaatgcaattattttcattttttttagtacagaatattaaaattaaaatttatgcattttcacacatgtggtaatcgtgaaaaaatgagcaaaacataagaaaatctcacaataaccgcaatgaagtaaaacagtatcacaatttattttttggaaggtatctttatcttttggcacttcaaacaaaatttgaccagatgacaaactcagattgctagtcgtgatcaaagtaacctgcttttctccacgaaaatctttatattttgacaattttttgaagcaattggatgacatttaaaggatttacagaatttttaacggggaattttttcatacaaatttagaaaatatagtttttttaaaataattttatgcattttcgttcaaaaaatgtatttaaaaaaataaattgttatagtataaatgaaaataattgcatttcaaaaagggtattcaatggcaaaattaaaaaaaaataaatttacgtaagagggattcgaacttgaagggcaaaaaggaaaagcaagcgcacagcctttgcacctcaggacagcacaaagtgtgcaatgattattcaatttat

SEQ ID NO: 8426 - DNA, 1554 bp, Heterodera glycines
ccccccccctttctgctcgcccttgtagcagaggttaggtgagcgagacccaaaaaacacagagagccttttgagtcgggactctcgatttgctctaatctctcagccgaaccgacaaattggcacggtctttacattgaaatgtcggatgttatgaaatcattcatctaaatgaccgttcatgttcttctgccccttcttcttcttctccccctcttccgtgttgtccaattgttcctccgtttttgtctgttcgtgcattgcatttgcccttcccgatgggtcttcattgttttgccattttggcacccatttgagcactgtctgtgccgcggatttgctcgggaagtgctggtggaagattttgcgcatgaaaaatgcctctttcgttgttggagtgttgtgcgggaaaatggacgacgcatttgccatctataaaaaatatatcattttaactgtaatcttttcaaagattaataactgtaatcttttcaaagattaaccaaatcacaaaataggcattaaaaatgctcaaataggcactaaaatggcagaaattttttttattagccctttttaggtggaaaaacacgtaaaaaaaacaaacaaacaacttaattttggttatattccaattgtaaatgaaattagtaaatagtttaagcagaaaactcttttttcgtgcttatctgagcgtatcaagtgcgcaaaaattttaggcatttgcctaaaaaaaggaatccctaattattacctatgtctaaagttttatttcattcagaaataatctaatttaaaaaacaccaaaataatttagcaataaaatgggacggttcaaaaaatcagtcctcctttacctcttcgtcactgatctgtgccgaacaatggccgatcagttcatcaatccatccatagccaactccgtccgaaaattgctccttctgacgccaaaggatctcatcgggcagaaaagggtcttccttaaataataataaaaaaattgaaacattttataaatagttaataaacttaattatccaattaatttttcgatatttttaacaaatattcaaaaataaaattaaatatttaatttaatttataggaaattcaaaaatcgcattttgccaactttgtcctcaaatgccttgcgcaaaatccatttttccatgggccgcaccgttttgcccggctcaattttcgggcatttgtgttgtggtgcaattcccattgccagtgccaggaactgcttgtccaggaatggcacacgaacttccaacgagtttgccattgtcgatttgtccgctcgaaggcaatcggcggtggagaggagacggacccgacgaatggtctcctggagagaaagaaggatgaggcttatgattttggggagtacggtatcggattttcaaaatcgggattagaactgtaaccatcagtcaaatttgccttttgaacccctaaagagcgaaaaattttctggaaaaaaaatttagtaaattttctcgaaaaatatttagattttttttttattaaatataaataaaatttttt

SEQ ID NO: 8427 - DNA, 4906 bp, Heterodera glycines
  unsure (1)..(4906): unsure at all n locations
agggctgctaagtttagtaagtaaatacctaaaatttttgcacacttaatacacggagataggcgcgaaaaacgagtttttagcttggtttggagcttctacacccacttttataatacctatttttacctatttgggggtttttctacctattacctagtacctatttttatacctatttcggcatttttgttacctattttaaggattttcaaaaaattcttaacaaaaatgcaataaaatcaaaaatatacccataagaatcgaccaaaaaaattttcaaaaatgcaccctaagaattggaaaaatttctcaaaaatttatcccaaaatttatttatttttttctattgacaaaatttttaatttaaaatgtcaatattacctaagaaaatattaatatatttaaattttcgtttttttatacctatttgatgcctattttgatatattttttaacctttttaagtacctattctgcgatttttcttacctaaaattagcagccctaacaataactcaaaaatttttaattaaaaataaaatttagtttgagcgatcggctgcaatttgtggctctggcgaaacgtcgccaatctttaagtgattcttttttccatattaaagctgataatttccatatttcaggcaagtgactttccgtgagcaggtaaaactgctaacctagactgatcgaagtcattttgaattcaattaaaaagttaaactgatcgcattaaaattcaaaattttagtatgaaaatcaatgtgtgcacaaaattaaaataaataaaatatatttaatagcaccttaaaataaccttttaaaaaaatttacttttcaaatatttgatttatttgtcaatcggcttatttgttaaggcaaacatcatcacaagttatttggatggttcacaaatttatggaagcactgaagtggacgctttggacttgcgagacttatttaggtcgtaaatttacattttttcaatgaaaaatgatttttatttaatttattcattttagtgatcatggcttactccgctttgacattgtcagcagtgcgcagaagccatatttgccatttgaaagggtaaaattcttccggcaaagtttccccgaaaaattttgcattttatgcaggactcagcaatggactgtcgtcgaaatttctccgttgaaaacccaatacggtgctttttgtcgggtgattttcgtgccaatgaacaggcgagaaaaaaacattcataatttaataaaacataatatttttggcatgtttttttggattctttgctttataatgttcattagaatccggaaatttcaattttgaatagagtagagcgggaccgggacctgttacggaaaaaacgggacaacttgtacctaagttccggttttgaccgggactagtccaggttttttcctgggtttcccagccagaaattttcgattttgtcccggttttgcccaaaattcccggtcccgctctactctaattttgagggatgaaaaattctttaaaaaaaaaactaaatgcctttagtctattatagttatttttgtcagaatgaattaaataataaaaaatctgaatcctttgaaagcggatccagtggattcccgcacagaaattaaaattttttcacatacgtacttcttcttataatttttgcaaattttcacaaatttgtaaattttgttagctcggtctgacagcgatgcacacgatttggttgcgtgaacacaatcgaattgcgacaaaattattggagcttaatccggactgggatggagaaaggatttatcaggaagtaagtaaaacaattaaaaaaaaacaaattaagatttttaaattttatttattaaaggctcgcaaaattgtgggcgcaatgttacaggtgaaaatggtgactgaacatttgcgcccctacatttgcgccccgcacatttgcgcccctacatttgcgccccgcacatttgcgcccctacatttgcgcccctacatttgcgccccacacatttgcgcccctacatttgcgccccgcacatttgcgccccaattatgaacaaaaaaaaatatttataaaattgcctttcccaagggctaacgggagattaatatgattgtttgtttattcaatccaattatcaattcctttcgttgtcagacgaaatgaaattgcgtggagatgtcgtagccaatgctgttcattgcgatcatttggatcttgctcatcaaaacggacaaccaagtctcgaatagcacggtcgttttcaagatatttttttcgaacgaggtacttcagatacaggtctagtttgatcaagttcatggggtctcatccggtttcgttggtactcatcttcatctttgattcgactaataaacctttaattgttttctgttttggtaatttaatgtttaaatacgttgccaaaggtggattaggagccgaaaatcgcttgttgaaactggcatgaaagccttccaggccattatttgtgcgccctaaatcaccaaggaccgaatcatgcatattccacgtttctggcacaaataaagcaggtcgtcgatttccatttccatcaacacggaagagatatgtactataaaaaacatcagaattatttaaaaacatgaccataacctacgatgcaaagtactcaaaaattggatgcgcttgtataggcgcatgatttctgagaatttgataaccttcttccacataaattaaaggtagaaacgaaatcgctgacaatgatctgacatactttctaaaatcgatatctactaagaattgtggtgctagtccttccctctgcactcttctgttgactgattgggccaagtgaaacagacaatgtctgatcattgtgttcggccaaacatcaagaaatgccgatctcgcagctaaatgatcaaatatttaaaataaaatcgattaaatatcaatataaccaggttcaaaatccagcataaaactgcttggtattacaccttcaacacgctgctgtataacagagaaggctcgacgatatgtttgttgcatccggtttgccattattatatatgcgcatggtatgcttgagtgttgtgcaataatgtttagggtatataattgcatgaaattcgatggccgagctacaaaactttagaaaatggtcacacccctgtcatatatcacttttgaaagtgccgtcgcccgcccaattttggtatgtccgtagccattcaatgcctttgtcacttgcaaagataaaaaaaattggctcctcaatatcgtgctcacgtgagtcccaaatcaaaaattggttccctcttttatccgtcgcgaaggcacccttgaaaaatgagttggaaaatgtcagagacagcgaggatatgagtaagcgtccaagtagggttgcgcgcggtcggttaaccgaaccgaaaccgaaaaccgggggtgggaaaacgggcctaaccgaaaaccgggggtaccggttaataaccggtcgtgcgcaacactacgttcaaggaaaaccattgtttaatttttggcacgatttttggtttttaatggctcgcttctatctctatttccaaaggatttgccgcatttacagcatctcgacccggtatttgacgttgcctttgtatttttattctacttgcgccataagttggcaatcgaacaagttgatcatcagagagtccttctcttgacgatccaattaaattgcgcggggcagcttcaggttgatccatagcagcgtcttttagctgttcctgacgctgccttttctataatttaataaaattaaataggaaatattccaattttaacaacagatttcaccacgttagactctgggtccggcaaatggttatgatttgttcttccaattaattttgtgctgtcgataggtgaatgggccctgcctgggcatgatttcttgacacatctccatacctatttaagataaaatatttaatatatacaaatactgaaaaatagcctgggtttggcctgctgctattattctatcagtacgcatttcatagccttcaaaaacagtcatcgttttgcttttcgttgtcctcttatcgggttctaatcggtctgaaaattgatttcgattttttgtttgcttaaactacaaaacttgccttgttgtggttgaacatgacataattgaagcaaaattaaaaaaaaactttgaaatacattctataatatttataagtgggttggtaaaaaatattcaaataaaatcgtaaaaattctacataaaaacggtgtttttcttttcatttcccgctattttcctctttttgccagccgtccgcctctcttgttattgccagccgtccgcctctcttgttattgccagccgtccgcctctcttgttattgccagccgtccgcctctcttgttattgccagccgcccatttctcttgttattgccgtccgcccatttctcttgttattgccgtccgcccgcactttataactatttcttttatgaaacgtgaaaatattattgaactctaaatgaaaactttatttctattttctctgttatttttctcttcatatgaaaacccaattcgcaaacaacgagctgttcgcaatgaacgggcaatagctgggttagcacaattggcagcatcacttgcggccgtgaaagcatttattgccgcaaatgcagctttaacggcttctacagccgtagctttggcagcacttggaaccgatatctaccttgctattgagctcgtgagatgtaagtttatgataattgaaaaggcggttgtgactctaataactcatgttaagncctctgatcactatgaggaattgctcaatgacttcttcccattgacatatgcttaggacaattatagattcactgtctc

SEQ ID NO: 8428 - DNA, 955 bp, Heterodera glycines
tccacctccgaactgctggtgctgttgttgcagcaaatgttgttgttgttcaccgcccgtgaactgttggtgaccaaactcagtagcgccacccatttcctgctgctgttgctgaccaccaccacacattttttccatgttctcagcccaaaacgttgagtttggcagttgctgctgctgttgtgttgctgatatgtccagaaaaatgtgctcctgttgttgttgttgttgactgatgctgttgctgcagttgttaaatgccgttgctgatgaagatgatggtgacgatgctgctgctactgcttggtagtgctgtagcagctgctgctgatgtcgttgttgaacggccaatgccgacgtgcacagtgccgggtccccgccaccggcgaacaccagcggggactgcgaggaggacgcggcggagggcggagtcggattatttgttgccgccggactgcgctggtgttggtgtgttgcagcggcaacagtcacagcaatttgctcagctgcagcggtagtcgtcggtaccgagacggttggcagcagccaaagtcgctgctgctgttgctgctggaggtggtggtagtgattggatggcgagtgttccgcagctgtagccgaaattttgaactgtgaatgcggcacaacacgcgacggcgctgtgctcagaatggggaaatgaagagaagttcaagcagtacacaccaaataaataaacagaactgaggcagtttgatgaacgtgtcgaggtcggcggagaggtgttgctggcgtcgttcaaatgtgtgaaaataggtaaaataattatttttgttgctgttgttgtccctgaggctttcgggagtttaaccgggattttgggagaaagcaatgttttgtgccaaaaaaggacttgaagctaaatttgagcgggaatataattaggcacatatttataaattaatgtatttgaaca

SEQ ID NO: 8429 - DNA, 1183 bp, Heterodera glycines
aattcggaccaaaaaaaaaaagattttaatttattttcaaggaaaaagaatacaaaagaaaattcacgccattttttggaaatttcgcaactattttaccatattgcgcccttatttcggcattttttgcccccatttaggcccctacttggaatttttcgcctctgaaaatccgctccctacttatcatctctaatacatattcacaatgttctccatttttttttaaattaagcaattatgtaacgcgaaaagccaggcaatttttggaaaattgaaaagtatgtaaaatctctcaaaataccgccgccaatccccgcgacagaacgaaagtgaaaatgtttcgtaaaggaatttggaaaaaatacatatgggataaagtaataaaaaaaaaattttttctcgaagaggtggttttcgcgctcaattacgtaaaatgtgcttggattacgaccggcgacggcgacgacagcaaattcccatcccctggggggagattttgtgaaaaaagaggaggaggaaggggcacgtgtaatgtgtgtaaaatatgtactacttagaaggaattaagggaattaagatggctaatgaggatgacgaccgctgctgctgctgatggcgggcggatgagtgcacgttggcacttttgtgtcatcatatttacaacattggcatatatacaccagggataggccaaattgaaaaataaaaagcgaaatgcgaaaagcgaaacgccaaaaaatgcaaataatgcgaaaggcgaaatgcgaaaagcgaatccttggctcatccctgatatacacataaagatttggaactgttaaaaaatgtacgaaattcatttgaattgcgtaaattgtgagttaggggcgaaaaattcctatttagtggcctaaatagggacgaaaaaatcgcgaaaatggtaatatagaggcgaaaaatccagaatagggattcttgagcgcctttggccccactttcggtcttcggttgagctttttgtttgtgacaacaacaacagaaacgaatgaatgaatgtgaactctgtcgagaagcttttgctggccaatgtggcggcaacaaatgtgctttttctgccggcggtggcacccacggggggccggccacgggggaacggaacatggcacgaaaagggtaaaaaagcgcaagtaaaaaaaaaggg

SEQ ID NO: 8430 - DNA, 3379 bp, Heterodera glycines
ggaaatggggaacccttcggtcggggggggggggggttgggaaacattccaattttgtgacaaaaattatttatttaatttaattgatagtcggttgtctttttttctatttttgatgggtgaaatgggatttgtttccaattttccatgaaaagaaaagtgcaaaatgaaaagcgaaggcctgaggcaacataattagttactaattaagtgtgcgattaattacaattattgcagtttgcaggtgatttgatgttaatggaccaagacataattaattggaagggacttaattaattatcagaaaatgaaataaagaaaaatgccactttttaataaacagaaaggttttgtaaggactgctgattttcatagtttaaatttgagccttggcctaattaattcattaattagagaaatgtttccacgcctcaaggcatatcgttagttatttaaagaaaattactttaaaaaaatctttttttgccatggttctctgatagtcagagggttaattacacactaattagtatgaggaatcattccacccccgaaagcatttggataattcatctttgattatttattttaaaaaggacagttggccttgtcaggtttctctttttttcaaaaaaaagaaaaaagaaattcataaataaattttgtttttaaataaatggccaatttttgcgatgcgatttcatttgcaaaaaagaattggcccaaaattgtcttaattttgcgacataaaattttgtccttttatcgtcggaaaatgagaggagaatatcaataaaaaaagtgataagagacggaacaatgaaagaaaatggagaaaatgagagaagggccaaaagtgcggcggaggaattaattcagaaaaatgaaaaatgaatttataatggcggcggaaaatttgtcaccatcagtcgacgacgaagaccgctttcaaataacacacattaagcaagaagaagcataagcatgtaaaagggcatgtaaaacgtgtgatgagagggggagagacaaatggataaaatgaatggggaggggagcggaagagaaaaaaatggggagagagagaggggaaggaaagaggagagtgggtggaggggaggagtaaaagagacaagtgagaagaggaaggaagaagtgatagaaaaggggatggaaaaaagagcaggaaggaagagagagagaagagagagggaaaagagagttagtgaagaataatgatgatgatgatgatgatgatgattatgaaaagggaagaaggaaaggctgaatgaaaaggaaaaggaagggaaggtaagggaagagagcaaaaagaattaaggaaaagtgaaaaaacaggaagaaagagagtgaaagacaaagacaaaaaggaaatgagtggttaaaatgaaaaagtggagtcaaaaagaaaaaaatatgtaataatatggagcgaccggcattgcgcagaaaatttaatgggaattggagggagggggcggcacgccaaattaatttgtattaatgggggattagtgtgtgcgcgagctttggtgtgtgtgtctcttttcttttctcgagactttcgaggagtgtgaatttgtgccgcgagagagtgcccaccacaccgccataacaatgtctttggcctcgcgcctggcgcttgatgggcgcggaaaggagaattagaaaatgggatcagagatttttgatcagttgcgtaaagtaacataggccactttgatgccatgccaaaaatagaccaaagtggtgatgttggcaaggattttgcagcagggcactgccaataaataccgtaatggcgggggagcggtgccgtaatgataattagccccaggaaaaggggtgggggaagagattttaattatgccatcaaaagctacttttgggtgatgatgaaatatgacacattttttggttataactgttttacttctcaaccaaatccaacgttattggtatcattcgattgcctaagtgttctctattagcctgcaaaaatttggaaaaatttcgttaaggttcaaaaaagttacggtcagaagagttcaaaaaaccaaattttccaacttttttggctcgaactttttttgatcttgacgaaattttttgtaattttgcaggctaatagagcatatgaagagctttcgaatgataccaataatgttggatttgtttggcaaagaaaaaagttataatccaataacatgtgttcgtacgaaaacgacctggccccctttatttggccttctaacaattcaaaaagtgaggcatttcacatgtttttgtcataagtcacaagggtattataaaaaatagcccctgggggcggggtaagagtgccggaaatgggtgagtgagaggtgttggaatgtcatgccatgcgcattcatgtgattggcatgtcatggtttttggccaaagtggacgagatgctgcttggatttgttgaattatatgtgctggggattatcgacctcaatcgaatcataaattaagcgagaggatgacgtgccttaattacctctattttatttatttaggacgagccttcgggggacgaattatcggggatgggtgggtaggtagctaaatttctaaatttgtccattttggcactgccatttttgcccggcagagcacataaaacaggcccgtagccaaggggggaattcccacccctaaatgaaaaattaaaaatgtttcaagaaaaaatgggtatttttttgaaaatttacataaattcctaaaatattccattcatttgtaaaaagggccccatgttttttcattcttttttttgaaatttgaccatcaaatagcaaaaacttgccattttttgcgcaaaaccgataaaaattcctgctttttcatcaaagcgtgaaattttgaaaaataatactggagaaagtttttatggatggcctgaaaagcgaaaaaaggtctttcccctctgaaattaatttctggctacgggcctgaccttaaatctcatacaacttattcaataataattaattgctcattaatatattaatggattttcggaaatttaaaatatatgcatattatagctgttaaatgctattgtaggttatagccaattacaagcaattataaagccaaaatataatattctatgaatgagaaagcaaattgtaagaagagctcgtcattggatttgcttccaaatgatgccaaattagaagaagcattggcaaagggaaaaaaagttttggcgatgtgttcggcatcaaaacgggaatgcaaaacaccacaccacaaaaatggggggggggaaatgaaattgaataaaataaatcaaaaataaaacatttttaatgcaaattgacaaattaaaaaa

SEQ ID NO: 8431 - DNA, 2921 bp, Heterodera glycines
  unsure (1)..(2921): unsure at all n locations
ctatgggtacgctccactgtgcagagaaaaacctagtgtactatctcgtcgtttctctttttctttattatttctctcacttttgcgtactatctcttcattttaattatgtaaaaaacaatatttacttcgtgacttttaattttttttttctacacgttaaatccacaccaaattttgcataccgatagagaaaaaaattctgcatcgattaatatgtcaagttaatattaaaataggtcaaataggaaagttacataacaaaacataaaatgtatttcttttcctctcattttggcgtactattttcacgtctctaacacatgaaaaacacaaaatttgcaaatgctcacaattttgattttttggttacaaaagcactttagatttttattaccaatagaaaaatgaaatgttttagcattttggttttaataagtggtccaagcgagttatggctgatcaaaataaaaaaaaaaaatacaaaaataggcattttccagtgtaaattttgaattagcgctcaaaaaattactgccaattacgctatttggcgttatgacgacacctggggcgtacccatagtgctagaagtatacagacgaaatccaaaatatctttagggggtgggggtgataattagagcatatacggtaattgttcaaggttgtcaatcgcctttagagagaacagtaatcccaaggtacgtatcaggggtggcattccgaggccttttggaaatcggaattccgaccccaaatttccgactttttatcaaaaatttcggaaatcggaattccgagacccaaaaatttttcggaagtcggaaatcggaattccgaccccaaaaatgtcggaactcggaatttcgtgccatccctgaaataaatcatatttatgtataagaaaatttcaaaaattattaaataattgatgttattattagggatgcgatttttaggcaaatgcctaaaatttttgcgcacttaatacgcacagataagcacgaaaaaagccctttccgcatggtttggggtgtctacgatgacatttataatgcctatttttgcctatttcggggtttttgtgcctaaagtgcctattttagggtttttgaaaaaatccttaacaaaaatgcaataaaaacaaaaaatacacccctaagaaatgacccaaaaaaaatttcagaaaatacaccgctaagaattgtaaaatttttcaaaaaaattttccctaaatttaatatttttttcttaataaaaattttttggtttaatttgttcatattcgaaaaaaactttaaaacatttaataatttcatttacaattgaaatatttaaagttttaacgtgttttgttacctaaaaagcgttataaaaaattttatttgcctatttttgtgcctattcgggcttttttgtgcctatttagtgcctattttgcgatttttttctgcctttttaggtgcctatttcgcgattttttgtgcctaaaaatcgcatccctagttatcaccgtgggaaaatgaatttaatatgttttgagaaattcaatcccacgtcttaattcaaaatcatgcaattgaaactaaaaatattgaatatatttatactcattttcgaattcatttttaggaattatacttgataggttaatctggtgattaacagcagcggaagccttcccatggacagccccaaaatcgaactgttcaaaagtatctatcggagaagatctgtcttccaaattgacaagtgagagaggttcaatgatgttgctaatctcttcagaaactgctcaaaaaatgtggtgaaaggaaattgaataaatttgtatttattttaaactttgttgattgactggtttaaatttggtatgtatttgttagatttggtctgtatttggttttcacaaatttgaattaatatgcatcctgcggtgccgaaaggcgcattcaagagattaaaatttaatgacattatttcaggcccgtatccagaagaaaaaaaaattcggggagggcagcctttttttatttttttgctcttcgggccagattattttcttctccatattatttcaaaaaaatttcagcgcaggggcgaaaaagcagaaattgtagaaatttttttgccgttttgggggtgaaataaaataaaaaatttatttgtaaaggcccttaggcacataatattcactaaattgcccatttttgtgccacctttctctccaacggttggtgtttcagtaattccgcttatctttttccaattcttaaatgaccaatcatcaacctcaaacagttgcgcaatttgttcgtcattcattgtcttagaaagttctgcatatgaatttttgaacctttcagagaaatttttgtctaaattatttttaatgactaaaaaatttttattgttgatcatttaattttttattttcataatatgataatatatgaatgtcatttgataaattttaattgttttttttaaatttgtacatgaatttgctcatatgtaattgtgtaaaattaaataaaattaatataaatttttgcctgttaatggcccaaatttttttaaggaagaaggttcaaattcctccatttcttgctcatgatacacaaattcatttccactctcaaatggtcttccttaaggttttacaaaatttaaaaaaatatttaagaattcctataaatattggcacaaaaacactcatttctatctatttaaatgtgcttggtattaaaaaacgaattctcagttgaacttttcgacatttagtgccacggtaatttaaaaatattttcatccgttataaaaagtgtgtaatttgcgatcttcttgaaaattttggagtctaaaaaataatgttataatattctanaatatttaagctgcatccaatgggagccggat

SEQ ID NO: 8432 - DNA, 2435 bp, Heterodera glycines
  unsure (1)..(2435): unsure at all n locations
taataaanagtagtgaaaaataattctatagaaatacactctcctatatttaattaatcattcggaataaagtaagaagcataaattatttaataaaactaaatttcaacaaaataaataataacaaatgaaactattaaaataaattcataatttacataaaaaatttttcaattaaagcaatacgacctcaattcaatgattcaaaatgctcaaaaactccaacttttattaaattattaaaatacttctactttcaaatcaagactaaattaaggactgggaaggaattaagatttttagaagagaaaaaataaaattatttataataatggctttgaaaaatggaaaattaatgtactcaaataattgaattgaacaattggataagaatttttcaaattttatatataaaaatcttattgggtcttttaatagacaaaaaattttcttattagatagaacataaattgaaagaaaaaatgtaaaaagaaaacaaaaaacttttttttcaagaaagtgaaaaaaatttaaaatattgcttacaaaaaaattctatagattttaaattaagaaatagttaaaatatgaagtagtaaaatgaatcatatacataattttataataattaaatagaataaatcaatgtcttggacaatcatatgtcaccgataaactttttgcaacagactaaaaataaaaatattcattatatcgttaaaatctgaataggaaattaattttatgaaggagacgccctcaattaataataatttatataaaagaaatatataatgaaggaaaaaagaaattggtattaaaatcaaaaaaaatttaaataatatttttacagttgaaatcaaatatgaaaataaatgaattggttaagtaattctcaatgtaaaataagattatataaattacataacttttagtttttaaagagattaaatttataaatatttttattagaaacaataataaagtcaattctacaattaagtaaaaatgctcaaattaaaaaaaatgctgcaataataaattataatgtagcttaaagaagacatgtgtattaaaataaataaaaaaataaaatgttattaaaaatttattccatagaattagttcaattaattattttatattttaaaataaatctttggttttataaattttttaataacatatcttttttgttgtgaatgagtcgttgaccattggatcaaattgtctacgactcggcccacaacaaaaaggaacttttagtttttttctatgaactgagcactcacgcgctattcataatgctaacgatctgcagataaatttctagcgcagataagttccatattcataatgctaaggattaaaatccgtattcataatgttgctctcttcacaaaaaaatccgtatcttcagctgcagatacccttggtattcataatgctaaggatagggtagcggctgcctagctgcagctaaaattccctatcctcatcgaggtgaggatagttgcgatggaaatgtcaattaaaatcacaaaaaattataaattgaaaaattgtactaaataatacctctaaaaatttgttggtttaaattttatgatgattgaacaaaaattcaaagttcgaaattttcgacctttatagttcggggttaggggttggtttaaataaatgacagattcaagacagcgaccccgaaaaccctcaagaataagtttttacagacttttatgacaaaaatttttttaaccaaatttgacttggaaaatttctctttaaagatgtgtgacgagagagaagctgcggataggttatctgcagataaaaaatcgtcagctacagataattagcactagccttatgaatacggattttatctgcagttacactatccgcatatccttagctgcagataactatccttagcattatgaataccagcatcagtcaaaaacgaatagcagaatttgtatccacccgacgactgatggggatattggctcgaccttgttgaataaaagaccgcactaattattgatcatattttcccgttctctccctctcttattgtctctcctcccgccctttgaccagtccataaatatgtctccctttctcacactccgggcattgtcccattcatttctccatttcatttattgtattcctgctgtccttctccacatttatttgttaataagttatttattatttatttgacaacatttggatttggttaaaaaccaaaaattttatttttgtagtaaatatacaataatttggcgcagtcacaaacaatgggcctgctgtacatcttcgggtgagaaaaaggcaccaaatcttgtattcagaagtaaaagctgaaaagacaaaacaaattcatcgaaagagccgggattggctgtgaattgttctaaagcctttag

SEQ ID NO: 8433 - DNA, 1419 bp, Heterodera glycines
  unsure (1)..(1419): unsure at all n locations
agaaaatcatgggggaaaatatcagatttagcttacattgttttccacagcacatctaaccaaatccgagtacttggctgctaaactctgaatttaaaaataaaagagaaattcggagatgaaaaccttaataaaaggtttgcagcttaaatttatgtcccaaagttcatcatcatttccatttaagtgagaaattgtagcaaaaataaaaaagaaaattaatgaaaacatttgacaagctaaaaaaacatacatacatataacaggggtggagcgcaaccgcgaagcgcggcattttttggataaatttttaaaagaaaattattaatgaagcgattgttttattataatttctgcaaatccaaattttaaagcactgggaggaaaaaaaattttggcccgaagagcaaaaaaaaaaaaattgcccctcccgaattcttttctggttaaggtcctgcccccccccactcatctgttccccaaaaatttttttagaaaaagcgccgagaaaaagcggttgaaaagcaacaaaatatcatagggtttgcatgactggaagctcttcgcaaattcccccccccccttcagtcccgtctcaaatttagtatacatcgggcttttaattaatttttatgtaagaaaagtaaaaaaaaaaactaaaaaattggaaaattttggtaatgcgcgatcgcaattcgcggcaatttttttgcgcgatccgcaccgcggcaaattgaatccgcggatcatgactatataactcggatttttaagcgcgaaaaggcttgattctttcccacatctatttaaatttaaaaacgtcaacaaaaagcgcacgccatgcggatccattcgattatattttggcccaaagtgttgtttttatgactcccaattccttgcagtgattccgacataattggaaaaacaaatcctaagaaatgaaaaatttatccaaaatttatttatttatttcttgacaagaatttgttattttaaaatttttttagctcaatactgatttgacctaatttttttacttttttgaataaattttgtcttttacacccctaaattcggaactttttggcacctattttgggggttttttagaacctaaaacttacctattttggcagtttttagcacctataaatatcatccctagtgacaacgtttttctttgtcagttaaactgcaaatctgtcatcataaagaaagcgattataaattttagataattgtttggccacgatttatgtttccaattatgtcggaatcactggcaggnaattctggaactattccgaggaaaacccacaaaaatggagctgaagaaagtaattacaaatttagttttctttcggaaaatagctcattatttggcacgattatgtttccaatatgtcggatcactgc

SEQ ID NO: 8434 - DNA, 3880 bp, Heterodera glycines
  unsure (1)..(3880): unsure at all n locations
ggtcaggggttcgaaattggtcgaaatgcatgtcatattcgtgctcagcgcatcaaataacccttaaaaatgtgttttttggatttttattcctttttttttgtgggaccaatgatctgcacaattgcccacatgtttctgcgatatgtttaaaattgattggaagcacaaaagtcacaggaaataatttaaaaaaaattaatgtgaggtgaaaaaacgaaaaatctttatgtatcgttggcgtaaaaagggagcattaaaaaagttttttttcaaaaaaaaagttttaaatttttgcaaaccaaaatgttaatcttggatcattcgaaagctcatgaagaggaaaaatttttaaatgcaaagcaattggatggatgtgttgtgactgagatgtaggctcagtcacaacaggatgcattcaaaaaaagataccaggcgttctaaattattaatttttttgagtaattttttaagaacaccttaattgctttcaaaaacccttagaaaatcagtgattgccttccttttttttgtacagtcatgataaaacatttttaaaaccaatcaaaaaattatgtttctttatcagcattgtagcattttttccctctttcttattcaatgacatttatcttaaattagacatttttcaatatttttgtgagtcaataattctgaaaaaagcatcctacataccataacttattaagatcaaaaagccgtacagtaacttgatcagtagatcactcttcatagtgattgggaaatcctaaaattgcggaaagttaatgttaatatttgtacagaaactgggtaattaaataaatgataatgaataatgagcaacgtacatacaaaggaaggaaagaaagaaaaaagaaagtggagggaagaaaaacgaatggccaagaagcgacagagaaattattaattgttgacattagaaaaaattattggggaaatataaaacaatttaataattaataagaaaaagagaggaatctcataatcagtagaaaaactccattattttcacgaattttaatgtttttggcatgccataatgtgaacaatgaatgtcattcaattaattacctattatacgtactatacaattggcaacgggacgggcaatgtatacatatgtacataatataggcatgttgtgtattaactattacccgatttttgattaatacataaaagagatgacagccatgatcaaaaaataatggcccttttatgtctatttttctgttattttgcgatcaaaataagcactaattactttttgcgtctccgctgctgcattttaatgcatttaaaagtcgttttttcgcttttttattattatttggatgatcgtttcgtttttgttttgtatttttggaaatttctccccccttcaaaatgtttacttcgcccacccaccccctcttttttttggtgctgcgtcaatgcttctctttctgcgtcctgcctttcccatcattcccaattcccatttgctatttgtttgtggtacaaaaaagacaaaataaatttcgcttttactgcttgcattgcataactcccatttcccccccccccctctccctttcatttgtctgttgatttttataaattagtgaacactttcctccacacacactgaccttgctgtgctttctcccaatcccccctccttttctgttgtacaatattttcacatagccaaatttatcaaaatgatgtcttattcaaaaaaataaaattctcgttaataaatcttttttacggtagggaagggaggagcagagacgcgggattgttaaacttcttttgttatatatttcatttctctattttttagccgacattaaaaaacggacttgtctatgaaggaacaacaaaaatctgacgaagtgttgtcagaggacgatgaatccaaagaacccactgagttgccggtcacaaccttcgaatttttctctgaactcagcaattgggaacatcacaaatctgagaaagcaccacagcaggaagtggaggaccagcagcaagagcccgttgaacagaagcacaaaattgatgacaaaaaagtggagacgcacgggggcattgagcgcaaggaaggactgtcgtgagtggcgccggtttcggtggtgtccaacaatttctcgacacttttctagtttagtggctccgatgcaaacccatgagggtggaggaccctctgatttcaaatttgttcagttatatttaattaagcataaaccaaagggtccctccccttttgggttttctgaaaaaaacgtcccactaaattagaaaagtgccaatttctcttttcatgcgtaatcttcagctacttcgccgttctggtcaacttcctcaaatccatcattggcgccggtgtcctttcacttccgatggcattcaaagatgccggcatttgggtgtgttcagcaattttcgccatcctttctaatgattcgttcatctttagggtgcgttggttctgctcaacgtcgccgccatcctcaattgttactgtatgatgcaactcgtggagaccactcagttccattacaaacggtgcgtttcgccataatgagaaatttttttaccttttgcgtctcccttcagcctcaacgtcacttacctcagctacggcaacttggcgaaagaagcgtgcaagtacagctttccgtggatgcgaaagtttaaacttatggccaagtcagtcccatccattcgaatccgaattcacaatttgttttatggccatctcttttttcaggagacttgtcaatgggtccgttcttttgctcgagtttggcttctgcagcacttactatctgttaatctccacaaacttgagagaggtgttcaacttcttgacggtttcggacacatcaatcaaagtttggcttgtgctcatttacgtccctatggtcttcatggtaacttttgcctcattttgtatttgagactgaaatgacacaaaaattaagactntcatccgttccatgcgcattttgtccttcttcagtttggctgggaatgtgctgatgttcatgagtttgttctacatactctatgtgcgtttattcaatttttggaatgcaaatttggtgtaatttttgcctcatcttcaggcattggcctaccgactgctcagtgaggaggaaaagccagaaattcacgcaatcggcagcttttccgggatgttactcgcttcgagcacaatgattttttcctacgaagctcaaactttggtgtgtcgtccattgtttttactgaccatttcgcttttcgtcaggtccttccgctggagaagaaattgaagaaacctcagcaaatgttgggtttgtctggcattctgtctgtcggcatttccatctccacgcttatttacgccagtttgggctttctcggatactacgcctacggttcttgcgtaaagggcgctatcactcagaatttgggagaaactaggtgagtgagtggcaaagaatggctgacaactgtttgagtacgttcggctgttcatctcctttccttgcctttcagaatgagtgccgtggtcaaattggctctctctgtgtccatttgctcttccttccttctgcaaatgtacgtcatcgtcgatggtacggtattccaattggtagaaatggtacggtatttcctccccctcccccaacttttaagtgctttggtcgcgaaccgcccggatgataattgaaggggaaaatttcaagaagacaaatgatgagaaggacagaaagaagaagtggtggcaatttccttccggctgcaaattattcgctgaacttttcttccgcgcttcgatggtcgccgtgtgttgtgagtgctttgcttcattctgcctttt

SEQ ID NO: 8435 - DNA, 5335 bp, Heterodera glycines
attattagcagggaacgtatttatatgtgctaaaaaacgccaaatatgtacatatatatgtgccaaaaaactccccaaaatatttgctaaaactcaaaaaaaaaaaaagccaaaatatgtgccaaaaactggagaaaaactgtaataaaaacgtgaatttctcaaaaaagtctcccttttttattaattcgctagcacaatgctaataaaagcattttaatgctttttggcataaattttttttcttgctctcaaagatttatttattttcggaattatcttcgctaaaattcaaattttgcatcttaaacacagcggcccaattttgggctccaagtagaattatgctggatttttcgtcttagtggtctgtgagttagtcaccaaaaggggggtcccaggcagagctgtgcgaaaatcacaaaaaaactttttcgtatacgaaaacgaaacgaaaacgtgcattcgatacgaaaacgaaacacgaaacgaaaaaaaatattttgaaaaccgaaaacgaaacacgaaacgaaaaaattttgacggacgaaaacgaaacacgaaaacgaaaaaataaccattttcgtacgaaacgaaacgaaaaaaccgaaaattttttgaacttatttcaatcataattaagaaacataaaactttaaaattgtatcctctaactgaaggaatgaagatcctagtaggtggaaaagctaatgtggctctaggacaggggtgtgcccaaacaatttttaaaataaagaacatcaatgacaaaataaggtttagggtcaaaaaagacaatcttgcaaaattggttcgaatcagttaatatataattttttcgataaaaaatgtattaaaatgttatgttttcacatcctattatggattttaacaatttttggggaagaaattagcaactgctgaaaaaaaagattttcaaacgttttttttgcagtgtatttttttttacaagttgatgaatgggaagtgggtccggcggagccgataggcgacgccgggaaaatttttgaaaatttgagtgctattttatagcagattttcaattaaaatcggtaaaaacatgattaaaaaatcggtaaaataaagtgcggtcatgcgggatcgaacattaatgcacagcacaaagcaaacctgctgttttcaccactaaactaaaatacttaaataataaaacttattatttctttccaaaaaagtcattcttaagggtgtaaatattttcgtctttttgtaaaatattgctctgacgaaaacgaaaacgaaacgaaaatccaaaattttaaaaaccgaaaacgaaacacgaaacgaaaaacaaaattttgaaaaccgaaaccgaaaacgaaacgaaaaaactttagcggacgaaaacgaaacacgaaaacgaaactcaaaaagtaccgaaaatttaggacgaaacgaaaacgacacgaaatttcgtccagccctgcttcagactgcttccacatgtccatcatcgaaccatcatttcgaacaattttttttggcacagatattacacgtgcaataatacatatagactttttgttaaaatatttccaaatttccaacattttttttggtttattaaagcataaaaaatcgttgtagaatttagttacaaagaaagagatggataaagacaatttttgttacagtttctttattgtgggctttttggtgtaacgacggataaatgccgacactcgcccaaaatgacaatgtgcaaaaaatgcaaatgcacatattcttttttctaaaacaatctcaaatataattttacttaaaatttctattttttgaaataataaagtgaataaaaattaggttagtttcaatcatcaacaaaaaattataaattgtttattctgtcctccatctccaattttggtcttaatggcaattaattacttttttttattagcatttaatttggaccttcttttggagcatcgcacaaaaggaaaatgattttaggtgctaaaaactgccaaaaatgtagtttttaggttctaaaaaccccccaaaataggtgctaaaaattttgctaaaaactttcaaatttaggggggtgtaaaatcgaaattttttttaaaaagcaacaaaattaggccaaatcataaattagaaaatcataatttttttaaatcaaaattcttgtcaagaaagtaaataaataaatttaagaaatgaatttcgagaaattttcatttcttagggatatatttttaaaaaagataaaaacctaaaaattacattcataattataatttatttttttttttgatttctttacatcagacaaataaataaatgaacttcaatattggctggtccacgaatgtcaaattaaaatatttgtttgaattggcacttaccgcaaacgaaacgaaattagggaatccccaattatttgattttttgtcaaaaacatgatcacaaaatgtcccaatcgaattctccgtcccatttttttgcgagataattcgaaaagttgccgaacgaacgtagcaacgccaaagcgaatcttaatggggtattaattattgctgttaattagtactaattaacagttaatttgcaccttttttcgaagtatcgcatcaaatgaaaatgcccaaccatttctcattattgtcagtgcttccaattttcgtttttattttcgccattattctccatggaagtccatttatgtacacttttttgctgtaccgactgcttccaactttctctagtgcaaattccgacactttttcaatgtcaattaaaagtgtgccttttttccgatcggaaatccgtccattagtcggaaatggcattgggaaaaatccgtcggaaatcccatgacaatttggaagggatttgaactggtaaacggcgatcacttcatcttttgacaaaacaccgaagggaactgtaaatattggttcttatcctttttgtcacccccccccctttaactaaaataaatggataaaaattaaaattattgaaaaaattttaattaataatttgatattagttattttaccaattttgttcgaaaattcttcaattgagaaaagcggaaagcgaattttgaacagtgctgggccgagaacggcacgacgattctttgccgagcattcaattccattttgatggcattttgcatcggcccaacggagtgccgaaaaataaataggaaataatggttaatttaaaaaataaataaattaataataaaatttagagttttaatttatttgtaaaataattacagcgttccaaattgaaatttctccattgatttgcaattcgtcacgcgacaaaatttcgcacaatgttttttggtcaatttgtaaaaattcctccgatttgagcaaagtgtcggcattttcatacaaaaaaaagtctctaaagtcaagagtttttcgatctcacaatcagacagcaacaattaattggtcttaaagtagcttggttccacggtcctcactagggctgggatttttaggcaaaagcctattttttcctgagctccccgtggcctgaaacgcactaaaaacatggttttttgggatgttgttaagctacttttcgagttattagagcctattttctaggtttttatttttagagcctaaaagcctaaaaattttttgaaagaacctatttttgccttttgtccaaaattataataattcaaaaaatacacccctaagaatcgacctaaaaatttcttcaaaaaatacacccctaagaatcgacccaaaaaagcaaaattttaaatttttacaaaatgcaaaaatttacggcattccatatggcaatttcttggcttacaaccaactgatcccggcacagaattttgaacaataatttctggtcaatttgcaaaaatgcctctgatttgaacaaggtgtccgcattccgatcaatgtaagccaaacaacggtcggcaaaatcatgaaatgagggaaaaaattgaactgtaaatttgttagtttatgttatactttttcggtcagaagcgagctttggcaaaagagatgaacacattgcccagcttcgcaataggaatgccaacacacgctttgaccaatggttggggtaaaacagatttatgaggtgaggcacaagtttatcttcgttaacttcctgacaatgactctcctaaaagttacagagcaacatccaattgaaaggagtattaaagaagaatttgctaatccaaatattttttaaacttactttaactataataatattttaataatttttttaggtttattaataatttcatttaatttactcattttttatgaatatttattatttttggatttatttctcaatgtttttaatcaattttttcaatattttgatgacgcaaacaattttatgaatatggaaaatttccattttaggtttaaaactatgaaaattaaactatagaaacatttagaaaatgcttatttgtgaagaataattattaaataaccttttttcactttggcagaattttgtgaattctaaatgattatcacaatgatcatttgagcagagtatttattttacaatcatttttatgcataaaatacaaattataaattcagcctttataagcgcatttgtttatgctgacaatcattcactcaatttccagagatggaaaatacaactgtaggcgacgtgaagccttaattaataaattattttaattaaaataatacatatacggtatttcctaaaataaaccccctgggcttctgctgttttttaattcctctccaaggggctccttttcaggggcttctaatttgggggggggggggtgagtagtattagggtaaaaatctgggcccccccctaggcgagagagatgcgcattcatcataggagagatgagagaattagagaaaaagagtaattgcaaaaccaaagaaaagcgattaaaatgtaaagagaccccggccaagcaaaacccccagcctaatggtattcccgggtacatttcggaccgatgcgcgcgtcgctttttttgcggataccaaaatattgatccaagtgaaagttatcaatttgtgattaatgcacatataattatgaatcgaaaaaagtttaggaaaatgatttggttaaacctccccccccatatctatgagccaaataaaatcacattttagaaaaattaatcgaattatctcttttcttttgaccaagttagtgcggtaaatatgaaattgcgcgaataatgattttgtgttaatatttatatttttctctattttctatcatagaattatagaaaaaatgatagaattttaccctt

SEQ ID NO: 8436 - DNA, 2562 bp, Heterodera glycines
  unsure (1)..(2562): unsure at all n locations
aattaaattcatatgcgatacatgtttttcagtatcataaaaaaggctaaactactaaataaaaatacctatgtaaaattatgctcggacatttgtttataacattntaaataattctcatcaaactatattgagccgaataaacaactacaaaagtaaaacggataaggaaaacaataaaataaaatttaccaatgtcatgtgaaaaatatcgacaaatactcatcatttttgaataaataatgttttaaagaattatataacgaatgtaaatatatcgtgctattatattttaattataatttcaaaattaataaatactaagtaaacaaattttttacctaaaaatccttgttataatttttttattaagaaattaagctatgtcaattcaaaatgatttaaatatgttttcatttatctctaaagttgactaaaaatataatagagccagtgtgcccgttcaaaataatgattaccgtttatgaacatgaaaaataaaatctaaataattaataaaaatttaatacattttaaagtaattatttatatgatgacattaaaaagttcatataattttcagaaatgagtgtttaatgaaaacctgaaaccttatctcgaaataatagaaataatcattatttaaatatattaaaatttataaacaaccgaaaaatcattcaaacatgcatttaaaaataaataaattattttttaattgtatgacgaaattaccctgattattaaaaacaaaaattaaaaaacgatgacttagcaaagtgaagaatattttgaattttaggaaaaggtataacaccacaaaagccacatatgcgcaacatatgaagtgactaagttgaaattctgaggtatttaaagaaaaagacatttgtataaatattaataaaatactactgagaagaattaaaaataataaaaaggaacacaatgaaattattgtacattatttaattcaccgagtgctgaaatttcaaaaaaatatgtgttcgaatatgcaagatcgaatttttgtatttttaaaaaacaaaaaaaaagtttgcatgatataagacttttaatttatagagaatgaataatattttatcttttacaaatataaacgtaaccaagataaaattgcaagaaataaattagtaaaaattagatataaataaatttattgtagaaatgttgagaaataattcaaaatcccgaattcatttgacgcataaaatgaaactatttctcaatgattaaaaacttaaaatctttaattaaatacaaaaaacttactgattattttatttactaaacaacaaattggtatataaaaacattggaaaaatcaagaataaggtatttccaacactttaaaaaaattaatgaataaaaataaatagtttattaataattcaacaaattgtattattgagttaatcttgttatcaaggttttaatggatccatagtttttggaccttttaatttttgataatttttaataaatatttaattcaataagtttaataaagaaaattttgggttttttaaatattttatataaaattttcataaaattaataattatttatacaaattttatatttgtcatttattttttaatttcttactattggcagctcctccaaatatttacacatttaaatttatattttttaaattttatttattaaaaaattattattttcattttattaaattgtgtttctagacccatctgattattttaaggagtctaggtatttaatgttcacaatattattatttataaaacaatttatttttttaagtttgtcctataaattttaacgaggaaattaatttatttaatacaaattaaacaaaattttatagaattaatttaaaaaaacataaagtagaattaaattatttgttaaattttaaaaattaaactaaatttatgaataaatccgcgttcattgtgatgtcatgacaattgacggtcgatgcattcggcaagcttaaccttaaacaaattttcatccttaaataaatgctttgcttcattgaattaaatctcagaagtaattttataattattttctattttatgcttttacaattatattttaattttaaataattttactgataaaaaaatagaattattttgcagctatagttattcataattattgggttaaggctagtaaacaaatatattttgagagattttaaagttatgtttttgctattgtgtagttttgggtttccgggcttgatttaatatttgggagtatattgttatgaatattttatatataaaaatgtcacccccttctccaaactcatttcactagcacttcaagggcgttttttatatcggttatttttcaacgggtcgtcgcgaatctatgcccccttcccacaccatctctcaaataaagagttattagattgacacttaatttgggggtgttttcacgcgtcaaaaagggggctgtaccctatcaccccgaaattttagaggcttttaactaaaaaatccaacaaatttttcaacttatttcttttattttta

SEQ ID NO: 8437 - DNA, 1211 bp, Heterodera glycines
  unsure (1)..(1211): unsure at all n locations
aaagatctaacgaaaaatagtaaaatagctaataaaacatatataaaataaaatcgttaaattaaaaaacattcaaaattacgaaaaatatacttatatatttaaagcaaaaaagcagacaagaaataagtaataaaattataatcgtatatttttaaaaaaacattcaaaattatttaagttgtcttcaactttttttcggtgccgtccaatgccatgcacaggaaattgcgaaattagtcacatgactacgtcaaaaaattcgaaataggcgtgtcgcgtgacaatcgtgcttggcaccataagtcacgctccattttcgcctgctatttaaaccgagaaaattaatgcaaatgttttcacttaatgcaaattttaaaaactttttttctaacccaaacatttccgcaaattctattccataatttttgtggcaaaacgattttttgtcacccccttccccaaactcatttcactagcacttcaagggcgttttttatatcggttatttttcaacggtcgttcgcgaatctatgcccccttccccacccatctctcaaataaagagttattagattgacacttaaattggggtttttcaacgcgtcaaaaaggggctgtaccctatgaccccgaaattttagaggcttttaactaagaaatccaacaaattttcaacttattcatttatttttagtgcctggcgccgtgatgttatgggacaaaacatggttgctacatcagcagatgtaaagatttagccgccggatgagaaattggtgtgcactgaccacccgatgccgggtaatcgtttaaaaatgtttttacagtcgaatttccgcttctgatattttaatgagggccccagcggtctccttgttattcttgttatttgacagaatttttggcatagcttttagacttttattaggctaaatacataattttatagataaccgacagctccctgactttctggatgggcctggtgtgcctccgccttttgcggccggaatggggcctggtgcgcctccgcatatcggagcttgaatggggccgggaatgcaccctcatatcggcattggattgggtcctggcgcacccccgcctttgatggctagagtagggctgggagcgcccccaccttttatggccggacattggccctnggagtgcccccaccattttgtcgccggaannttggacctgca

SEQ ID NO: 8438 - DNA, 1362 bp, Heterodera glycines
  unsure (1)..(1362): unsure at all n locations
ttttactcaaatttggccgcccgccggccaccaccacccgcccgtcccaatggggacagccgcggggggtgaacaaaagaaaaacaaaataaatatgctgggggagggtatatagcgaataaaaaacaaagaaatgagtaaattccggtggttaatgcagcggcccgccctaattttgggacacgcagcggcccgcctcatttgtatttgtaggttgagagcggcggctccccagtgggcaccagggggccgtggaggacagggcggtgggtgaggcagcggaattttccggccactaaagttatgaacattagatacatttacattggtacccatgtaaatgtacattttgtatttaagattataaaaatttaaaaaattggctaaacgtacatgcaaagcagtgcctgcgcaaggccatggcgcttgtacatttcctccgcctttgttgccggcacgaagtcgtagccggcaaccggtggcttaacaaaaaaaaagttttttttttaattttgtgaataattttgaaaagcattttacctccttcttcggtttctccgtggaagtacaatagtcaacgccggagcgcactcgatgggccacatctgccagttcgtcccagcgttgctgcacagcagcggcccggccgcagttgttcaacatgaagtctgtaaggaccatccgcaaatttgggcgaactggaaaaaagtttttaatatttcagtttttcacccttttccccacctatcggtacatttacgggggtacccatgtaaatgtaccgataggtggggaaaagggttaagcggcaaagggtgtagcgcgtacgttctttttcacgtacgtccaccaattctttataccgaaatccttaccaaatttgcgctgggtatgcgatatgcagctgccctggtcactggtggtgaccatgtcggtccagcgactttttgagtcggagtggcgctgcactgtgtggttaagcgtctacaaaaaaatagatgaagcagctgttgctttttctgtcagcaacacgattgaagtgctccatgaacgggccctccagctgtaggaaggcagcggcccattccattgcaaagagaaaaaatatatattacaaaaaaaaattaagaaccccaagcttccaaaatccaacactccgccggcctgtggccgatacccaggcagcacacgcatgccacccgggtaccgccatttggccctgtcgctttgtaagacgggcatttcggaaggcccggtgccgcccttcgttgcagaccttgcacaaattcatgtgcccggtctcccaaatgctggtggcagcggcccaacgccgttgatatgctgctgntgttgacataaaaa

SEQ ID NO: 8439 - DNA, 1785 bp, Heterodera glycines
  unsure (1)..(1785): unsure at all n locations
ttttgtagcgggcatgggggcgccttggggaaaagacaaaaataaacagaatgccagatcaaagtcanaatttaaatgataaaacattaattatcacataaaaaaatttttgtaatatatcatttaattcatntaatattttatataatttcgatagattaagtaattttcatatttttttattaatataaagttaaatttgtttgtctcatatatttattaaaatgattaaaacatatttattctagtattttagctttttgttgaaaaggaatccatcttcggttatgtcattttaaattttttattccaaaaaggaccaatgaatataaataatacatattagttatttttctgttaacttttaaataacaagtgaaaatttatatttattgtaatttattaagttatgtcttctttatgtatttaaaatatttgccaatataattagattttagtaattttcagaatatatttataacttctataaataatttatgttttaataaattgctaataatgaatagtttaaaggtaatttctacgactttcatatcgacgattcttttttaaaattatttcaaaattgttgcgatgcgattaataatattaatatttaaagatttttcaaaatcatcgaataattctattccatccatattgagttactgtctctacaccaaaaagtttattatttatttttaagtagttatttataaaaaaatggttttgtgtctttaagtaatattttctttaaaaactgctgtatttgtattatgattgatctaatttttccaaaatgttgcgcctagatggaattgttcaataaaaaaaatttatttatattagaaatatgccttagtttaatagttcattttatttcattaaatgtaaccttttttataataaatatctgatcaagtgtctttgatatcgtttaaatttttaccacggctccctaaaacaaaagctattctgtctgcaacccgcgttgtgactgatttcatatttgtttatttttgctttaactaatgagcgatatattattatttttaactattattattattatttttaactatttaataatataatatacgtatttaaatgctaatgttattttacgatctaatttctgttttaaatgatctatatatttttgattattttattttaaatagaaaaatatttggtgagtagtatatagcgtcaaaagcgagcgggttccgagcgggtgtttaccgcacaaacccaaacctacgggaggggtgttttcttttgaaggtgccgccggctcacaaacccgtaacctattggactacatctgaagctgccgccaagaaccaaaccctatgggaggggcgcagccctttgaagttgccgccccatcaaaacccaggaggggaggggggtgtgtgccaagccaaacctattgtaatccctgtgaagttgccgcacagaatcgaaacctattggaccactttgaagttgccgcccgctcacatcctgagcctatcggattttctttgaactctgccgctttgtggattttaatttacccaaatccgtgcgggtgttttttttcacccgcgccgcgcagcgccgcgggaaagtcatcaatcatccttcctgtcaccaaaagtgacaggtgaaagaaattcaatttttttcttttgccaatttaatcctaatttctaaaggctaaatccaaactacttaaactttacattattcccaatcctgaaattttttttttgtgatgctttttctgatcctgaaattaaa

SEQ ID NO: 8440 - DNA, 2803 bp, Heterodera glycines
  unsure (1)..(2803): unsure at all n locations
ataaaatatttttgcactatttatctatttgccaacattaaatattttaataaaaatgataaaacaaaaaatgtctgtattattgagatttaaaaacattataaaataaacggattaattaattagattattattattattatttaaatttattaaaataattatcctttgatcagtgtgcagccaagtacggcaaggcccgtgacatttttgtaattaatatgaaaatttgatgggttagccattaaaaaaaattgctttttttcatttttgctgaattcattctcttttgtagtttattccgattaaagttgcctatcagctaataaaagtaacaaaatgccagaatgttgaatttggtcgtttctcggatttgacagaattgcgaacaatttgtttttgctagaaattttttttttaaatttttggaaaaaatttttggtcccattttcaaggtattacggaataaatttttttctgaatttattccatctttttccgatattctccaactttgtgccgcgttgaaattgtgccggcacgtaactatggcacttcccacgatttgtcttccacaaaaagttggcacgaattctcgagcgattgtgccgtgttcaccgtttgtcccgttcagctgcacttttagcagccttttggcattttgtgtgtcgtttcctcaggcaatattttcaattaatttatttagcaaattgcctgtttttgaatattgaacaaactctgtggaacttcagcgacactgtcattgtgaaaacatttcagtgggaaattacgagttggggaccaacagttggagtccgcaaggacattgggttgcccaactaattttgctttgagcgatttgaaattactaatttagaattgaaagcatttacatattaacaacaaatcattccgcttcaggcacattgatattattctgtcaaaagtgtgaaaatggtttttccgagtcgcctccaacaattaaaaaagcattttacatgttggcacttttcttaaagacggtcattttagcagcataccaccaatgcaattgttgccgcaattaagtcaaagatcttatttgtgttttttcttcaattttttgtatttttcttagcaaaaatatgtgcgatatgtttttatatgccaaaacaccaaatcgaagaatttttttttataaaagaaaaaatatttacatatttagtacgtacttttttggaggtttttaatattttgtgtaaatgcatatttttatcatttttcaaaaataaaaaaatttctttgtcctattgatcagcatcaaaatttaggaaagcatgaattcttttaagcgaattgattttaattcatttctctcccactttcattgatgaataacaaaaaaaagaaaaactctccgccacgaccaccgcttaatgtaaaaaacaaaagtgggttcatttatacttaactgctgcacttgaaaaagggcgaagttcgacgtctcgccgatttgggatgtttttatccgtgaaatttagcccatttttacgacaacaattcacttttccgtcactagaagacggaaaataatgttaattgtcgcaaaaatgaaccggtggtatttagtttcactcgacgcagcggcactgccattggagagaaagccgatgaaaaatttggccggtcgagaaacgaaatgaatattattgatctgggaccccgagtatagcatttaaatggacttattccgacctctttgcaattgttgactcattactcttcgtcggactcattataaaaatcgcaacaagaatcgctttggctgtccatcggttgtcggagtgtgcaaccattgggacaacgcgtagccagcagttgtatttggcccatcatcatcagcaagcacatcgggaaacggaccaagtgaactgcttgaattcaggttcagatcagagagaattgttggcaaaatgagtcgggcaatttgtccaaatgatcagcattatgaaaatctaagcggcaaatgcttgacgcgaaaagatgccaaatttctcgggccaaaacatcaatttgttgaccaattaaaattcaaatcggcaacagacgaccgggatggactgagttggtattgggcgaaatgaaatgaatttaattgtccaaaagatcactattgggaaagaacaaatggtgattttttgtcgtaaaatggggctaaattttacagaaaaaaagattctaaatcggatggacatcgattttgaatgataaaggcaatacaaaaacatttgtgttcttgtgcttatgcaaagtttcaaaaaattcgtctggcttcaaacaatgtgaccaaaatgtctcaaaattgatttctgtttatttgtgcctcttttcctatatttccaatcacattccattaatttcattggtcaatttcttcaaaatttgtcgttgtaaattatttttgaattatttaaattttgaataaagaatggtgatctgatcacgatgtaacaattngattggttgtgaaaaatcaatattatcaagtcgaaaataacttttctattaaattatcgttaaaaacaaaaatgtggcgggtaagtctcacgtcaaaaaagcggtgccgtcngtttagcggcccatggcccatctgatctcgtgccgttctccccgctttcctttaatggtgataatggntgaagtgatgtattatccctaattggcgaataatagaataatgatctttattgcgtaaggacaaagaatacatcattgtgatcccccactcgtaacgggaaaaggggaggttggtcgggatccggat

SEQ ID NO: 8441 - DNA, 3506 bp, Heterodera glycines
tggtttaataattttttgattaataaaattgttttcttattattattattatttttttttaaatattaaatattaaccatcatcactattctatggtcggtatttattcgaatcatctttaaattgatctttggtaaacggttaaatgcgccacttgttgatggttctgattgtgaatgatcatttctggcccatccttcattcccgcgccaattgtggtggtatgggcgctgtcgcccgcgtccacggctgttgttgacccatctgccgaccgtcccacgattacggtagcggaactcgtcatgttgtcgccaagtcgacgtatttgtgttggcaaatcggttcgaattcggatgaaattcttccgctttttccatttcttttttggcgattttcgtcagttcatccatttctttggctaattcctttaatcctccaaaagcctttgtcatttgttgttgaatttggtttattttttggcaaatgctgttctcaattttcttcattttctcctcttttgtattttgtgctgtttcctcccaaacacaattggcaaactgcccttgagttgccggtgtttttgctgcgaagcgttttcttcgctccaactcttcttctgtttcttttgcctccaattcgttccggactggaatttgtttcctcattccttcaggttgaatgatctctgactgcaaaatgctcttttccgcacttcttatgcaattctcggccatacgtcggccgttaaatccaagtccgacttttccaatgacgcttaatcgatcttcctttcttatgtccagggttgtaacattctcagttcttggctcaaatatttcggttttttccattgtgactttaattgttttaggaacatgcgcatcgataaccgatacaatattagtccatatttctcccaatcgtactttccgttctccaaaagcaataattccttttaagtcagataataatggtaatcccaaaagtaaaggtccgggacagtgcttgtcaggagaaacaagtaaagttaattcccattcaccagtttttcccgtggtttgatcttctattcttatctttgcatttgtttttcccaaaatttgtatttgtgaatcatttgctgctgttaaatttgaatttctctcactcaattcgctaatttttaatcccgcttttcgggctgttgattcacgacagtatgatacacttgcgcatgagtccaccaatgcggatgttaataaaccattaaaatgtacacgaattgagggaagccttcttggatcatttgtgattactgccactcttcgtggtggcaaatagtccaaaacatatgcatcttcatcaattgagtccaaatccggtgctgttggcacagccacaatttgtgttcttttcctttttagaccaataatgctccgaataatccttgccaaaaatgtacccgctcgaaagcctgctgaaattactgtccaatatttcactacaatatatataactattgcgataagtataaataatgggataataattaatgcatatgaaatgccctttaaataattaaccgcctcttttgcttttttggggatgtccctcatcatttcaagccaacttcccgttttccctaggacaacatccaatttttcagttgcttcatctttgattaatttaatgacatcagttaaatttggtctttgaattaatcgtaaggcggatgatggtaaattgttcgcttttcttctgtattccaacattgtctcttcaattcttatggtttcagactcgaaaagtgctcccgattttaatattaaagggttttgcatatttctatattttggacgaattttttctaaatttttatttaatttatgtatgatttctttttgtgtagcattttggacattttcaaggtcttcaatttttccgcactcaattcttctccccaagatgcttaattccctagtgccggcttgcacaaaaaaggttgtgttttcagcaaaaatgggtgtctgttcgtaacaatcagctccgattttcttgtcccaaatgattttttcgggaataatcggtacacaaaatccgacctctaatgtttgacccttccatcgagcgaccaaatcgtctctatcaaaaatccgtctgactccttcatttgggcttatttgcaaaattgcttttgccaattgaagttgaaaatttgagttttcacaagcttgagtaaatatatggtcatattgacgctttctctcttcatttagccggtataatgcataattaactcgtgtattcatattcttattttcttgtccgcccttttttcgtaatttgcttccttcaactttctttatccaccttgcgtccggagttgttactgttgtccttttcctcctatccacatcataaatttcaaactcttcctcattttcataactcattccattattttcctccaaattttcatcctcaatttccaagctttcgccttggtcggccacaatttcattttccaaactttttgggagattttcgactatttccttctcaattttgatgtttcctgttaattttggttcactaacattcttaacttctttttgggttttgtttgttccttccatttctatttctacttttttaataatctcagtttcagtccgcatttttcccgatgttgtgtttatattttcctcattttttatttcctgcttgagaattgttgtcggttttgcgctctgactttttaaagtgttttgcggcgtaatgtttttgtttaatttttttgggctggaagattttacttccaatttttgaggaatttttttttcttttattaattcagttctatttttttggttagtgtttgtggttgtgtttagtttccctaaggcattaatagttagctttggttttggtgtggttaaagttaatttaatttttggagaagtggtcgtgctgattattttttgtgtaattggaaattgagtcgtgaccaccatgggctttggagtggttttaaactgtttttgagccgattttccttttattcctggagatttgtatatttgttgtgcaggagtcgtttgtacctgaattctatcaatgagaatgtttttctcattagaagcattggctttttgttttgtcggcggcggccttttaattttgggtggtaccgttgtttttaaattggttaaaattctaggaatcatcgttgttttggggctttgggtttgcaaattttcatttgtttgtggtgacgcggtacttaaaacgattgttgtggacactgtaatgttttccagaccaaaactattattaaagttcagatttggctccacttttttagcgtttgaattattttggttattaaggatttgaaaaatttcctgattttttaagaaaacttcttgtttaattggtctattttttctcatgggttcggttttcttttttagttcccttttttcttttttatttatgttatgaattgtgataaaaacatcattcga

SEQ ID NO: 8442 - DNA, 5230 bp, Heterodera glycines
  unsure (1)..(5230): unsure at all n locations
ggcctggcagggtcctggtcgaagggcaagaaatcgccgtcaaattcgtcgaccgccccgagatcgccgtcaaatccgtcgatggccaagaaatcgcctccaaatccgtcgaaggccaagcgctcgccgtcaaagcaatcgccgccaaatccgtcgaaggccaagcgctcgccgtcaaagcaatcgccgccaaatccgtcgaaggccaaacgatcgccgccaaatctttccaaagccaagcggtcgccgtcaaagtaatcgccgccaaatccgtcgaaggccaaacgatcgccgcaaaatctgtagaaggccaagcgatcgcaacgatcactggcaaaatctggtgacgctcanacggtggctggcaaatccgtggacggaggggtattggcggctaaatctggtggctggaagaagcagttcgctaccaagtcggtggcgacagctggaactgggaaaggcgtaaacgaacgtgcaaccgctaaaaaagcagttgcaatgaaagccgtggcgggcggatgcgcggtggccaccaaatgtgtggtcggacgtgcggcggccatcaaaacggtggagggatgaagcaatgatcaatttgatgggataattagctatgagtgctaccaaatttgactggcttaatttgttattgataagaatatttttggggaacattcaatcaaatcattttggtgttttatcattatttaaattggctgttgcattcaattttatcatactattttttaaaatttgattaatgaactcattaagtgcaattaagcaattaaatcaattttttaaatttaatattccaagatatttttcttcgcaaaatttaatttttctaatagaaaaagtaacaaaaaataattatgaatgtatcatttttatacatattttaaatcagcgcattcagttatatattcctttgattcacggatgcttaaaagggaattaaattaatacaatacattttaaaaaagttctaattaattatgtgtaattgattagtcaattacgtttttgatgtgttaatatgctgtgacgatgtgccgctgcaaatgaaaaaacgcatagcacagaatagcaaatttgatcggcctaaatttgttaaatgaacctaatttcaaaaagtttaatggttgttttttgtaattttataaaattcaaaaaatttagatagaaatttattgataagcacaacaaacaatggatcacaacgacagcaaaaatataagtacaaaaatatttgtataagcataaaatgagtgccaaaacaaaaataatataataataaatgtgtaattaaagcacttaaagcacacagcagaaaagaaggttatgtaattattatttttggctctattgcagtctacaggattcacaaaaatttcaaagaatttcgttatcttttaaaaaagttatgatcagaaaattcaaaaaaaaaaaaactttctgagcatttttgaccataagtttttggatcttaaggtaattttttttaaatcttggtaaaccaatagagaactctttgggctatcaaatgataccatgaatgtttaatttggatgattatagaaaaatgcattacatttattttattatcttgtaaactgcgacgaacagagccatttattttttttcgtcagggaccaggggtgtgcgaaatttcgtgtcgttttcgtgtcgtccccttttttcgtcactttttgagtttcgttttcgtccgtaaaaaattttcgtttcgttttcgagttttgaaattttaaattttcgtttcgtgtttcgttttcgtgaaaaataaatattttcgtttcgttttcgaaaattattttttttggttttcgcacacccctgtcagggacagggcttcaatttttaatactaatttttacggttttcgcatttttgaaatgaagtcctgtttttcttattgtcttaattataagaaaattgcaaatttttttttgctccacccaaaatttaaatcattggaaatagaattggtcctttgtattttggttctcgatgaattcggaggtctgaaagtgtgttcgaccttggcctttcaaaaactgatgcagtttcgtcattttcagaatacgaaccacacaaacattctaaattgacaggataattaataaaaaaaagtatcgattttttaaacaatttagactaattaccatcaatttgtggggccttcataggaaggattatcctagactcattagggtcttgtggagagcgataaagagttacctgaacagaaattgaaaaaaatatatgagtatattgtataaaaaaggtcagggatgtgtatttattaggataaaaagttatataagtaaacatttttatcattcattttttgcccacttcccattttcagcaaaaaaattttaattctgaaaagttgtcaaatacatatctgggtttttcggatgaatatgacttttagttttgacaatctcgactctaacccgaattcgaaggaaaaggaaaaaactaaaattttttacaactgcatgggaaagacagctgctgttgaaaaccttctaatgaatttttactaattttctagcgtttaaatcatttatagttacttataaatgaaagcaaaaaaaaagtgggggcaaactacagaaactattaaattttaataaatcatttttttgaaattttaaattttgttggaccataaaaaggctttttgaattgaatttacatccctgacaaagacaccacacacaacaacaacaaacagaacacaaacattgttgtccagcttttcacgaagctgttcattgcactcctcgtccagagtttggtgcacagaaaaaacacgatgaagtgaccatgaaattgaggctgccttaagcaacacaaacactggtggcacaacacttccaattaaaaaacattggcaacaaaaaaaaaagtgacaaaatcggcacaaaaaattgtttattggaaaatatatcgaatttttaaaaaaaatgcaaataaaatagaaaaaagaaataattttaatcattaaaaaaataaaattttcgaatcattaaaaaaaattttttaaagttataaattttttttaatcattagaaaaagttgaatcattaaattttgaaaagtcattctttattttatttttagatttatttttacaagtaagatttgttttataatataattttataagaattttaacccataaatacaaagtttttgaattaaaaaaggaataaataaaactgaccaccgaagaaatgtatcggcgctgtataagctgattgttggcacgatctgtttaatttcaattaaaatatttcaatattaattaaaatattttactaaattcttccaggatgaaaatgttgccgccttaaaatatttcaaaatttttaaaattaatattgtccctccaatttaccgatagtgttacattttttgatgttgcttagttcaataaattcctaaatttaaaatttaaaaaaaattggggtttttaaaattttgtgcctgcgaattcacaaattgcaatgcgatgccatcaatgcgaactttgagcagaccaccttcatttcgttccacgtcatggattggaaattcgccgcccaactctcggccagccacttgcacttttccttcaaattaattaaataattttagctatattgtcaatttaaataatgtaattagggctataaattgtatgcctttgcatattttttctgcgcatatgtgatgaaaaaaggatctcaaaaaaacactatttctacgtaaaaaatttttaatttgttaaagggttttagtgcatataaatgcatattttgccattttgaggagtttagggcttattttggtcattttggcaaatttttgaagaaaaatgtaataaaaacgaaaaattacccatgaggatcgactttttgggaatttaaaaaaatacacctttgaaaatcgagcaaagtttatgaataacaaaatttttttcatttgacgatttctgactaacgtcataaaatatgaaacgacctaacatcatacacttattcaattgtcataaattcaattattattattagtttttttttttttgcctcttgatgctgcccgttccattgctgttttcatactgttgtacaaatgacggcacttaaattttaattatgtttgatacatatacataattatttattttttaatcccagatattcattcaccttttttgtatggaatttatgcatgtaaacttggtcatcatgacgacgccataagcaaagcactcgcgttttctaattaaattttccaatttattaattatatttttatggagacccaaaaaacgtagaaacacaccggtgaatatgtcatgttcacaagcctctcataccaccaccgttcttgcacaacaccattagcatcacgcaaaatcagcgcatcatcacaaaccttttttgaaattaattctatttttgtaagtatcgtacaaaaaaatggttattgatttttgtatctaccgtacaaacttaaaaatttgggactaccagattttctgtaccttattcctcggttttagtttatttttttttattcggttatttatgaatcgtaattacatcccaaccaaattgatgaaaattttcatggaattttgttaggaaattggtaaaaaaaaaattttttttaaataagctacttccaaaaagcacattggcccatcaggggaagagccggtgtgcactgtaaacacttctttctgaatgagccgactgccgagtggtttcaatgggattttagcgccgaaaggctaaaaaaatttaaaaaaaatttaattaaaattcaaaaaaataaattcacaaggttcgaaagttcgtccaacaacagattgatgcgtttggaataaatcagcccaatgtgtgccttgccaagcagacgacgaattttttgttgtataactctgatcggcacatggcaaaggtgcatcttgaaaaatataaataaaattgaaaatttcacaaaatgactataaattcctgcttttttctgcccggcgcggaaaatttaaaaaaaaaataccttgaaaaatataaataaaattgaaaatttcacaaaatgactataaattcctgcttttttctgcccggcgcggaaaatttaaaaaaaatacatgtcataaattatttttcccaatgatcaaaataaggggtcttcgaattcccgcctc

SEQ ID NO: 8443 - DNA, 1385 bp, Heterodera glycines
caaaaatgtaaaattagagtgtctttaaacaatgttatgccaagttttgtggaaaaattcgctaaaatggcggattttacgaaacgcccaaggtggcggattttacaaaacgacctagcaccggttcgacctagcacagctggtataacgcagtccaataaaatattccttacaatagctgtcatattatgcagaaggacagccaaaatgcggtcttcttcaagctccaaccgttttctttcaccatcaccaagctgactgtaacggtcaatcatttcggacggctcctggtccatctggaaaacggggaattttcaaaattccatttcatttcaaattactccaattttgtccctctcctgtgcaaccatgtccagaaaggcggtttcccacaacggcatctgttgccataacacatttgacgaatgatttggcgcttaaaaatgcgcgaaataaatctggcattgtgttaatttgtaaaaattagaaattaatttacatggccctattaaatcatagaacaagaaatttctcggtggaatttgttcatcaacaaaagatgtagaaggcaacattgcttcaagtgagttcaaattcaaatgttgaggcacttggatttttggcgcttcctcaaaaaatttcaatttaatttatttattaaattttaaaaataaaaataataatattttataataatcgcctttttgtttgccaattcatctttaaacagttgttgatccttcactgaaattttgtgaacatttttctgaatttgagcttgatcattttcgcacagcagctcaggcgttgtagaatttggtaaaatttccttaaattcaataaaataattatttttgaataaataaaattttaaaattcacagaagcagcagtcaatgacggctttttatcggttgttggaaggcttggcctttttggcactggtggaggcgcgtccatagtgaatgacaatggtggtggttgtggtggtggcatttctcgtgatggaactcgtggtggtaatggcttaaaatttcgaattaaaatatattaatttaaaaaatgattcgactggtggtggtctagttggaagtggtggtggtggacatgatggtgccggaattgtataaatcggtgccactggaggaggaggctcaatgggcagtggaatttctgctggttgcggtgcgtcatgggttgaatcgtcgtcatattttgaattcttgaaaaaaaaaatagaatttttacctattttttattcgatacgaatcaagtttaagaaaattttgaacaaaaaatggacataaacttaaccagtttcatttattcattatgattctaaaatagattcacttttgctggacttggcatgccattcgttatatg

SEQ ID NO: 8444 - DNA, 5364 bp, Heterodera glycines
  unsure (1)..(5364): unsure at all n locations
gagcgcgtttcatcacatttttgttggcttttttgtcctttttcttttgcccagactgnnaaaaatggtaattaaattgcttgaatctttataaaaaattgaattttttaaaatttttgtcaaattaaaattcatttaattatttcccattttctgcttctcacatcatcgccgcctcgtccgtttggctcggctccaaaatgtgcacttcgaatgggctgcccctcaccacttctttgttgaacctggcaaagtgccaaactcaaaaattgaaatgcttaatcattaaaatttatattaaaaattaattagttattcaaattttacgttatgtgcacagtgtgtgttccggcagtggctgggttgaaagtgaccagaaatttggcggttccgctttcgatttggctgacatgtgatgggattataatgccgtcgtggtcctggcaaaaaaaataaattaatattttagagttaaataaatagaaagtggtgtatttgttaattaataatttttataatcgttaagaattggttgccacaaaaacatattatttttattttttaaagtttttacaacttcaaaataatttcattttttggtggtattgtaaaaatggtttatcaattaattaattatttttaataataaatgtgtaaagtctattcaaatttgttttaaattatcaaatttctaattaatatattggaaatagaattattttttgtgcaaaatattgaaatatttctcaattcctccacctttatggccatctccaagtttccaaatccggccctgccagcgtccacagtaaattccaccgtatcattgacagtcgcttcggtgacaatgtcttccaccacaatttggccagcatcataaacccgaattgggaacggagtttggggatggggctaaacattttaaaaatttattaaatttaatctaaaaattatttccaaaatgccaccatgttgttcacgaacaccaacactttgtgcgttccgacctgaaaatgacacatttgttcagaaaccttttaaattttttgaaataaaaattcgtcatttaaatagtttcttggtataattcggtgtttaaatgttctataacaattttgaaaattaacaaaaaaaaattttttctttggttttaccagtacaaaaacacttctggcggaatttaaaaaatgacctaaaaccaattctttccaaataatgaaatattaaatgtcttaatatggcacatttttattgttccatttttattgttccatttttaaaatttgtgtttaagttccaattgacaaatgcccattttcacctccgttggtttgaagctgatctcccacgttttgctgcccgtcttgcggagtcggtgaacaatctcaacggcttgcggttgtgctgcagttggttctgccacgcgttgttcgcctgcaatttgagcgctggcggcactcgtggcgggaggagttacaagcaaaaatggcaaatttattaattaagtttttaaattaattatttgtttaaattaccactcgcaaaacgtcttctttgcccaacttgagcccgtccagcttcacctccacctctttaccacgacggacgacctgagacaaagagacaaaatattttccaatttttattgcaattaaataattgttcaaattaattgttattataattaaataattattccttttaaatgaaaattatttcgcttttctcaccgaatgtttgctgctcagtttcgattttccccactcaaaaacgccgtccgttttgtctttgccccggaatttcaagctcagccgcggcgttgttgcttttgaagaatgccttgaactaaaaattgaatattataattaattgctatatttttttaaatttttccgctaacctcgaatgtttcataaacattgtaattaatgaaattattatttattattttttaatttctccacttgcctcggtgtttccgactcagcctcgtgatccgttgttgtggctgagcctcgtccttcgactggtgaaggtaacgtttcctgaattttggtgtgattgaggggggaggggagcagttcacgcggtacaaccatttccccaattgagaaagttttcaaaaaaattaatacaataattataaagataaaaagtgaaaaaaaagtatttgaatattaagtcaaatggattgggctttccttttgagacaaacggtgaaaatttattatggtccaataaaaattcaaattttcggcctaaatgggacttatatcccccaaaaccagttatggtacgaaataaattaaaaaccaattacaaattataaatttttctacattggtctcgttagcaccagagccccggtatttgcgcctatgtccaaaagcggattcaaaattgaattttttcaagccttgatagcctaaacagcatttaaattaagaaaacccagttttctagtttattaggaaacttaattcagctgtttgaataattataatttttttcaaaaatttaataactatcaaattatcagacataacaactctctatcacttaaataatgctatttaagctttcatttgtcagggattgaaaatacttaattttgaacccgattttggacaaaggcgcaaatgtcgggacaaccatagggactttttttgagttacacatttaaccaaacccagttacaaatcaaccatttgcagtaagcgctagtgttttggccccattactgtattcggcaaacgcacctttaagtcgtgcgctttgtgcacgccgtgctcctgcaagcggtgtcgcgtgccgggtgtcatcggcggtggcccgccggcatcaacaatggtggacgaaaaagggtccacaatgtgtgttggcattgccgctggacgccgttggtctaccataacggtttctacggtaggctgtggcgatacggtgacagtctcagtgacgacgcccactgtctccaagccgtgctgctggtgctgttgggcacgcaacatttccacagtgcgacgcgctaattgaataacaaattgactaattaaaaattggaaacggaaaaaagggggggaaatggattttttttgaaaagtatggtcatttcttaaaaaaatgtttaaagaagaaagcttttgatatcctttacaataaaaaaagaaattttccaattaaaaaaatctttttttataatttaatatttggcgaaattttaattttaaatggactatttcaataaaaaattattgcataatgttttgtttaatattttcggttttattgttgtgttttttgcttttaattagcacctctttggtcgagtggcgcatacggaacttcgcgcgctttgtgaaactcggcgactgattgtgaagatggcttaattaattatcacattcataaaaaataagatttagcaaaataaattaattcaaaatttaaaaattgcaaataaatatttatttggcgtatttgaaattttgcagaaaatagtaaaagcataaagctatcgaacaattctggaaattctcttaatttggttaataattaaaaaaagttatggtccaaaatatcatccagcgatattttggagtgcaccaatatttgtccacctctttctgttcactggtcgatgggtgttctttgagcaaagtgagttcagctgatctggtcatctcaaattgggccgcctcagagtcagcctcaaaattcgttttttaaaataatttgaatttttaaattaataaatattaaattcatgtcaaaccaacccccggcggtggcggcggttttttcacgtcagtttcagtgccaaaatatttgtgtggtggcgaaacagcagctttaggtgacggtgatggaatacggccaccaaattgctggaattaataacagtatttaaattgctttttaattttttaatttgattgaataaaatttaccgtctctcgtgggggtggcaacggggacatacgacgctccacagtatgtgttgtggttgttgttttgtcatactgtgccacctttatttgtagattttggatgttttgaaagagcatattttccaataattaactgtcactatatgttattttatttgctaattgcttttgataaaaatacaaaagttcctcctaccgtataaccgagtagcccccgcggcggttcactcttctcccgctgtcgcatcgcggactgcagcagtgaggtgctgcgcaagtcgccggcagtcgtcacaggctcagcggacagatcgtggcgacgctgctcgacgggcgacgcgtgctgcgaatgctgataaaattaaaaaacaataacgatatttaatatttaaagcaaaatattagttaattttcgttaaaaatgccataaaagtactaataaataagggtttaatttatgatgaatcaaaaaattattgtgtttcaaattaaaattattttatttgtccattttgaagataacatttttttacgtaccgcgcgcgcaatatacgccggcgatgacggagaaggcgcgtaagaagaggcggtgtccgcgtggggcgacacggacgaatggtaagcggaggacgggccacgctccagcggcacggaggcgccgcgaggggtcggcggagagccatagacagccgctaaatcaaataaattgaaattttttaaaatttaatttttcataaatattatgtttaaatggtaacttattaatgtattaacttataaggataattgaaaaagaaaattataaaaattaatttgcatttgtcatttaataatttcgttattgaaaaatgggacaaaaaatattgatttataatttaaattttttagtcaaaaaagattaaactaaaaagagaggtgagtggtgttttaccttggaaaaaagtcaaacagaaccaaaaaactaatttattttctgttaaaaataataaataaatggaaaatacaactcggaatttagtatgaagagaataaaaaattaggaatcaaattttattattaattaatgtaattaaaaaggaattggttgtcacttgttcccgccggacgtgcatagactggtgccgagactggtttgcccacctgccgttctcgcacatcgacttcgatggggcagcctttgcaaaaaaataaattaattaaaatttttgaaaattaaaaaatatatattatgagaggcaaattgcgttaattttcaaaggaaaaagaaagccgcctctgaccatgcacttgaagcccgttgaaagtgacatcgatcacgtaagtgccagaatgttggggaatgaaagtgaccagacaacggccggcatctgtaaaggaatattttattaaacgcaaaaaantatataatttaatt

SEQ ID NO: 8445 - DNA, 1943 bp, Heterodera glycines
  unsure (1)..(1943): unsure at all n locations
ttcgttattgaaaaatgggacaaaaaatattgatttatctttaaattttttagtcaaaaaagattaaactaaaaagagacgtgagtggtgttttaccttggaaaaaagtcaaacagaaccaaaaaactaatttattttctgttaaaaataataaataaataaacaaatggaaaatacaactcggaatttagtatgaagagaataaaaaattaggaatcaaattttattattaattaatgtaattaaaaaagaattggttgtcacttgttcccgccggacgtgcatagactggtgccgagactggtttgcccacctgccgttctcgcacatcgacttcgatggggcagcctttgcaaaaaaattaattaattaaaatttttgaaaattaaaaaatatatattatgagaggcaaattgcgttaattttcaaaggaaaaagaaagccgcctctgaccatgcacttgaagcccgttgaaagtgacatcgatcacataagtgccggaatgttggggaatgaaagtgaccagacaacggccggcatctgtgacggaatattttattaaacgcaaaaaatataatttaattaaaaattttataaattaaaaaaagtcattaattaataattaattattatattcaagcaacaaaaaaacaggatttgataaaaatgataaatttttcattttaaaataaattgaaatattggccaaattcaccctgcatttgcacgttgttcggcacttggccttggttgaccgaaatttccaactgtcccttgcccgcctcggtcgcgtcaactgcagggataacgtacaattgggacacatagcgcggggaggacaacggagggccgaggccatcgccggaggacattttcaacgaattcagaaaacaaaaacaatttttgcgatttggaggcctagcaaatgaggccttggcactgattattctataaaaaaataaaattggggagggaagaaaaacaaataaaatgtgttgcataaactaaatgctggggggggattaatgaaaatgaaaaatttaatttaaaattttattagaaatgagcgaataaaaaatatattcaaaaacttttatgaaaatgagtggatgtaattcttctgccacaaagagtaaattgagaaggtttttcaatttgtttcttctcatcgatattttcagcggaaagcaaacaaaaaaataagtaataaaaagaacgttgtgattggcccatacaaaactcacaacaaatccattgatattcgctgaatggacggccaatttattgaacagaaaaaaacaacaaaaagaaaaataataaaaaaatgaaatggactaattgaaaatgaaaaataaaatgaataaataaaaattaaaaaataatgacagtgaattgtaaaaaatgcgtgaagagacaaggacaaaactatcatttgatagcgaaaattatgcaaattctccgcgcacgaaaatattaaaaatgtccccggggggaatttgtgctgcaaatattcccccgcccccgccccatatcattttgtcaaattgtcagcagacaataaccaatcattacgcttcgcttcgccaaattccccaacaaattcgtcatgtcatacaaactctgctcggcttctgttgtttaaatacagtagcacaaaccatcgctaatgctatttttggagttttatagtgccataatgcgaaatgtcactagaaagaggaaatggttactttttaaagcttaagaaacttaacagctgactcatctcggcacccactccacaattaatggaaatagaatttaatttatggcattatttattctcggcacaatttgccctttcttggtcctcaatatgtgaatttgtcgcccacttttttaatcagccaattcgaaaagggaccgtgttaatctaaaatattgcatggtctntatttgacctg

SEQ ID NO: 8446 - DNA, 1172 bp, Heterodera glycines
  unsure (1)..(1172): unsure at all n locations
tttacatatttcggggtttttatacatatttacatatttcgggattttcttacatatttgtacagattttggattttttttatatatattttcattttttttacatattttgagtattttttacggaaatttttggaaatcctcaaaaaaaaaatccaaaatttcggtaaatatttttgtacatatattttcatttttttacatattttgaagatttataaagaaaaaataagttgaaaatgttgcctaaaaataccaaaaaaaaagtaatttttatgtcatttgtggctatttcatattttacggggattttctttcccaaaaaataccattaaaaaaaaatttatttacatatttgggtttttttgtacatattttgggatttttcttacatattttgcgaaaaatgatattttttcaaatcacttttctctaattacaaatatggtcattaaatatccatttccaagaaacaattgatttttgccacaaatttttcctttaatttgcatatattttattattaataatcaaacttttataaaaaaaataaaatttaatttttgcatttctttagtcacatttttattgtttttaattaatttatttcttttactttaaaatctgactaacattttttaatttatttctcataaataaatattaaaaaaaaatttcatattacaattttttattttattaatttgcacttatttttattataattaatgaatattaaataacgaaaacaaacaattaatatattgtgttttgccatattaaaaaaaatttctaattaatttgttttctttgaaggttccgccaatgtccacaatggtgaaaagccacgggttaacttgtgacaaaagtcagttgaacttccgcgcaacattttatttcgtcccttattaattgcaagtctcaaaatggcacttggttttaacctgatccatatttatatgaaataaaattaacaaccttaactaattaacatttaattttacaatttaaaattttatcagggttccaaattgtctcccagactcgtgcactctgccagtggccatgttttaacgtcatgtgattcgtctttttcacaactcagttgaaagaaaattagattgttattggcactaaagtttttcggactgaccnntgcaggcnnatgcaag

SEQ ID NO: 8447 - DNA, 1350 bp, Heterodera glycines
aatcgcatcattcgtcatgtcgaaatccaggaggaacaagaacgttcccgtttcggacaaaaggcactgacattggaggaagagatgtcgggcgatgacgaggactttgttgtgatggtttgtctgtttttatgttgcaattcaaaaatataaatacattctagaacacttgccaatcggtgtttgaccaagtcaatcagccgcaacaaatggtggtgcatcaccatcactacgagaagaagaagaagaagggtagcaaaaagaagcgcagttcgtccacctcctcttcatcttcctcttcttccgaggaatcgtccgtttcaaggaggagaaagaaagagaagaagaagagcaaaaaggagaagaagagggaacgaaagcgaaaacactcggacgaattggcggagagttcggcagacgaaggtgagagggattcgggatttacaacaaatagttaaataattgacacgttcaaggacgatcgacgtcaaaaaaacagcccattgtttactccgaattcgaccacaagcgaaacccatggaaattattgcgcaaaaacgagtgggtccacaaaccgatgcacatggtcgtggacacgttcggtgacccggagaatgcgaaatatgacaactcgcaccggtttgtatttgccatttctatttgtgttaactaaaaaaagtacaaaaatttaattctattgctaaatttgttgaaattctttttccattatagttttacatttgttccccttctcagtggcgatgtgcccgactatcgcgcgcccaattcggaggacagtcccttctggcgagttttttccgaactctacaaagggctgctcagtaaccccgagagcggtgcggtgggaaaagaacagcgcgcgttttccgcccgtgtcatgaagcagtggggcaaatgtgcgcccgagcgcgttttccgcaatcgcgccaacgacaaattcgaaaattatgtgaaaatttcgcatgctccgtgtccaccggatgaagaaggggtaaagaacagaaatgggaaaagcgtttttcaacttgcgattttatccccatttttaggcagtctctttgggtgttataaaacatgagatggacccgcagatgctcaacaccattaacattgaagactttgagcacattatgcgcagtcaaaatgcatcgtatgaagaagcgctcgagtcggacgtgcaaacacggtacagcattctacaggcaatggttcttcgagagccggacaatgttgacgcgtggctcaagttcgtggacattcaggtaaaactgtaaattgggaaaatgaatccaatttattggattttagcgtgaaatgcaagccaaaaat

SEQ ID NO: 8448 - DNA, 4240 bp, Heterodera glycines
gtcaattgtataacaatgtggcgggaaaacatcaaaatgcggcagaatgatcgtgcagtcttcgatttgagaaaaatggtaggcgaaatgtctaacaataaaccaatttaaaaaaatgtttctatgtaaggtattgatggactccgctcggacggagtcgcgacttccactgattgaccattgcatcaaaaaacttgtcgaaattaaaaatggaacaatcaaaaggtgacgtttttcctcctaattgtattgtgatttttcatcatttgctcttttccttcagtcacgcgatgatggaagggactgaacaggtgacgcatttttgtttgaatttatttgagtgtttaaattctgtaacagtttcttgtcgacctgttggtgcaacggtgccgcctccaagtggtcgctggacacgtcgcaaaagctgtggctgtgctgcaggtccgattgacactcaccatacgcttaaattaaaatctagatgtcatattgccaccttattttccaggccttggccgaattccacttcttccgtcccgaggtgtacaaaaacttcaggccggacaccaaacctcacgtgatgcaacaagaattgaagaagggcttcaaaactttttggactagtggactgcctcgaatcggagagccgagcgccaatgggtttttatatcgttaaaagtagcgaaaacccaccaaagttctgtccttaagatggcttcgctttgagagaagtgacgtggactcgcaacatccgaaacatgacgaggcggaagtgttggagcagaaatggagttgcatgcacgaggaggagaaggctttgatggccaagtacaagggccttggcttgtcgtctgtggaaatacgccgtcgcttggagaagtttcgggcaaaagttcgttatcctcagatcatttgcattggcaatggtctcaaatcaaacatgcattaatggtaataaattattcagtggttttggttcccggtgcacttcaaacatgacgacgagaaactttatgaggtgaaattcgttgaactaatttaaaattacgtaaatattgcctaacccaactttcagcacaaagcacgcattgtcagttttgaggagttggagccgttacttttctcattcaatgacaccaactgtgtgaaggatctgatcttcaaactgttgcacatatttggcgttccaattccggatatagtgggtttttttattattcgacagaacattacctaattaatcgtttttcgttcattaaaccgtttgcttttttagtttattgaaacccaagagaatattcttcggcagttttcccgttcttatttccactccaactcaccaatttcgttggatttaaatgggtttagcaaatttattgactgttttgtcactcaaattgcggaatccccaatgatggattcgcctcgcatttacacggcattgatcacatcgtacgcagcaaaatatttcctttttttgttattcccttttttaagaatttcgaattctccgctttccactcaaaagaaatacaacacattgaggcagctcgtcaggggcaaaattcagactttaaaacggcatggaaaggaaacaaaattgagcagagaagtgcaattgtcgctttacctcaccgcctttgaagaggtttttaaatcaatttactgacaaattttcaatttcatgtcgaatattttgatataaattgtttcgtttagatgatcaaaattaaacaagagcacaatgacgagtgtactgacgcaactgatgagtcaaatccgccaattactgagtccgaggagtgcaaaatgtgtttggcggtgttgcgcatgaatttggacgccaaagaccgttccctttgggagattggggagacgggcgacgtggacaaacgcaaggaaaaattggtaagaaaaatcgaaaagaataaagctataaaacccccactcattgtcagttcttcatgcgttttgctgtgtttttggttcgtcaattgcctttttcgacagatccggacgaaagaaagaaggagaaccgagcagtcatagctaggaatggaacaataattgggtatttggccaccaaacgtgaatttttgctcagtctgttctaccacgggcgtgttttgcaggtcacaatcaaattgagtccccttttcaaatgtttttttaggtggcggaaaatgcggagacaaaacaaaaggcatataaaaattttgttgaacgcttatcgcacccggcagcactaattttggacgaccctttgcgttggatcggtgacgaaaatgaattggtgaaactgtgcaaaaaaaaaaagaatttctgttccattttcaggtgttcgaactttgtgcctactacaactatgaatttcccattagtccattagttcgtattagctcttttgtgcgcgttgacagccccttttacacgacgaaactcgccgaattattgaaggaaaggccgtgtgtgcaggagacgcgcattgccattctccaggttctttcattcccatggacaatgtgctcataaccttacttataattaaacgtatatttttttactaatatttaaacgtttgcgttggtttcattattggcttttttccttttcagcacattgtggccacaagtgcattctttacaccgggcgaattgcgcgaacagctcagccaattggtgcagcgttttccgcacaacatcccaattttgcaagcacttctgcgtgttggcagcgattttcacaggcgccgctttttggcacaacatcctggtacaggtgagtgataagagttggacctcaatttgggaaaagcattagcaatggtttggcttaatcagatgatcgttctcgtctgatccgcacctgtggtcgtattttcgccgctcatcatcactacttggccgagcacaaacgatattatgagcagaaattcgacaaccaagcctttcgaactttgctctaccaatatgtgcacctcttacgcaaggctgccgaggaaaattggtcctttttagtgatttgaatatttactttatacaaattaattggaaaagttcaaaattctagtggtagtgcgcttcccgacgactatatttgggttttcttgatgcaacacatcacatcggagaggacaatgttaccaaggcgcgttattgacgaggttctgcagccccacagcttcttttgcgtattaattttcttcttcaggtgtttacaattggccaaggtcgttgcccctggagtaagcagtttctcatggagtcgttgcgcggctgttgcgaccgcaccgacccatcggtgacaatggtaaacgccacaatgaaaacgcatggcatcagtgtgtactgcacggacccggaagtccaactgctgcttgagaagtacagcaataacaacacttttcgccttccaagcaatgatttccacttttctgttttagcgtgtgattttggccttcgtacgaacgacgcattcattgcctgggggtgaacaaaaacagatggcacaatctttttcataggtgatatgtggatggatgaacacacagatttcttgcgattctatcaatatgttaatataatactagaaataccatgttttctttccgtttatataaatttcttacttaaaagggaattagtaaatttgtttcatttaataattgttaaattaatgctgtaaaagtgtcttcaggcgtcttaaaataggaatgggatccgaatttttttaaaatcttggtcggaagtctgatcagccctataagtatgatgccttttaccgtttttgcaattagaaaactgggttttgcggtaaagggcaagtgtttaacacatcccctacggggacaactgtttctttcttctcgccgcttcgattgattcggttgtccccgtggcgcctttcgatgggttcgatcggcggaagttaaagcatttcaaattttggttcggatggccaaaagtcatcgcatcgcattaaaactaataacagatggaagtgaaagtccagcagctcttatacaaatcccgagtgggtgggggggggctggacataaaaaatggaatagtgaccgaaaatcgctgaaaaatattcatttggatgatttggccgggacactttgtccgtccctccaatttcgaccctttgtccgtccctccaatttcgaccctttgtccgtccctccaatttcgacactttgtccgttccttcaatttcgaccctttgtccgtccctccaa

SEQ ID NO: 8449 - DNA, 4649 bp, Heterodera glycines
tggaatactgtatttgttttttttaaacatactgtatcactgacgctttttattttaggtataccagacggttggaataccgtatttggtttttttaaacatactgtatcactgacgctttttattttaggtataccagacggttggaataccgtatttgttttttttaaacatactgtatcactgacgctttttattttaggtataccagacggttggaataccgtatttggtttttttaaacatactgtatcactgacgctttttattttaggtataccagacggttggaataccgtatttggttttttttaaacatactgtatcactgacgctttttattttaggtataccagacggttggaataccgtatttggtttttttaaacatactgcatcactgacgctttttattttaggtataccagacggttggaataccgtatttggtttttttaaacatactgtatcactgacgctttttattttaggtataccagacggttggaataccgtatttggtttttttaaacatactgtatcactgacgctttttattttaggtataccagacggttggaataccgtatttggttttttttaaacatactgtatcactgacgctttttattttaggtataccagacggttggaataccgtatttggtttttttaaacatactgtatcactgacgctttttattttaggtataccagacggttggaataccgtatttggtttttttaaacatactgtatcactgacgctttttattttaggtataccagacggttggaataccgtatttggttttttattaaacatattgtatcactgacgctttttattttaggtataccagacggttggaataccgtatttggtttttttaaacatattgtatcactgactgttttttgcgatggcattgaatttgccatttttagcataaaatttgaaaatttggatgtgagaatggtgtttttggtgctcatatgtttggcgctcagtcggctctgttcaccaaaatgcccataaaaatggggaagtggcgcgaagctaataggtggtgggcattcataattactgcaattatatgttctttatcatttgcatcgaatcggagaaacgctccgccgtcgccggagggcaaaatgagagaattaatggggccgtggaaaaatggcgaacgtttgccttgcccaacaaacaacagcagcagaagggcaaaagtcattttctgttgcatttatggcgccgtctccataataattttttgataattaatagcccaaaaattggaatttgtaaaaaatgattcttttttcattttgccattccattctttaataataattatgttgttgttgttgttgttgttgtatatcttcggtttttaaaaaacattgtaatgaaaaataaaattgctgaaaacaaattgctgatgctttttattgtgcgtaattattggaaaatctttgatgttcaaacaaagacaaggatcagatcagtgatcgaaaaagcattggccttcaagccaagaccagggtcagagcagcggtgaacaatttgaaaagcattgatcaccccggcgggtgaaatgtgataatgaaatgcttttatcactagggttgggaattatatgcacataaaatcgcaaaaaatgcgcataaaaagtgaaaatattcatgtaattttttttacaaattgagggctaaattttccaaaattcttcagattcgttaaatttaggctaaaaaatctcgaaaatagctaaatagggttgaaaaatcacttttgaagaagaaaaaaataccaaataaagctaaaatgttattaatattgtcgagaaaatacccaaaaaaaggtcattaaaaaaatttcggttcatagagatcaaacgggccgctgtaatagaggggccgctttaatagaggatttttttgaaaatgcccaattatgcaaaatatgcatatggtatcatcgtagaagcttcaaaccaagctaataacattttttgtacgtttaaggccttttatataatccataaaaaaaagcatatgcatataatacccaaccctatttatcactgagtttacactatgcaatcatttttaaaaagcggaagactttctgtcaggggccgttctgttaaagggttttaaaaactcctgaaatttattttatcatttaaaatgggtttgcatattccatataatttagttacatttgcaatgacgtttggttcgatgtgtttgagttccttagccgtgccgaactcggtaatttaatggcacagatcagcgaacggttcgatgcattggtggacaatcactattcgacgattaaatggtcggaacaattattattattttggaatttttcaacttttacatacctattctcaatttttgaggattttttaatgaatttttgaaaatgtacattaaaatcgttttttccaaaaaatgacttagaaaccaatttttttaaatagatataatcttattctaagcctaattaggtcatttttatgacagtgcttatccgtgcttttctaaaaattttcgtcaaaaaaataatatacaaaaaaacagaacccccggggctcgaactcagtaggtacggtgtttggggatttttgtacatattttttattcgagattttcttattttgagattttttagatatattttacatccctaagaataataattattaaaaacaattcatttaatgcttaaggatgccccctaatttgatattcacttctctgcattttaaacgcgcaaaggacggcaccggtgccgtactcgaaacaagcaaagattgggcgcaaaaaatggaagtggagctggtgccaatgaatagcattccatttcagcgcagaatcaaacaattcggcactttggccataacgtaagtttggatgcaaaattttgatcaatttgttaaaattagttagttttttttaacaccggaatgatggcccgttgagcctttctaagttcatttaaaaaaatccgggggctaaaagtgatcaaaatttgctaattttaattaatgttattatgaaaattacggttttgaaaatcaaaaaaaaaatcgctcagttgacacaacccggccttttagtgccttaagaaaatttcgccataaaaaaatttcccgttcagttacattgaccgaactgtcatcgcctttctacacagcattaagcatgtgtttagcctggataactcgcgcagaaattctttgatgggtagggctgggattttatgtgctaaatggccaagaaaaatgtaaaaatatgtactaaaacatgttctattaaaaagtgcaaaaacatttcttaatattagcgacattttctcaattattctcatgccccttaaattttaggcctttgcctaaaaatgcaaatcccgttaaatgttttttaattttaaattttcatgatcttttttgcttatattataattatttaaaaattattttatatatttaaataaaaaacataaaaatcccaggcgtggtgatgggcaatgatggtgaccagtggaaaagctgggatgtgttcatcaaagaaatttgtccgctattgtaagcaagaattaaaatgagcgaaaagttactcttttttttgaatcttgatatttataaaatgatcgaatcatgaaaacattggaatcattcgaaagcctttgatcagttaagtctaaaaatcaaaggataaaggtgattcgaagctatttgcgcgttttacaacggcaagaacagaaaatgatcgctcaaggtcacaagaaatgatcgggcgcagaatttttcaagacatacatggaaaagggggggggggggtcaggggtcaaccgaaatttttgcgaaggggtcacggccatgtaaatcgacgactttttttttgttgctttttaataccgctttttttgcggcgcgctttttccaaaaaattttggggaacatgggggcaggcggtgccgataagtgccgccgggaaaaatttttaaaatgccaaaatttttcgattttttagccaggtgacgattttttgtttttaaaaaacgcttatttttgcggcgcactttttaataaaactttttggggggacaggggggagggtccggcggcgccgggaaaattttttgtaattttaatgctatttgttagcagattttgtctaaaaatgaccaaattttgagatttttggctaattttttaagagaaaataggttttttgtgggttcggcagtgccgatagggcgccgccggggaaaattttttgaaaactttattaagaaaatagccaaatttttaagaaatttctcttttccccttcgctacgacccccccccccccaagagctttcgagtggtactacatttatcggagtcgattattttaaaaattcaccatatatcgaaaagcgctatttgaaggtactctctccaaataagacctttaattggaggggggggggggggccttcagagagcgaattaacgttaagtaagaatggcctccttttttttgtagtaacttaaaattagggattatttcttccatgacatttatttttgacaggtcaatgcccaattgccactttaacttgcgcaaacataacaatagaag

SEQ ID NO: 8450 - DNA, 1841 bp, Heterodera glycines
ttttacatggcgcgatcattacaatagcaggtgcagcagcagcagcatcatttctgttggctttcccgcttttgtgttggactgtgctgagttttgcaagatttcgaccgcccattgtccaatggcttattgctctgttggttatgattagggcgtaaaatttatatacctatctgcataaatacatagtggtgcggaataatatgtagtacgggcattttgaagaaacccggacaaaggcccggatttccgaaatggaccctgcctgaccatgggtggagcgcgaccgcaatccgcaacgcgcgatcgcggttacgacccctggctttttgggactaaatcggggtgtatcggcaccgtagacccaacattttcctaaaaattttcaaaatttgatttaaattacaattatttattaaaatcttttttatcggaccaaaaatttctcaaaaaaatttttgcgacaggcctatcgccggaccacaaaaattcctggattttcttattctttaaaaccttgctaaaaatagcaaaattggctcattttgggataaatatgtgctacttttcggttatgcagccacatctccaaatttaaaaaagagaacgcaacaatattgaagtggcagggagtgcaggcgaaatttaagtcttggcgaaaacatggacagaaaattatcatacgctctaactaactaaatccaggatacggattatgctcagcgccaagccgctataaatttggcactgttcaattggcttcatttgccacgagcggatggccgcccgaaggagtataggtggtgctccgagcggaacgctaacgaaagcatcaaccaattgaaggaggtgggcaattagtaattaattttaccatcgttcacatttcccagaaatttagtcccgtaaatattgggtgaaaagtgccgaaagcctataaatgaaattttgaaattacaatataaaaattgcactttcggggtcgctgagtcagattcatgatcagtgatgatcccgaaaaccactataaacgatttattgtttttgaaaacaaagtctcccctttgtttttccgggacccatcgcaacttcaaaatttgggaactctgaattaaattgaaattggtttcacattcgtgatcagtgatcctgaaaatctatgtgaacgagtgttttcactgtatttaaactgcataaatgccaaaaaattattattattattatttattaagaaatttgtcaacgacacatcgccagctaattattttgtgctcatatcaaagtcacgttatcacgcagcatcattgtcagaggatgaacacatgaacaacaacaatagcaagcagcctgtcctcatgttctccatggaaaatgaaaagaccaacgaatttctgagactttatgcacggagaaaatgtttgacattgattcggaatcaagcatgttgggactggcaaaagcccatgaaagaactccaaggcctaatgcgcaaaaaatttctatttttcatagatgataagcgtatcgatttggattaatgattatagttgcggaatgtttgttttgaacgtgtttttctattaaaccgtgtccagacattagggcctctggcatttgtgccccggacatatgcgtcccaggatttgcgcgtgcaaaacggatttaaattttagctttctcaatcctagaggtcattaacccgattaaactaagtaatagaatgttttgtgtccgatgatttgatcgtcattaaattaaaaaatatataattattaaaacgcataattaatattttggttttcggctctagtgcactttatgagtccaatcgacttttatga

SEQ ID NO: 8451 - DNA, 1712 bp, Heterodera glycines
aaaagaaagcatttgaactcccctgctttatcacaaattcaccccgggatagatccgatataataaaaggtctaatcgttacattattcagctaatggatttatgaggacaatttaaaacaattgatttattaatttgataatcacatgaaaacgctgcaaaaatacacttttaatgaaatatcgctaaattggcatgttgcatgttacaaaagagattttatgcaggttaaacctaacaagcgaaccatagcacatagtctcaagtccacctgttttgatacaaagcactagggatggatagaaatcgctatttctttgctacgaaacctgtaaagatccgtttccatttcaaataacagcctttctatgcaaattctaacggctttgagaatttcagttgctaaaagcctgaatccacggttgcccgactgggtcggaggaagccacgcgatattctgaaaatcggtattcccttcattttctatgatgtttgcgcaacatttcggaattagcttgcctaggagatgcattcctctgtaagttcctgtccatctatatggagagaaaatttgggttccttcctagaccttgtttttgttccggaaatattcaaattttgtgagcgatactgttgataaaacgaaaataaaagaaagcatttgaactcccctgctttatcacaaattcaccccgggatagatcagatataataaaaggtctaatcgttacattattcagctaatggatttatgaggacaatttaaaacaattgatttattaatttgataatcacatgaaaacgctgcaaaaatacacttttaatgaaatatcgctaaattggcatgttgcatgttacaaaagagattttatgcaggttaaacctaacaagcgaaccatagcacatagtctcaagtccacctgttttgatacaaagcactagggatggatagaaatcgctattctttgctacgaaacctgtaaagatccgtttccatttcaaataacagcctttctatgcaaattctaacggctttgagaatttcagttgctaaaagcctgaatccacagttgcccgactggatcggaggaagccacgcgatattctgaaaatcggtattcccttcattttctatgatgtttgcgcaacatttcggaattagcttgcctaggagctgcattcctctgtaagttcctgcccatctatatggacagaaaatttgggttccttcctagaccttgtttttgttccggaaatattcaaattttgtgagcgatactgttgataaaacgaaaataaaagaaagcatttgaactcccctgctttatcacaaattcaccccgggatagatcagatataataaaaggtctaatcgttacattattcagctaatggatttatgaggacaatttaaaacaattgatttattaatttgataatcacatgaaaacgctgcaaaaatacacttttaatgaaatatcgctaaattggcatgttgcatgttacaaaagagattttatgcaggttaaacctaacaagcgaaccatagcacatagtctcaagtccacctgttttgataaaaatcactagggatggatagaaatcgctatttctttgctacgaaacctgtaaagatccgtttccatttcaaataacagcctttctatgcaagatgtaacggctttgagaatttcagttgctaaaagcctgaa

SEQ ID NO: 8452 - DNA, 1132 bp, Heterodera glycines
ctaatggatttatgaggacaatttaaaacaattgatctattaatttgataatcacatgaaaacgctgcaaaaatacacttttattaatgaaatatcgctaaattggcatgttgcatgttacaaaagagattttatgcaggttaaacctaacaagcgaaccatagcacatagtctcaagtccacctgttttgatacaaagcactagggatggatagaaatcgctattctttgctacgaaacctgtaaactccgtttccatttcaaataacagcctttctatgcaaattctaacggctttgagaatttcagttgctaaaagcctgaatccacagttgcccgactggatcggaggaagccacgcgatattctgaaaatcggtattcccttcattttctatgatgtttgcgcaacatttcggaattagcttgcctaggagatgcattcctctgtaagttcctgcccatctatatggagagaaaatttgggttccttcctagaccttgtttttgttccggaaatattcaaattttgtgagcgatagtgttgataaaacgaaaataaaagaaagcatttgaactcccctgctttatcacaaattcaccccgggatagatcggatataataaaaggtctaatcgttacattattcagctaatggatttatgaggacaatttaaaacaattgatttattaatttgataatcacatgaaaacgctgcaaaaatacacttttaatgaaatatcgctaaattggcatgttgcatgttacaaaagagattttatgcaggttaaacctaacaagcgaaccatagcacatagtctcaagtccacctgttttgatacaaagcactagggatggatagaaatcgctattctttgatacgaaacctgtaaagatccgtttccatttcaaataacagcctttctaggcaaattctaacggctttgagaatttcagttgctaaaagcctgaatccacagttgcccgactggatcggaggaagccacgcgatattctgaaaatcggtattcccttcattttctatgagcaacatttcggaattagcttgcctaggagatgcattcctctgtaagatcctgcccatctatatggacagaaaatttgggttcct

SEQ ID NO: 8453 - DNA, 4436 bp, Heterodera glycines
atgctttatgcataatttctgtgtcggttcttgctctttaacaaatatataatttaacatcatcagcatataattttatttttgaaagaatgacaaatttgaaagaatgacaaatttgaaagaatgacaaatttgaaagaatgacaaatttgaaagaatgacaaatttgaaagaatgacaaatttgaaagaatgacaaatttgaaatttaacatcatcagcatataattttattttcactcctgatggcaaagcatcaggaagatcgttaatataaatcaaaaataataaagggcccaggacagagccctgggggacgccagaggtaacttttttacttgaggataaagaatccccaattttaactcgaaaagtcctattactcaaaaagccctttatccacattaaaagtttgccctttataccaattttttccaatttgtataaaagtaaattatggggcactgagtcaaatgctttttgaaaatcaatataaatacagtcaacattttttccatttataattgcctcgtaccaatcttccacaactgttattagttgacttgtcgtagacctatttctaacaaaaccaaattggtattccgaaattttattgttttttaggaggaagttgtaaatattttggctaagaattctttccataaccctgcaaagtgagcaggttatagaaataggcctataattttcaggattaaatttgtccccttttttgaaaagaggaaaaactattgattccttccagatatctggaagagaaccagagtctaatgaaatcctgaataggtcagtaataacagttgctaatgaagaatggcagtttttcaatattttatagctaatattatccggggaggtcccgtttttattcggaagttttttcaaaagtttttgtgtctcgatgatgttaaagtctatatctgatataaagcattgattaacaaaagtattgcccaagtttaggtagcctgggtcaacatcagaattgttaaacgaatttgcaaataagttggcaaataattcacatttttcatcaccatcatgatagcatttgttttcaaagactaaattcggtatttcaaagggattaacatcgtatttttgtaggtatttaaaaatggaatttcttccctttgaaatagcctttttctcaatttgcgagtgaaatttatttgtttgtatttttatgtgtaaactaatgctatcataaagtgctttttttgttgggtcagttttacattgcctatacagtctggctttctctttgatggaggccaataaatgcgttggatatttaggggtcaaatcttttttggtaatttttttcattggaatacactcgtttaaggtttctagcaatgtattattaaaggcgttgtatttttcgttcacactaaaatgctcgttagataaagcgctaattctagaagaaaccataatattaaaaagagaaacattcgacggaaaaaaccgtcgattgtaaaagaagtttgttttttgtagtgtttttggaatagtcaatgtgaaaatttgcgctaaatgatccgatgaaaaaacaccaccttcaatagtacattgctttacaatttgatcatttgccggcaaaactaagtctaagtttccggcgtaaatgatccaatcggcgttgggttcggccttccttcgctctgtgcattctttttgcatcgccctgcgctcctccagttctgccggactgagcgatggtcgaatgttcaggtgttgccacttcccactttgcttgatgtgggcccgttttttgttccattccgccagcagctgcctttggaattttgaggccgggagaatgattttgattaaaattcgccttgaagcatatcgccaggctcacaataaaccattcttttaattggtaaaatttattattaattgatcaattagttaattaattagttacatttgagatgttgtagatcaaatataaacgacaaagaaacaacataaaaaataattgacaaggaaaacacattggcaattatcacatattttccggatgatgttgagatgttacgaaaacttaaaaaggaagtgattaattttctggaaaattaaactattttaaattacaaaacgggaaatgccaatgccacaaaactatcaacgcttatccaaaacaaatttagtgaagaatctaaacatgaaagtggtgcaataaattgcgcataaacacaagtcaacagaggaatccgtaaacaaagaaaaacgaggactaaaaatttaaaaaataataataaaaataaaattatttaattattttaccggtagccaatggagtggccaattcagtgagtgcatcacaaaaagaacagatggccaacagaaagccgaaacttcggtggagtttcctaatttcataattaaaaatgcatttttataatatccaaaagtaaagtcaaaacaaaattaaaattcaaaacaattcctatgcaattttcaaatcttctcttttacttgtgcttgatggtgatgtaaacgatggcactgtttagggcaatgccaaaaagtgacaaaatttgctgaatgattgtcacccaaactggtgtacacgtaaatttggtcggactctccaaattcattaacggacgaagatgaattaacgttattactcatattattagtcgatttatttggaatattatttaatcaaaaaattggcgcaattcaacgcgaattaaatttaaaaaaatgcaaggaaatgaagaatccaatcaaataattaattaaatgatataatattgagacttaattaaggtcaaaaattcttttactgatgagttcagagtataattggcctttttagacgtttcacctgttttttggcacattaaacattagtaattttgttatttaataagcgagaaaagcacacaagaaaaattgatggcaaaagtaaaaattaagcaatagacgttaaatttggggactagacatttggggattttaataaaacaaaaaaaaattttttatttaattttatgcccaaaattaatcaaatttatgtctgctttagccagagttaatttcattgcaagaaaagacaaaataatatttttttcaaattaactctcaaatctttgcaatacagatttatgcgcaatgattttgaaaattgggacgactctaatggtgattaattctttttcataaaaataatataaaagccacattaaatgttattcaataaaattaaaaatgcgcataaaaatatttgtaagcgatttgttttacgatttggtggatatagattttgtatctttttgtgattttagaaaaaaaatttaatatgaaaaggcacaaataaattttgtttaataaaatgagttggtgtgcaaagacaaaacggtcactcagctggacggcgtgctggaggagtacaagaaggtgtgcggacatttcacctgctggacatcttgcctactgacatttcgcctactaagccagacgtttcgcctacaagccaaatcggacgtttcgcctactcacctaaaactgacatttcgcctattaacctaaaatagatagtttgacaacaaattttaccataatattttctagaattgaattatatttagctataaataaggaaaagggaaatttggtactttcccgttttggggccgcacccaaaaatttaaaaaaatcaacaaaagagcgcgcaaattcacattcgcataaattaaccattcgaaaaacgtcgccgcttccccactcgctgtatgcataaattatcgcactatgggccttggttttgggccaaaacattttcacctccacatccataccaaaatgttccttaattttatttccctcatcaaaattacacccaatgaaaattgtgcagcaacatttctaaaagaaaaaggattttgtctgaaattgctgcatttatgccccctcattagtgttacgcgcgccttgtttattttgcgcgcccttttgttgattttttaaaatttttgggtgcttggtttcaagcttctagcttgaactttttggtgccttttttttttttgccttttttgcaattttggtgccttatgccgggcacgtaattttggtgccttttttcaaaaaaacgccaaaaagtcaagaaaaaatgccaaaaaaacacgaaataaatccaaaaaagtcctgaaaaattaagcaaaacgattaattttaacaaaaaacaagaaacatttcgaaaatgggtccactgcgtttcgagctggcgtttcggcgccagcatgtttttccactataacttttttctttgtcaaccaatccaacattattggtatcattcgaaagcctaaactgtttagaagctttttctaagctattgcttcgcgattagacaaagacaaaaaaagttatacatgaaaaatgcgaaaagacgaa

SEQ ID NO: 8454 - DNA, 3180 bp, Heterodera glycines
aagtgccacttccttaaattttaaatgaaaaattatggggggttctaatgtcggatgaactaagtatagaaactttagttaatggaatgaagtacggaccaaaaactggtaaggaatcattgcaataaaattaacaataaaataaaattataaatggaatgtgaaaatttaatatgaatttaaatttagacccaaacttttgtgaaaattttaaaagggcgtatgcagaatattcaaaaacaatgaaagataaccaaattgcggcacaaatttacaaagtctgccagtctaaaattagttattggaaaaagatatgcggaattgagtttaaactaaagaaaaagatgacgaacaattaaaaaagcattgactttcgctatcgtgataaattatttgtaaaaaaagatttgtttttaggggtaattagaatattgcatgctttggtttttgtaaaaaaaatttaaaaaaaatttttcaataaaaaaaatcaaaactcatttcagatataattttatagactccttcaaagtgacaattagagatataaattaattccgatgcctatagatagtatttatccttcaagtggatatttgattatgaattttgaaaatttgtatttttttattaaaaaaccacaaaacatctttttttatacaatccagaaaattttttgaactaaataaaaaaaacctatcgagtctcccttctaacaattttacagcaaacaaacgtaaaattttttaatttaaaataattacaaaatgttaaacggtaatccgaaactgctcggcctgcacactctgccggtttagcagcaacaaattaaaaggaataaattaaaatttaattaatcaattaatcaaaagaaaatgttcttctttatattcgattttgattttttgggtttttgtttgactttccttttcactgcgcaaaaacttctattcattccattgttattctatgtttgtcataaagggaagaatgaaaagatatgtgttgtattcagaaaatcctgtatttatttgtcatttttattgggatttatttattcaattattttgggatgttttttattgttattaattttattgtatggcacttgagaaagaaattggcagaaaaaattgtttttgttacaccaaaaattggaagtatttaagggcatggaactgttgttgtggcacattcgaaacatttttcaacagcaaattccatctcgaaaattcaattaattccattctaaaatggcttcatcatcgattaaattgtaaattttcttttattaattacccaattattaaaaacccctttagggtttcggtttcaatgtttctgctcgtcctttgcattggcatggccattgagcagacccaagcttattatgtacaaaatattttcaaaattccccttctcgttcttaaaactttcattttttcattttctttttaagggctggggtggctacggctatgtctatccttacggattttatggcaaacggcaagccggttttggtccatccgaaaatgctggcacttttggtggcggtggagaaggaaattccaacggaggaggaagaagaggaggaggaccatcatcaccaaacaatttttgagagaaaaaaggaattacaaaaccaaaattgagcttttcccattttgtaattgatgatcaatcggataaaaaaaatggccaaaagaattttctatttattttttgccaattattaataattttatgcatttttgcaatatgaatatttttaaatgaagcttcaaaacaagaagaagaataaatgctcattcttttttcagtgccaaaatcttaaaactattacaaggaattttcatgacctctaaatgtcattttcgactaattcaacaaatggagatttaacactaacagatgaaggtaatgagaaaagatatattttttagaagcgatcaaaaaaatgttgtgaaaatcaacaaaaaaatcaggatttaaatgcaggattttgcgagattaatccctctagatccagtcccgaaaaaattttgaattccaataccacggcgggatccgcaaattttaaattcccggctctaagcttattgcaaaaattagaaatacttgaaaaaaaatcaatcgaaattaaaagaaaatttaataattttaattaaaattcagcaatattttttattttgttggttcaataaattgtggctgtctaatttcgttgaataagcaatgaatttgtgaatctgctgtccttcttcaacacattgccaaattttgctcgtatttgtgcagatttttgagttgacgatggatgtgaaacatttcgcctaattattatttttttaaattaattattttaattagttaatttgccgatttatttgctccatcactttctcaacagttaaacggtcttcagtgtcaatgtccccagttttgaacacattatattgccaaccattttcaacttgaaggcaaaaagcagcagaaccatcacgatggctttaaatttaaaatataataacaaataaaatgagatgctaaaacttatttcaacaacaagttaaacctctgtccttaactttaaattcattttcaaattaaatattgaaaaatttttcgcaggaaaaatttataaagtttcgtaattttgtttattcaatttaaaaagcattttagttacaattttattaaaacatcgagtcaaagaataatgtcgattaggctttaagatgtattttaaatagagtagagcgggaccgggaccgggccgggaattcccggtcatccgaggtccaggattttgaaaagctcaggtcccgggcccggtcccggacaaaaatcgaggtcccgtcccggtcccggttttgctcaaaattcccggtcccgctctactctaattttaaccccctcgcccgcccacatcctaccataacacataccgatggtcaggaaatgtccagtggattatggtggaaatcaaatcaggctcttttataatcaaaacaccccaattgccaccgtaaatgtcctccattatacgacgaattaccttcaaattgaattcactccaaaataattataattaaatttaattaatttgtttaatttattgtaattccctacttgcataaagtagaggcgcatccatcgttgctaactatctcattagtc

SEQ ID NO: 8455 - DNA, 1132 bp, Heterodera glycines
  unsure (1)..(1132): unsure at all n locations
gcacagccgcgctgtgcncaaaaagtcaaacttagttgggtaaatttcgaagttttntaaaattattttaaataaaaacagatgtttgcgaactgttgcacattgttactcataaatacatcggcgctgactgcgcactgcgcccgggcgaacgtttggtggtggtggacaacggagacaaggattggaagcacaggttcaaggagtataaaattttaaattttaaggatttttaatagttattgaaggctcattttatgagttgtctctaaaattgctcatttttataattgataaaacaaaattataaattaaaaaacatatataataattagggttcgaagttgtatgattaaaaatgctcactagccattgttttggtgttttaaaagtcaattcttaatttaaacacaatttttggcattttttgagggttaaaagccattttgggtaatttttaaggcatattttactgcatatttggggtttttagggcatatttgggggatttttagtgcatattttatgcgcatgtttggcattttttagtgcatacaacttcgaaccctaataataattgggtttattgtatttttcccgcttattgagtctattcatgatacggagtgaaaatttttaaataacaaaaattttgttaattaaaaaaatattttagctgaatgattacatggaactgatggtcacattccctatcacttgcgttgcaccttatctgcttaaagaacggccaatgcgtttgttgcgcaattgcaatttggtggaccagaaaatacgattataccgcgatcaggtcgaaaaaatttaagatgactcttataaaatgataagggcatttaaattaaattaataattataatataaaacaattattgtattaaagattgtcttcgttcaagcaaattcgttggaaagcaatggacgtgtggcgatcagaaatgagcaacaataaaatcatgcactgttcaatacaattttgacaaatctagcgtgaaaatttactattgatgcacaacaagatttattaattaattaggcaattagtgtcatttgttatttaattttgtataaacaaataaacgcctttgaaatgagaatttttattaaaggaaaa

SEQ ID NO: 8456 - DNA, 3380 bp, Heterodera glycines
atctccaattatcccccagtctaggaggggtttgaaaaataatcagcccagtctccatttatcccccagggggataaatagaatttggtcataacatttttaggggatgcataataacggaaaagtacctccaatttgtgaaaattttggcctaggaattccgttttttgttaatttgaataaattaggtataatatttcttctgtagcaattggtgaaaattagcagcaattcgccgcgttcatgtgtgaaaatcaatcaaatttttaattccttatatcattcgatagttctagatgttttctattagcctacagaatttcaaaaagtttcgttaagtttcaagaaagttatgagctaaaatgttgtaaaaaacttgggtttttgagcttctcaagttataacttttttgaaacttaacgaaactttttgaaattttataggctaataaaaaacggtttggcctttttatgtcaaaatgtttccgcgccttccgtttttatcaatgatttttcgcctcccattggccattggcaacaatttaagacgaacaaaattcaaaaattgttggataaaatgtgattttcgttaaaatttttggttttccgcttttctcattatataaaaataaagattccaacgcaattaattcttctgctatttgtgtgacatcattcgggactcgtccaaattgtgctaattgctgccaaaaatgaaccgacggtaatgaattttaaaagtcacacaaattcgtcatttatttcactaacaataaactgttttccataatttcagttggatttgcaacgacgtttggatggacattttgccctgttttgatcgtcctcaactcggcctcaaattggcacttctttcgccacgtttcaatgcgttggtggacaaacatttcaatggcaaaagcgaattgacaatttggagaccaatcgaaattagcaagggcattggaacaaaaccgaagctatctgtgattaccatcaattatggcacttctgcgtattttccgttgcccgatcgtccgctgcccaaaaaaattcgctttaagcaccttcagattaagtaattcattaatagggcttaggtatgtgtatttttaggctccaaatgccaaaaaataggcactaaaaaacctcatttttacgggtataaaatgacaaaattttagtcaaaaagcaacaaattaagcaaaatcagtattgagtctacacaatttctaatatctttaattttggaggatgaatttttcatttcttagctgagtcgctctcagttgggccggcacggttgggccccagcatgcttttctactattttttctttgtcatccaaatccaacaatcttggtatcattcgaaagctcttcagctctattagccttacaaaaagcgaatagattttcaagccttgaaaaaattttattaagaaaaatttcgactttttcgcaattttcatgcataatttttgtctactcgcgaaacaatagcttaaaaaaagcttctaaaatgttaagctttcgatggatttggatgataaacaaaaaaattatagaggaaaagcatgctggagcctaaacgtgccggcccaactgaggtgtaccgtttcttaggggtatatttttgaaaattttggcgttttgaacagtaaaaccgcatttttgtagatacatcgaccattccgtcgtcgcatttctccgtgccaacaagcaaatttgggacaaaggcaccaaattcaatttgtacatatcctcaactgacaacgactctgtccagccgctttggaatgtttttgtccgtgaaatttgcggtcggggtcggtttagtacggccggtttagtacgagggtcggtttagtacggctgttttagtacggccgttttagtacgagggtcggtttagtacggcaagctgtttttgtccataactgttacaaatgttttttttgtcaattataaagaaggaaaaacttataatatctattctcacaaagtaaaagcctatgttttcacgttttttgttggtgtctttttagacgtgataaatgggtttttccaattgcgtactgccttctcacttcaaaatgtgaaatgatttacacacggatgcttcagctaattgtccaaaaatggccgaattttgcacctgaaaccatatcgttggacttcgagcaggccatggttgctgctgtccgtacaatgttgccaaaatgaccacaattaccatgccaatgtcaatgttaatcccgataacatcaatcatttgctcgttggtgtttctcgcaattataaaatgcgcccgtaatttttcaatgcttgctattttttttgttgttgttaacacattgataaatatgttatgttattaattttaaaattttttcggaaaaaatcagtagaatctatttttgacaaaaacagcttgccgtactaaactgaccctcgtactaaaccgacccctcgtactaaaccggccgtactaaaccggccgtactaaaacggccgtactaaaccggccgtactaaactgacccggtccgaattattaacaagtacccaaaaatgacagcaaaaatgaataaatatcgcatgataatggtgccatgtgatttcgtcagaagtgatttcgtcagtaagtgatttcgtcagtaattgatttcgtcagtgagaaataatttttaaaaaaaatttacctatcaaaaattaaaataaattcaaaaacgcaagtgatatgaactaattataatttcatatgaactataatacatttgtatgcaataaataatgaaaatatattcatacattaaaatacgaaactttatttgcctcttcactctctattggtcactcttatcagagaaaagaattctttttgagggttgcctctgccgttttgtatcttgtgtgttcgtctttcgagaaaaaattatttgtttgccctttcattgcctattggtcactcttatcagtgataatgggtcgcttttgcggttttgtctcttagttgttcgtttttcgagactcgccagtggtcatttccattgacctcgagacttcgtttccgaatttctccccattaattgatcttttttttgtcttcaatggccttaatccgtttttctgtatgcaaatccaatcgtggccgtgagctgatcactcatggcgactatgagtatctttacgaagtgaaatcttttaaatggaaaaaattaatagttttctaaggccgattcccgaactgaagacggctggagttactggaaatgccctcggcgtcctccctattgccctgggagggcaatcgtgcagtcaaatttattagtcggtggtgagagttcaaattacagaatgggtcgtgtaactgcgcaaca

SEQ ID NO: 8457 - DNA, 5815 bp, Heterodera glycines
  unsure (1)..(5815): unsure at all n locations
ctagtataacttttgaagctgatcaaaaaagtccattcttctacagtaatcatatccatcctgactagctgaattttttcagattttttcttgccatataaaaaaagttataattttggaacagactgtaaggaagtaaattaagttttattattgaatacttatttgagcaccattacatcttggattccccttatcttgtaagttggataacaaagctgaacaaaatattcttgtaatttagtgcaaaaagtttaataaaagtgggtttaaaagagctttaacataaaatgacacgaattaataaaataattattatgaattaatataccataaatatgtcagccgaattgacctaaagaactgtattatatggaagggattatacattaatcttgtcaaaataattaaaaataaataaaatagaaaaataaaaataaagtgttagcctatatactcaaaattgtaatttcaataaccttacaaaattataaaggaaaagcaaatatactttgtttataataccgaaagatgaaaataattttgtgctattaaaaactatatagcaatatcatttgttcataaagtgagggaggcgtgtgggtcccccagtcgatacaccgttcgaagaataaaaggggaggacgatttggggaataaatcccaggcccaggattggtggcgaaattcccaaaaaagcctcgatgttaatagactaatttattctctccggataaaatggtgattgaaatgttacatcgacgaacgactgatcgaatagcctttacggctcggttgactaacgactgactaaccaacctgcgcacctgcacaatttatgaacatacttggcctgaggggctggagagaatcaaccagagttcaatccgtcccagagtgatgcgaagaaacggtgaaaaagacgaagtgccgagttggaagagctgtacagggttggttgcccaaaattttgaggggtggaataaagaaaagagcagccgaaaattccagtacaaaaagaggatattgagaagaaacaattgagaaggaacaaaagaaaagaaaaaagaaaatggggggaataaacgtgtacagaattgaaggaaggggaagggaggaatggaaatgccaatgccaccgaatcatccgtccgttcgaacgaagtccttatttaatcgtcgattggccgatgctcaccgccggctcaggtgtctcatttagaaatgatggaagtttgaaggaaatctctgtcatgtgaatctgaattggttgaaattaatgctgttcctctttaaacatgacttacctaatacatatccctgaactgcgcagaattttgcagtatcctccgatcaccaacgcaagacgtccccgtcttgctgtgcgaatagttgaccattgactagcgtgggtgacgagatgatgtttcgcggtcggcatttggtggtccaagttggaaggaacgatcccatccacgattcgcttcctccacagggttccagttgcgtgagcacatccgaattgccatttcaatgcatgtttcaatgtaatgctgttgattgtgaattaggctattttgatggtccattggtttagtgtaaaaaaaatttttatcgttcgacaaaattataaaattttcagggatgttgatccaaaacccagtgatgtgaatccatgaatcaaacgtaaacagataatgatcgagcccagacttgatttggtgagggtagaagcgttgtaatacttctatgtctccatatacgtcgattccaacatcaattgtttggattgcatctgttatttcacaccgctgagttgcaaagacggtgccatcttcgcgttcgaatggagcatttaggcagtctgagctgatattgtccccaaaacctgccccgccgtcttcccgttgggcaacaacatgttatcgattggataacatttcttgcatccgtgccatgtacagccctaaaatattgattttttatgcaataacaataataatcaataccgtgcacttcaattgcacgtccctctgcctcaatccatccgtcaaccgagtaggggccgattcgcttctctcctccagcagaatgggcggtctgcacttccacacctactcctccgagtaccagtggaagaaccgtaaggcgagaaggctttgattttgagcgttgtcgtaaccgcgctctgagacgatggcaagatggtcgtccggcagatggttagtgcgaaagtgtcgcatgcacgcgccggcgatggtcatgcactcacgcagtacgtcgatgccatcatggttctctctgtcgtcgatcccgtccacgtactcctggcgacgcgaaatctcaaagaattaccgacggaatgcgacaagggcagcgatcagaatctcgaaatcattcgtgcaataactgaaataggcgcacttaatttatacattttaaaaatagcttttacctggcaagcgcctcatcgagcctaaaaggctcatgacggtgctcggagtaccactcgtcgaattggcgcctcttcccgggcatcataccgtttgccaaatagtcgtccggcattgggtgaatttctctgccgtagttttctggtctattggccaaatgcgggaagaagggcttgtcctccacgtcaagaccataagaagggatgagcgcagctaacgaacacggtatcaggttgaacgaatcccggaatactatgtttgggttgcgccttttctgcttcctcactttcatttcgtacattttatttccctgaaaatttaaatttttgacacaaattcgtaattgagtacccgtcgcagcatttcggggttaaagccaatccggaacagctcgaggaaaacaagcaccatgtcgaagcgaccgccaaaatgcgagtaggcataggtgtcgcatttttttggcagttcaaacacgagccaattcacgaatggctcaagcgggttctcagcgatcacttgcttgtccacttgtgtgtccatgaatcggtgttgacagaacacaacggtccgacgtggcccacatatttgacatcctgcagttgccctcttccatttgccgttttgaatgcagtcggggcatgcaacccgggcagcaatgaagtttggctgatgttccttcttttcaggttgttgggggtccaacgcttggtgttgcatagtctccaagtcaaaggccacaatgctgtaagggtcttgttccttcggctcaattgattggatgaaacagccccgctcgggattgtggtaagtgttgcacaattggcaatacgtctcgtggcattggtgaccctaaaagaattattttttttaaaaatttttaaattattttacttttcttccattacggttgttgtcacgaacattccaaataactccgcactctttgcattgttttgactctgcacaaaaattggatctcaagctttacaagaatttggatgtcttgatggtcgctggtatggcttctcacattctaggcagtagtgttgtccaaataagccatactccttctgcacaccatcaaaatggccgttgtttaggtagagtgagattggtgtgtcgtaatagttgttgatgtatttgtacagcggcttgtactgaccagttgatccaaaaataaacacagcaaaacgatgtcgttgctggctgttgttccaatgatccaccactcggggcacaacaatttcagcatcatacgcattaagtccaggccgtgcgccaatttgttgcataagttgcaaagcatccctttgaagacagccctgttgaccgtgttggctgtgcacgtagcggcggaacttccaacttgcccagccacggcttttagccaccattgttgcttgtaaggcataaaataacaatagctgcgctcatcaggattgtttatcttaaaacaacccatcaaaactgttgctttaacatggaccggaccttaatcaaactccgatcattaatacgatggtgaacaggtgccagagctcgtcgtgcgcctcccttcagcgttcttttggtcggcagtccaggtcgattaactgtcgtcacaactacggtaaacggttcaccccacagtgtgacgttctgttgcttcttgctctgtgccactttgacgaattgatttaagatggtgttgaccgtgttgtccgtgatttgccggataggaatggggatgtccccgccagtcagcagcggactactgatgaggcaaccgaggtgtgtcggatgaattccccgctcacggctgtccgccacagccgcatcaatgctgtactggaaatgccagcaagaagtccttcgggattggctgctgctggtacgtcctaatactgaaccgcgacttggctttgctgtattggaagcgcggcacgtgctcgatagtgctgttcagctttcgaacgtagtcttttgcagtttttgatgtagatgagggggtcccagcaccttcttggaccatttctccaaataattcgttgatgagaaagccgcgccgcggctttttattagcattgatagaagataatcaatagaaaaattagagggccgtttgggaggttgattttgcattattcaaaatctaattaaaggaatgaaatgagtgtgaatgataaatgaatggacaatcgagccaatttatagcgatttattgtattacctcaaggcctaaaagacattaaaataattgtgtccggacgtgcttataaagcctcccagaaatcgacaagctcctcccatcaatcgataattttcgacgccatcgcgaaaggcggctttttcaaattttcctttgaagtaattccctcgtgaattgagagtgcaatgagcatttatgaataattaacgacacctaagcaacataaaaattatacatttattgatttaacatttttcgtaataaaacaatcgcgtacatgtccggacttgcacaattattagaaattgtgtaaaggaattcccttgggacatgtggtaaataaaaacaattaaaaattatacatttattgatttaacatttttcgtaataaaacaatagcgtacatgtccggacttgcacaattattaagaatagttagaaattgtgtaaaggaatcccttgggacatgtggtaaataaaaacaatacaatgggcagcacaagtagagagtaaaggggactggtaagggtgagcattccttcttgttccctcacgaaattcgcacaaaaaagatgacgtaatggtgggcgggatgggctgggcaaggctgtcataataaagcgctggtgcttccattcccctcgcgtaaatggcgcaccaatgagaacccttcttgtgtcgggggtccctgttcacaacaagcgccgccgggtactgtagtgtggaaggaggcggcaattggtcactggcgaagcagccctgaaacactcgcccggtcagaaggttttcgctcattatttttgcgatttgaagactgtccattcttcaaccaaaagattgagcatgggtgatgcagtacaagactgattattagcattaaataaagagcgaaaagtgcccagcaaatggcttgctgcgcaatgtttctttcctctggcatgtccttacacaattggataagcggtggaagaacagcagaaacatgttcatcaattaacttgtcactttttggagggattttggttgttgttgttgttgttgntgntgntgntgttgtgggggggatttggttttggaaaaaaataaaatttttgaaaaaacaaccttctcaaatattcagtgtaggaatatgacggctcgtgttgttgtcgagataaagtcaaattttttatata

SEQ ID NO: 8458 - DNA, 2270 bp, Heterodera glycines
caattttggaaatgtgatttttcgatatgttgtttttgcacaaaagtgatttaagtgtgccaaagaaaaaaaaattatattatctatctattaatataaattttacaattttttcatttctttttgcatttaattttttgcaaatgtttttaaataatttttcttaaattgcaataaaatcgcaacgcaaaattttcagtcctgttttaaagcatgaaatttcattttttttttaaacatagcaaatcccataaaaaaatttatataacagaaacagcaggaaataatttgaccaatggaaataaaaaagcacaaataatatgaaacaacttgtcaattagcaaaataatgcaaacaaataaaaaaaaggaaaatcgtatttttttgctggacttttttatgtttttctctagaaattttttagtaaatggataaattttctaaattcttagctcacaaaacctttcaaatttaaatttttagatttcatatttttctgattttgtatgattaaactttttttttgaaaaattttaatttccaataaaaatttttctgcttatgctgttatcgatcattttgaatttttgggaatttaaaatagtttttttttgggttaaacgatccttggccaaattttgaattcaattttgatcagtttcaaaataaaataaaaaaatgctaccccatcccaatcccataacgagttttcttctaatcccatctttgccatcatcaattcgtcctcaacttcatctgctgtatgatggttttaaatcagcaaattttttcatcattttttcgacactttctttggaatgttccaacagcttcaccactttgttttccttcggcattgacttcttaagttcttcaagctgttcaattattttggacaattcagtgaacaaatgatggtacatggccaaattgtgcaattggatgctagaccaatttttgaaggtttccggtgttaaatcagcgggtgaaaatttggtgattatctcctaaaattttaattaggtaaaagtttttaaaaatggaaataaatcagtaaattaaatttgttgtcttatctatgaattaataaatctattgtttaaagtataatttaaatagtataccaatgctcgtgcaaaatattatttcgattatattttgttgaaatattcaaaaaatacaaatatagaaaaaaaaaataaaattgaaaaaccaaaaatttaaggataacctatcgactatttgaattaaaaaaacaaaaaaaaatatgttaatttaatatttggctatattaaaatatttattaaatgttaaaaaaaatcttaagataatttttcattcataaaatttttttgaatataaaaataactaattcatcaattcagatatctttacgggttagtccaagttatcatatttatctacttttctaatttttattattaatttttttttgggtttttggcccaaaatctaactataaaataatttaatctttttttcatttttattcaaaaattaatgaatttttaaatattataaaaataaaagaaatgccttcagagtgtttgcctgtgcttcaatcagttgttcattgccttcaaattcgaccattaaacgatgttttgttatatccaaaaaatccaacattttcttatcaattcgctccgttacaaattccaactttgaataaatcgtattaaaattgtttacggtggtataaacatccatttccaaatgttttgtctcaacaggcaatggtaaaattgtcaatttgattgctaaaaaatgtgagcccatgtaattgagtttttaatatgactattaataaatgaaaaaatgaaattaaaatcctgaagtctttcttaatttttatttttaatatttttacaagaaaaatttttttgagtttttaaaacttttatttaccaaattcaaaaattttagatttttagaaaatttttttttgccataaatcatatcgccactaaatgtttttgaggcatttttaaaattaaaaaaaaatcctcggctttgaagttaatgttcaatactaagaacgatctatgtccggatttttggtgtatgatgttactgaaaacccattaaaatgggcgttactcaaaaaaccatcaaaataaaatttttttgatataacttcgcccaaaaaaggatcaaatttttataagcttgctattattcgatagccctaacttttttctattatttagaaaaatttcaagaaagaacgaatatttttatatttaaaa

SEQ ID NO: 8459 - DNA, 3690 bp, Heterodera glycines
atcctcatcatcatcttcttcatcatcatcattatctccatctcgtttttccttttgcctttttccatctccaccagcaccatctttagaatcatgctccatattgctcgattccaccagtttatcaagatcgatgtcgtcaaggtcgacgtctaaaatgagggagtgtcttaaaggaaattaattaatccattttttaaaaaattgaaaatgggaaagcaatgtgcaattttaaaaaattttaacatttttccaaaaaagggtgtaaaaataaaatagtgacgttttttgtaaggctaaaacgttttgagtatactctaaaaaaatttctgaaataattcatttaacataatttttggctttacaaaattgttttaaatctcatggttatatctcaccgaaaattaacttatagacagaccaaaaggtgcggaaatggcatttttttcaaaaaatgccaacaaaccttttgtcctatataaaaaatcgcaatctattgccgatttttcgataaaaattagccaaaaatttaaaaaaataatattaccagtatacctacaacataaaattgtaattttaccgagttcgtccgttggacagtctgacaacgtttcgtcggaatctttctcctgctcgccgtgctttttctcggccgattctttctcgtccgccgacgagtcggagctgatctcaacaatcactgggttccttctttcttcctcctcagcgtcggttgccttttggagcagtacatggaatttggccaacaatttgtcgataattgccgcaacacttttcaacacgtcaaccaaatttgcgggcgaagcattggcattattgccgatggccaagcttcggatttgggtttgctgatgggtcaaattgaccttcatgtcggcgtacaaattgatgtaaaaattgatgtttttaaacaattcttttttgtttggcaccttttgttcaacagcttgtaaaaaaccctaaaaaatattaaataaaattctaataaagccaataatattgaaaatatttaaaaaaatctaaatcattttaaatattttgataaacaaattaaactttatttacggaagataaattttgaaatttgtaaaattacttttcagatattaagaattttatctttttaaaatgagttagtataacccaaaatttagtttagaagataaaattttttttttatatacatttttaaaaatttcgatgacttagaagaatctcagaaaaatataaatacccatattttgaattagagccctagggcttttatttttatgcccccctcgaaagagggctttatttcagggaggggttctaattcgtggggggggggttcgaattaaataaatatggtttgtaaaatttttattgtttctttttacaaaagaaatcgcattttttctgagataaaaatgaaatttatagcattaaaatatattttataattatacctccatatttttaatcagctcattttttggcaaaaattgtccattttctttcaactgacgatattttatttcgtcaacatattttttcaatttgtcgttgaccaatcctttatgcctgttcaatgcatcaccaatgccttcaaccatttgtggtgaaatttcactcaaaacattcaatttgtcatcaccattataaattgcaatgaaagacaaataaacgcctaaaaattaattaaatttaaaaatttaaaaatattttttagttgagtaacagtttttgcagcttattaattggccattaaaagtggaaaaattcgcacataatcttgagatcactccaaagctctattagtctgcaaaatgaaaaatgatttttccattataaagcaatgcccaacaaaatccaaaaaaaaataataattttttttaatttaaaactttttgagatttaaaaactactaaaaacaattaggcaagctccaggaaatgataccaacaattttaaattttttaatatttaaatagtttgcttttaaatattacattttttaaatttttccatatgagttccctgttgaaaacccttccttaataatcatttgaaaactgaatacatgcaatttacgtggcccgagtgctaatgaattgcctaattgccattccaatggaaaccgaactttaccaaccaagtatggccatgtatatcgtgtcgccagccatattcaaatattttttggcactttcgctgctaatcttcatcatccttgcttttgttttgctctttggaccagtggaggaagaagcatcggttttgttcgcactggcaatcatctgatcaacgatctgttgcgttccgtgcagcgtttcccgcatttggctaattgtcgcatcgattttggccacttttttgcattcttcgcattcatccggttcatcatcatcagactcctggcacagaaactaaaaagtttagggtaacaaaatctcaaaaataaatcgataaaatactttcttttttgaataatcctgatttattattataattaatttaatattagtttatattaaaattattatttgaaataaccttataaaagcactttaaaaatcaaatatttttagtccggtaaaatgtttaaaaaatagttgttatttcatttttatttacttgttttctctttgtgtaacggtcttttaagttcatgaatttttctacagtttcttctttatctttatcttcatcatcatcaatattaattgggtcggcaatttgcttacctttatcttttatcagttttctaaaaatgggctttatcaattttagttggtgttttggctttttcactaaagccgtttctcgccaaaaattactcatttttgccactttgaggtcaattttgcaaaaaaaataaataaataaataaaaatgggggtccgaatttgagaattaatcgtgatttgataacagattttgtacgtaaaatgattattttcaatttttgaattcaaatgttaattagtggattgtatgtccggttttttgagttcctcgggtcataactttttttttttaaacttaacgaatttttttgagattttgaaggataaaagaacacatagagctaccgaaatatatcaagaacttaatatttgcttaattttgggcgaagttatgaataattttatgtcaaaaattttccatttgatgttttttgactaacgatttttcaaaaatatttactgaatgtataattccgcgccagcgccagggaatttaaatttttattcatttaattgtgatttattgaaatatttttgtcaaaaaaagtctatttttcacgttagtctcgcttaactttctctaatatacttattttggcgaacttttttttaaagaatttcttaagcattttccttgtgacgtagctcattgttttgtgtttaccgtagaccttttactaagtacagtatgccctaatctctcattagttgatcatttctgctccgcccactttaagtcttttgctgccctccagcacattgtaccattcactctttcgggagggggaattggctaatcccgaactcttccaattccacctctcccccaatttgccccggacgaatcggttcacccttccccaactaatcaatcacatatttgtatgatccaccttcggaataaaggttattattccatcccactcgtgaattatgggga

SEQ ID NO: 8460 - DNA, 2625 bp, Heterodera glycines
  unsure (1)..(2625): unsure at all n locations
agctttcgagtgcgcatctccaggccctcaatgtcttcaaccaagcgcattttgatctgtgtgaacgccgccagtgcaagagctgccacttcttaaaaattattaatttgtattatatttttcacattaattataccccggtcatcttccgagaccaattttggctttttggctgatgttgctgctgatgatgatgaggaagccatagtacgttttaaggacgaaactgctatggtggccacctcctcatttccatattgcagaactcgattggccattgcttcatgttgtttttcctgctgatttagcagttcaaacgtctcacgcaacatggctggcgacactaccgtagcccggtttgatgtgtatggagaatagcgctaaaatttacagaaaaataaataaaatcagtaaaatgtaattgaatttctcacttcattattagcccaattctccattaattcgatgcgtgatgtacagttgagcgtcatatttttgaggtcactgaagaggtaccgtagaaagcggtactttccccccaagtccttcatttgtgagccaatgtcagaattcatttttattcttaaatttaattataaaaatgtaaggtcaataagcagaaaaggaatgaatgctttggctttgttatgcgcatgccgccggttattaattaattaatttccgcaaccacccagcccgccccctccaccgcgaatcagttgtgacagtttcaaatgcaaagagacgctaattaattattactcaagcgctacggttaagcattggtaaaaggcaaacaataattccgagggatgttctcaatgaatttatttaagaaaaaataaaataaaattacgataagtgatttaaaaataataagaaaagcatcataaaccaaaatttgcttcattcattgtttggctttttcttcatgggtgcaattaagtcagtcgctcggcaattgacccgcacgcattcctgacatagctcaaagttgatagaaaagcggtcgtcgtccaggcgcttcaccttctgctgattgtgatacaatcggttccagtcgtcttaaaatattaattaaaataaaaaattgtctattgttaatttacccgggcagaggtatgtagtaagcaaatattttcccttcgctaatttccacaaatctcggtcctccaccgcgcgcttttttgttggcggtccctttgtctcatgatctggctcagcttccacatgtgtcggaatgggttcaattttattctcatgctgatttggagcggcagcagcagcagtagaaagagtagcagcggatctcttcattttgtataaaataattttggtgtttggaattaatgaaggatgattttgggtttggacagacaaattaaaatgatttcggtttttagtcaggtgaattatttaggtgagagtgggcggggctaatcagtaactaaatgatgggcgtggcccaacttttgagtatataaaagtgaaattagtcgttataacattcattcttggtgaaatggtactcgtcagcgttttctgtgctcagcttcttaactgccctgtcaaatcattgcgtgatcgactcaatcaccccgaggatcggagcattgtaatgaaacatctgattggacgaaaagtgcgtacaacatacaacgaccgtaatgggatgcggaaaacatttttcgtcagtggaatttcagaccaaggggcagccttccttcccgcatacggtcatttgcgccgaccatttaacatcaatgtagctgctcatttttatgcgcgacaccgtataaagctacactttccttatactccatgcataattgagagattttcggggtgaggcaaagatcggcattttccattggaactccttgaaattgttgatgatcaagaccatgaatgctggtcggggcgtctgttctcagaaattggcgagactgatcagaaaccctcaaagtcatcatcctcatcatcatcaactcaaactttgcgcctgcccgatgatgaagagatgacagaaaatatagggcgcaatgagtgcagtcaaatgtctccatcattttggtgaaattttaaattatgttatgttaattatgcgttttcaatcataaaacgatcactttaattttttaattaaaaattgtttttttcgaattcattaactttaattttttaattaaaaattgcttttttcaaattcattaattttttgacaattgtatcttctttggcctaattatgcacttttctacctaaaaatgccttcttcgtttgtttaattattttaaaatttcatcttccattcattaattatgcattaattttatttgaaaagcgaataaatacaatttatggtgtattgatgagaaagagagatacatcagaaaacaaaaacattacaaagtgtggccaaaattcttcacattgaaatcgttgcctataattcccttcccaacatatggtcggtaacatttctgtaggggatgggatacgaccctcccctccctccgaatgttaggtcggaggaaagtaggataagtgacaatgattggctcatagtcaccccgntggtgcgtaccgcaccacttcttctttggacgtctcgtaacgcatgcc

SEQ ID NO: 8461 - DNA, 2604 bp, Heterodera glycines
agtgtctggaacagaccgaaatttcgaagcgaaaaacgtttcccctgaaaattacattttttgtcaaaattcatatgtcaaaactcacataaattgttcaggcacagctttgccagggaccgtttccccttgttgaccaccatttttgccgggtcaatgttgatgccaaactgctcagcacactctcggacaaattgttcttccttctcagcgtcccctcttatgctgctgtcaaaaccgcttgcctggattttttgagccatgaattccgcaatgtaggggcggaatagcttgtcgtcgctctgttcgtactccagaacgcggaacaccctcgtgacgcggtaaccctcgtctagcgcgacgttgagctcaattgatgtacaggtgctgacccatccgcgttgttgatcagtgtgctgacagtggtagtcgtagtccacgcctccagttggatattctttagcacaggtgatgcacagcggaaagcacagtcggtcgtccactttgaccgttaacaccgcaacgtcaattttacggggcggcacaacccagactttgatcagcgccagcgggaaaggattgtccgatgcgcttgtccactgcacttgttggtttaaaacatgcactttcgggtgcccaacaggatatcgagtggtgaagcttaagatttacaatttatttgtcaaatggagaaaaagaactgactttatgtaagggtataacgacgtgaaatcgtaataggagatcttctctcccggtcccgctttgcgcaacaatttcagtggcccggtccgtcctcccgtaaatgcgtccctgatcaccagtggcccgtcatccacgtagttcgcgaaggatttcctcatggctttgctccgctctactatggacgtgattttgcactcccagtacacgtccacacgattcactcgggcccggatgtattccatccgctttgcgtcgcgctcgcgtacctgccccgatgtctttccgttgggcaacaacatgttatcgattggataacatttcttgcatccgtgccaagtacagtcttaaaatattgattttttatggaataacaataataatcaataccgtgcacttcaattgcacgcccctctgcctcaatccatccgtcaaccgagtaggggccgattctcttctctcctccggcagagtgggcggtctgcacttccaccccgtactcctccgagtaccagtggaagaaccgtaaggcgagaaggctttgattttgagcgttgtcgtaaccgcgctcagggacgatggccagatgttcatcaggcagatggttagtgcgaaagtgtcgcatgcacgcgccggcgatggtcatgcaaacagtggactactgatgaggcagccgaggtgtgttggatgaattccccgctcacggctgtccgccacagccgcatcaatgctgtactggaattctaatcacagttgtacctcttctaatcactgttgtacctctcctaatcactgttgtgcctttcccttccgtggttgcacctcttctaatcacagttgaacctgttctaatcactgttgtacctcttttaatcacttttgacatcttttaatcactgttgtacttcttttaatcacttttgtacgtcttttaatcactgttgtttaaaattgataaactaaagaatttatttgttttttttaattagaatttgtcaacaaattaatatacaataaataaccaatcattgtacattttagaattttttaaaaattcgaaaatattttcaaactttttttggcccttgggaatttgggcgaatatttgaaaaatctcaaggggtattttaaattatttaatttttttatttaaattgttttattaatttattttaaattattttctgatgaataactgttttatttaatttgaattttcgagaaattaattcctttcaatttcaataaatattctatattataaatttcgaacttttcatagttgtacttcttttaatcactgttgtgcctcttttaatcccttttatatctcttaatccctgtgtgattgcccgtctgagttcaactaaattttaaaaacgggcgcgaagcgcccgcccaagcccaataaaatttgaaaaacgggcgcgaagcgcccgtccaagcccaacaaaattttaaaaacgggcgcgaagcgcccgttcgaggccgcgaagcggcctaaaagtcccagataattttttaaaaattcaaaatctccacaaccagagctaaaataaaagtgattttgtgcttcgggtccaaaggggggagcacatgatttttgagtgggaaaatttttccatcaaaaaccatccaaaaacatgtctttaggtctatttgagggtgctgatcaccaatctgacatcagatttcagttattacaacgttaagccctcagaatccctgtgtgattggggattctgaggcattattttgaggggggggggaagttcgaatccgggcggtgtacaatatttttgctatgcatttttggctatttttaatgtttttaattcatttaaaagagtgtttgttttataataaaaaataaattttttaatttaaattaaattttttttg

SEQ ID NO: 8462 - DNA, 1755 bp, Heterodera glycines
tttttaaaaattccaaacttaacaatccatagcttgtcttggtagcgaagctcccaaagcgcgaagcgcttttttccagctaaatagccgacggttcacgcacccgctagttaaattgtatagttactattaattaccaaaaaaattcttggaaagattgcgtaaaattcgccattttaagtgggtttattaaatgtttttttctcagtcttgagtctcatgccttggaaaattctcgatctcgaggcacgaatattcatttttttgtccttccgtttcaccggcgccagtttttctaaattgtggggaaaaaagatttttaatttgtaatttccaaagcgatttcccaaattctcatgctatttgaaagcaagggctcattatttgtattcattcattgacgcaatggcaaaagttttaataaaaatttttgttaatgagcacaaaaagaaatttagagaaaataattcatttaacaaatatttctcttggttttaaacataatgacatcaattaataccagctcagaacatccggtatgaataaagtgcaaaatatcattttattaattttgtaatattttggaattgttcgagttcatttttaaactttaaattggttttttattaaataaatatgcttttgagatttaaaaaattataattagctctcatgttttgcattaattatataattttttagatttttttttgctaattttccactggccttattaaacgcccaatttattagcaaattaagccctgaataatgaattttgcgagacatatttaaaagtaatacaattttggctagatggaaaatcgtactaaatttagaaaaatcactcaacaatgttcattaaaaatttccatttcattaatcaaatgaaaaatgtaacaatgccaaatttctgtgtaaatttaacaagacacaaaagcatttgttagccattcatcataaacccggcggaaatttcacaaatttagccaaattaagcacaaaaatggcaacaattaacaccagctcagacgaccaggtaaaagaaattaataattttttaaatttttaaataaaatttaaaaaattaacttttatgcttattttgcttttctgtgcttgatttcaatgctatttaacgaagattttttatatcctatcaaaaacaaaaataaacatagaacgtaattaaaaagctaaataaaatttattatgatttatttgtctctttatttttattttaaattaaaataaaataggaaatcaaattaaataattttactttctcagatttatttggcctaccgtttcgccggtccatccgccgatttgattgtgccggccgttgcattgaatttggttgcgttggttggcattgtgttgaacggcacagttttggtggtcactgtcaaatccaggcaaatgccatggcattttaaaattttttaaattatatttcccatttttcagttccctccgcggctccgccaattttctgatggcattgatttgtttttgtgaattggtccaccaaattgggcacacttttttcctggttgttgtcatttcgggcacaaattttgtcagtttactcaccgcttatttaattatgacggtaaaacttggaattttatttattttttcatttttaaaaattttcagccttcaatttttgctttcaattgcggctcaatgacaatgttttgtgctgcttttgaccgactttttgctgtagctttgccatttaagtatgga

SEQ ID NO: 8463 - DNA, 4666 bp, Heterodera glycines
ggtcgacttttcgtattcagagacgatcgaatagccggagatgaccttagaaccatcgagaatttatgacaaaacacaatggaacccgaaatttattagtaaccgatcggacccaatgccatcggcatacaccgattttcctaataattgaggggtaaatttatctaagtaaagagaaggaaatatacaaagatcgatttgactcaaatgagatacttcccaaatatgtgtcagacaaagatagtgaattttttaattttgtcgtgttcaaagaatttgagaaattagtgtctcaaatcctaatatttgggtgtattttttgtcaattttagatttggtagtggtcatcatttgtatttcagttctcagaattttgaaattaaagagaaaagaaaaaaattcatcatacggcggtgaggtaacggtatataaggatttgcaacgaatatgaaaatgcctactcgtgctcaaaaatgaattctcattgaaattctatgcgattttaacgaatgcgaacctcacgaattatcagaaattctacgacagcggaagaaacagaatttgaaatttttgagaagacacgccctaataacgagacaccttaggcccaatcagtttatctcaccggatgacatcgcatttatcggttctaatcgactttttgcctaccgaggtttcctcggggttactgtagagcaacacctctactcaagacaccgggtcaagctacaattccctcagctcccatgtataactacgtataagaataacggtcataggtgctatttttccctggaacttttagattttttataaaaaatataacggctaacaggaatgggccttcactttagaccgttccacccccgctagtcataatattactttaatttatattcaactttatttaacaaaaaaacaataaaatacaaaaaaaaaaaattaacaaaatccaaatggcatcacattaagttcttcatcgattatccccttctggcagaccggcttgtacattttgtgcttctcctcgtcaccaccttcgaatcccgcgttggccttaatattgggttattaatgagtcaaaatttttttaaaacgtacccaaaatcatttttgtagacgaagaatgccgggtctacctcccctttcccataattcaaaaccatctccctgaatgtatcgtagtgcaatgttttcctgttgtccaatcgaacgtaatccctctaattttcataacatattcagtctcccccgtctgcttgcttctcatcttcagtgcgtactgcttcgcccctccacagcaatattcttcaatctcatagccgccgtattcctcgctcatctctcccaaatattttcccgttgtgatcggctccacatcccgatcgtgcaaaacaaaaatactgtcagtgtccgtatacaaaatttcccctccgttgctttcagcctccctcatacgccatactcgtcgtcctgaaaaattttaaataaaaaattaaaaaaaattttttgaactcaccataaactaatgactatgttgctcgacttgtgctccatcacaaactcctccttgtccctgtatatcaatctaatcgcctcttccgaatattcaacaatatcacataattcaattttatgatcacacgcaattttataaaattccgacgccctatcaatcaccgcattcttattcaaataatttctcatcgaaaactttccctaaaattttaagttaaaattttcgcaaaaccctaaatcttacccataagctatttagcatcaacttgcttatgtaccgcaatgctggattcttcttcactttagccaattcaatgtcgattccatatttttccttatactcttctctccacatatccttctgctcccccgtctcaacccccttcgggaaaccgcttgcctcctccttcagcttcaaaaataatcgcacgtatcccttgaataaattatccgcctcctcttcttagtgccacgctctataaaatctgtccacagtataaccgcattccaacgcctttgcctgaaaatgtcaaaattttcttaaaattttcccacataagttcttaccaattcaacgctagtatatgtcgccacgtatctccgctgtgcctcatcatgggggcaattgtaatcacatctcgtagtttccttcttaaatgttgacgcacatctccaacacaacgggaataataatctctcatcgcacttcaactgaagaaccggaatccgcaaccctcgcggcgggtggaccctcactttatacaatccattaaacttcaaatcctccggtctcgtccaatttacattaatctcatcgctcttcggtataataatcttcggaaaaccaatcgggtaagctgtaccataattcaccgatggatacagactcacaatatcataaacactaatttttttcttctcattcgatttcgcaaacaatttcatcggtccggtcctccctcccgcatatgccaatcgaatagacgagattgacattagtacaatagagaatttatggacacatcataatggcaccgaaattattactaaaccgatcggatctatgccatcatcatttaccgacttactaataattgagggacaaatttatctaattaaagagaagaaaatatacaaagatcgatttgactcaaacgagatacttcccaaatatgtggcagacacaaatagtgaattctttaattttgtcgtgttcaaagaatttgagaaaattaaagtttcaagttcaaatatttgggtatattttttgtcaattttagatttgatagtggtcttcatctgtatttcagttctcaaaattttaaaaataaagagaaaaggtaaaaattcatcatacggcggtgaggtaacggtatataaggatttgcaacgaatatgaaaatgcctactggtgttcaaaaatgtattctctcgttgaaattttatgcgattttaacgattgcgaacctcacgaattatcagaaattctacgacagcggaagaaacaaaatttgaaatttttgagaagacacgccctaataacgagacaccttaggcacaatcagtttatctcaccggatgacatcgcatttaacggttctaataggctttttgcctaccgaggtttcctcggagttactgttgaacagcacctctattcaagacaccgtgtcaagctacaattccctcaactcccatgtataactatgtaccagaataacggtcatagatgctattttccccttgaactgctggattttttataaaaatattacggctaacaggagtgggccttcactttagaccgttccaccccgctagtcctaatatcactttaatttttattcaactttatttaacaaaaaaaaacaacaataaaatacaaaattaacaaaatccaaatggcatcacattaagctcctcatcgatgatacccttctgacagaccggcctgtacattttatgcttctccctcgtcaccactttcgaatcccttgtcggcctaaatattgatttattaatgaagcaaataatttgtaaaaaactcacccaaaatcattcttatagacgaagaatgccgggtccacctcccctttcccataattcagaaccatctccctgaatgtatcgtagtgcaatgttttcctgttgtccacgtcgaacgtaatccctctaatcttcataacgtattcgatctcccccgtctgtttgtttctcatcttcagtgcgtactgcttcgcccctccacagcaatattcttcaatctcatagccgccgtattcctcgctcatctctcccaaatatttccccgtcgtgatcggctccacatcccgatcgtgcctaacaaaaatactgtccgtgtccgtgtacaaaatctccccgccatggctctccgcttctctcatgaattccaataattttaacctcgccatactcgtcgtcctaaaaattaggttatatacaaatttataatttttttgaactcaccataaactgatgactatgttgctcgacttgtgctccatcacaaagtcctccttgtccctgtatatcaatctaatcgcctcttccgaatattcaacaatatcacataattcaattttatgatcacacataattttataaaattccgacgccctatcaattaccgcattcttattcaaacaatttctcatcgaaaactttccctaaaattttaagttaaaactctttcgcaaaaccctaaatcttacccataaactatttagcatcaacttgcttatgtaccgcaatcctggattcttcttcactttagccaattcaatgtcgattccatatttttccttatactcttctctccacatatcctatcgtgctcctccgtctcaactcccttcggaaaaccgcttgactcctccttcagcttcaaaaataatcgcacgtatgccttgaataaatcatccggctcctcttcttagagccacgctctataaaatctgtccacagtataaccggattccaacgcctttggctgaaaatgtctaaattttattacaatggtcccacataagttcttaccaattataggctggtatatgtcaccacgtatctccgcagtgactcatgcagggggcaattggaatcacataatcgcagcttccttcttaaa

SEQ ID NO: 8464 - DNA, 1199 bp, Heterodera glycines
  unsure (1)..(1199): unsure at all n locations
gtcatagatgctatttcncctgacntgctggatttttataaaatatancggctacagggagtggccttcacttagacccgttccaccncgctagtcntaatatcactttaatttttattcacttattttaacaaaaaaancancantaaaatacaaantancanaatnccaaatggcatcacataagttcttcatcgattatccccttctggcagaccggcttgtacattttgtgcttctccctcgtcaccactttcgaatccctcgttggcctaaatattggtttattaatgagtcaaaattttttaaaaacgtacccaaaatcatttttgtagacgaagaatgccgggtctacctcccctttcccatagttcagaaccatctccctgaatgtgtcgtaatgtaaagtcttcttattatccacatcgaacgtaatccctctaatcttcataacgtattcgatctcccccgtctgtttgttcctcatcttcagtgcgtactgcttcgcctctccacagcaatattcttcaatctcatagccgccgtattcctcgctcatctctcccaaatatttccccgtcgtgatcggctccacatcccgatcgtgcaaaacaaaaatactgtccgtgtccgtatacaaaatttcccctccgttgctttcagcctccctcataaattccaataattttaacctcgccatactcgtagtcctaaaaattaggttatatacaaatttataattttttgaactcaccataaactgatgactatgttgctcgacttgtgctccatcacaaagtcctccttgtccctgtatatcaatctaatcgcctcttccgaatattcaacaatatcacataattcaattttatgatgatcacacgcaattttataaaattccgacgccctatcaatcaccgcattcttgttcaaacaatttctcatcgaaaactttccccgaaagtgaaaattacctatcgtaaatttattttcaattttcttacccataagctatttagcatcaacttgcttatgtaccgcaatcctggattcttcttcactttagccaattcaatgtcgattccatatttttccttatactcttctctccacatatccttctgctcccctgtctcaactcccttcgggaaaccgcttgcctcctccttcagcttcaaaaataatcgcacgtatccctt

SEQ ID NO: 8465 - DNA, 5748 bp, Heterodera glycines
  unsure (1)..(5748): unsure at all n locations
gttccggaggaagagggggcacggacgaggacccctcccaaagacttggactttgacgcgttggccaaacgctttctggagctgaagaagagactgtgaggactgaggacacgacagacgaaagaaacgacgacatttgacgggccaaaagaatgcttcgaagacgttttctccgaaaaatggaaattctaattcatctttgtgtttcatttcttcgctattcgctcatatcgctttttttttacttacgcacaacggcactcttttatgaaagttttaaaactttaactgagaaaaatgaatttacctcgtgacgtttaacttttttttctacacgttaaatctacttcaaattttgcataccaatagagaagaattttctgcatcgaaaaattagaagatttttcaaaaataaggctcattaaaaagtcattcaaaaaacaaattttcaaacgcccatatctttttttctaacgcatcaaatagcttagaatttgcttataaaaatcttctcctcatcaaaagcgtttgaatgataccaagtttgtccaatttgttggcaaaaacctccaaaaaataattttagaaaatggaccagggatgggccgaggtttcccctttcgcattttttggcgtttcgctttttggcgcaaaaagcgacttttacccccctaagaattggattaaattcccataaaatttttcaaaattttacctataaattggctaaatttcagtgaaaaactgtttataaatgatcaaaatttccaattttttccccggcggcgcctatcggcatccccgcgcccccaaaactcctattttttcttagaaaatggcccaaaatcgcaaaatttggtaatttgatgaaaaactgttctcagcggcgcgccaaaactcttatttctccttagaaaaattatataaaaatcacaaaatttgatcattttttagtgaaatctgtcaacaaattttaatcaaattttcaaaaattttcccggcggcgcctgcctgccccctcttcccaaaaagtttttttggaaaaagcgcgcctcaaaaaagcgttttattgctttttaaatttggaataaaattttaaaaaatgatttttgctttatgattttaactattaaaaagttgtagaacaaatttcgcatttcgcctttctcatattttagcttttcgcatttcgctttttttcatttcgcttttttttcagtttcgcaaatttcgctttttatttttcaatttggcccatccctgctgtatagtgatcgggtcaccctaaaatacactgaaaattgggaattttttgaaaaaaattcttaaggggttaggaaaatttttcagcaaaaatgagtaggcctgtcagaaagagcataaaatgctctacaatatgcaaaagggctctatgacgtatatccgctaatttatgggcatttaatttcggtttcgatcattctactgtaaaatgcatagatttattgtcttttgcatattgtagagcatttacattctttctgacaggccactcatttttacagaaaaactttcccaaccccctagggtttttttcgaaaatttccccgatttttagtgtgtgttctggggtgtctcggtcaccatgaaaagatctgatagtttcttaaaagaataaattttttgtaattagagaccgcaaaaaaggcactataataggcaacaaaaaattgaaaaaaaggcatgaaaggcacggaaatgccgaaaattcttcctttttgttttatctctctctccccattcttgccgttatattttttgccgggccttaaggaaaaatttgcgggacgatattcccgtctttttcctgctcccgtaaaaccccgtccgaacgaaaaagacgggatttccgggctctccccacgggaatcccatttcggctctactttttgtggattaattaatccatttctgccaatttttagtccaacagtcgccccctttgatgacttttggtacccaaaactgccagccctaagcaattagtcttttttcggttctctgccggcacaaacgaaggccatgaataactgaaaacaagattaaattaatattaaattgtacgaatacaattcgtttaaacctttcaaatgaactgcgattgtaaattccatgccgggacaattctcaacaaaagcctattgattcacattgaaaatctttggcatttttgccaatttttacccgttttgttttgaaacttttgttggattgccaaatattctaagatgcgctgactcatggaaaaccccttaaatttacaacattcatttccaatggttttcatcgaaaagatttccattttttagttttggtaattttagaacatatttgaacaaggtcgcagctcttgttgacattaatcggacaaagtctccgccttttattttgtgacatcttcctgaaccatcacaagagggggaggggcctgtctggtgccatgacgcccaatataccatcatttaattaaaaagtgccagcaataattcacgccaaatttaaacaatccgatcgcccccccccacacccgccgncccacaatcccttaccgtaaacaaaaaataattatcataacaaaaaagaaagaaagaaacgaacaaagagagaaatttgaaagggaaataatgtgcgtttgagtgggggagagatgggattgagccgggagagaatgcgttgcgagagaatttgcacggcatttgctggcgattgatgtgatttcggtgcgatgaatgcatgatgcacatggtcatctgctgttgttgctgtacccattctgtcgtgccgatgcgaatgcgctgccgccgttgttgttcagtgacggactgttgttactcgtcaccgacgcgtccaccggtcgctgctgccgttgcaaatgctgtccgatcatttcgcacagcttcgcccgcttgaaccgtcgcgcctcctcaattcccagctcgagcagctcgcgggcgcgcttccgtgacgacggcgaagtgctggccgccaccgcagcgacgcgttccgccagaagagaattcgctacaaagttgcaatgaatgaatgaatgaattgcatggattattatggaggaagagagaataccgtaaaatgagtgaaagtgaattaggttactgtaacgataagcaaaaaaccgaaaggatccaacaatgagacacagttcggcatctttttgtttaattacaatttgttttctcaaaatatttatgtatacagatttatttataccccacccctactgtctcgttctctttctgcaactttctttctctaactgtgacaatgtctcgttttctctacttgtacgctgtcccttacgctgactgtaacacactctctctcttttgtagactgtctcgttctcttcctgtattatcttctctgatcgaagcactctcgttctctgactgtaacacacattctctctctctgtaccatgtctcgttgtctgaccgtaacacactctctgttttttctttctccgacttttgtgtgcgctttttgtgaaagaaataactcaaaaataaaggaaatagaggctgaaagaagtgcacgaacaagggcctttctgtcgaacaatgtgtcgaatttggcgctgcttctccaaaagttggcactcggccagcgcaaacggagcggcaccgttggagggtggtggcaacgacgacgacgacggaggaggaggagacgccgctgccggagtgatttgtgcgatgccaaagcgcagttcggcctcttccggcactgcaattggtccttcgtccgctgccgttggtgctgctactgcttcgtccctccactgaattccgccgtcgctttcctcttcgtcttcctcgtccgccatgcgcaacggtgccaactcttcgtctaagaatcctgacgccgtctccgctggtggcggtgtgccgagggtgttggttgccaccgtgccgtcaatggtcgacgtccgcagcaaagcagtggtggtcggcatttcgttagactctaaaaaagggaaggtaattggggaataattgttgcaaatggatggattccaatgaatcggcccgatttatgcaaaaattatttctttccgctaattatttggtcatccccaatttatgaccattggctgttgatgttccttctgtcgtttccgcagttacagccaccgcttcgtctggacaagaagcaatcgaagaggagcgtcgacggcgcctattaaaaaaaaaagggaatttgtgccgaaatgttatggcaccactaaccgccacatggccaaacggtttgcgtcgattgggccgggccgtcgacggggcggtcggacgctaccggccgttgttgccatggtgccaacttcggacactgctcgacgccgtcgcccactcccaccgcttgaagcgccacctccgttggaggacgacgaagacggcacatcggaggagggcaatgccgaagtgctggcaccggcgttcatttcgcccacctaaaaggaaagcgccggcgagttaagcgttgcattccccagttgcaatttccgcacctcgtccgcaatgtacaggttgctcttcttgtccagcttgaatgggttgccgaacgcgtgcggtcgcgccgcctgcggctccaactcgcgctttgggcccagtccgatggcgatcagcgacttcacatagtcctcgtagacgcccattttgctgatcggcaagcaggccaaatcctcttaaattttccagaaatcaccggattcaaatcgacaggggtgggacaactcaccgacnatgttgcagtttgactttctgtcccgggggtccgccttggaacacgtgtacgtccgccccgcacccgttgccgctgctgcgcacttgctgctcgaagttgatccgcattttgtccagctgggcgcacagattggttcgtgggatgtcaaaagggtttttgaacagttgcgagggcggcacggcgacggatgccccaggcgatgaccaagccgaggacggacacgcggaggcggacggcacgaaaatggtcagatcagcaccgacgggaagcggcagcatttgctgcggggactgctgttgttgttgttgcggctgttgtggggacgggagaagaccgagcgcaggccgaaacgacggcaatggcaaagccttgccgagcagtgcacgcgcccgagacaatttgacctgtgcgggggggggggggttaaattggctaaatgaaattgtggcatggaaggaaggaatttgaatttggcaaaaatggaaagccaagtcaaatgcatgaaaaagtcacttacaaatgaggcggggttggcaccgaacaaattgacatttgtcggatcgctcagacacttttgcaccacaacgctggcaaactcaagttcctgatgagaaaagaatacaaattgcaacagaatggagcatagggaagagaatggtcggatggaaaacggacggagagaacaaaaagagagaccgaaccaatggagggaaaggcacaataagccataatttagcgacattttgaagagttaccgcatgacaaatgtaattttgttgtctgactaattagaccgacttggttaattattgcccccaattccgtggttcggaccaaaccgtccccttgcgtcctcctcctcccctcccccacctgatcgccttgctgcttcatcttcgcgtgatgggtgcccaagttgatgtagccgtaccgtttggtgttcgcctcctt

SEQ ID NO: 8466 - DNA, 872 bp, Heterodera glycines
tcattttacaaaaatgttttttttaaatttccaaaacttttttgaaattttcaaagccttcagttttttttttaaatttcagtcttcaatttttttttaattaaccccaccaatttggtcggctggcacagtgcagttgtagcgaacgtaacgaacaccgcccccttcgtagtcaacatcttttttgttcagcgccacatcaatgctgtacgtgctggcgtcgtggtggggacggagtgaggccttgggaaaaaaatttttaaaaattatataagtgggggggtatttccacctgttcatcaggccgatagcgtaccacgaacatcatgttggcatggataggctaaaaaatgaggttttttttgttgtaaaatttcactcggtgtttaatttagtaatcaaattatttccatcctttcccttacccgttgatagaaaccgatgaacaccttctcctgcattggagcaacataattgtccagaatttgcaaccagtgatgttcaaagccaaccttaaacgaacaaaaaaaaaatgaaaaaattataaaaaaagggggaaaagcactctgttattcttcgattaaaaggtttgtcggtatctttttttagaatagaaattgtattccaaatacacaattgaacgcttacgaagacaaattaccaaaaattttaatttaaaaatttttctaattacgacgaaatttttgatattttgaccgatcaaacgcttagggatattttttagttaattaattttattttttttaaaccttttttgctatagcctctcaatcaaaaatgaaaattttttgaaaaagcataacaattaggacaaataaaagagcaaaacaaacaattcatcgctaatcatt

SEQ ID NO: 8467 - DNA, 2234 bp, Heterodera glycines
ttgaaaatgtcactttttagcattcaaaaacagattgttaacaaataataatgcacctggtgtttgccctcggaccattggccaaactcctccatcacttcgatgagctcctcgcaaaagcgttcggacaaaaacggaaaatcgtacacatccggacaggccaacggcacatcagtgccgggtttgagcacagtgaaatattccgggtgaatgtaacgactttcccacagctgaaaaaaggggtggtggtgattcgaagttcaattttatttttttgtagtattagaagcaatataattttttaataaaatttttcttcggaaaaaattatagaaaaaaaataattatatttttatgaaaaaaagcattttgaaaaatatacgaattcttaatttaaatttaaaaaggctagatagttttttttctataactttctggattttttcagaattataaaaattaaaattaaaaaaatatgcccacttaacttcggcggatattttattaaaaaagcgtggaagtcggcaaaaaaaatttcattccaaaataaaattgttaaaataataatttttaatattttatttgtaagataacggttccaattcaaatattttttttcactttttcatatagttttcccacaaaattatgaaaaattattataatttcgtataaatgttagccgacctttttgttgttcggataatcgtacagctccaaattgagtcgcgcctcctttggcagttgtgaaaatgagtccgaattgaccaaaaagccaaaatattggatgcctttggacgaatccacaaacataaaatggcccttaaaatttgaaattaagaataaatttatttaaattccgatacattttcccggcaaaattgtgccatcgaaatgtcagcatcgacgccacccttcaaaacgaacgctttggatagcgcttcaaatttgcgttttgagacaaaaattgccgccccaatgaatggcacattccaaacatgggcaggcgatttgccgtggatgatgtccaaataatctgaaaaacggggaggaaaaaatgccatgaaaaattggacaaaatttctttggcataaaatgaatgtaccaaatgaacgcgcataataaccggactcggaaacagcaccccaaaagttactgtacacagtgtcgggacgaagcagaagaggggcaagaattgcactgaaaaaagatgaatcaacatttgtatttatcatggcaaaaaaagttttattttttgcaatttttttgaattacgaattagattttaaaaaattcttatgttaaaaaaagttaggttttttgatgaaacccacccattttccagaaaataatatcataaatcaaaattttttataaaaaaaagacgagtcattgcctcaccgtattaaatcgaaaattgtttaaattctcaattttataagatttttggcttataaattaaatagaaaaatgcaagccgaatagaaaaaaaaacggtaaaaaatacataaaatttatgttctctcatgtgaaacggaccgataattgttgtcttcgcgtgccttttggacaagaatgttgagtgtgtctggtgccgtaatgtgcgcttcggcgtcaatcaaaaacaaaaaatcggcatttatttcgattgcccattgcctaaaaaacgaaaaaaaaacacttttttttcaagtttaagaccgactcaggccccgttggaatttcaaaatttaacaagatttgttccaaaaatgctatacaattaaaaaggattccccccaaaaatttgggcttttctcctctcaaatttatttatattccaaatttcactgacactgcttccgctcgaattttgtgttcgcccattgccgtgccattcaaaatttgcacaatgccaaaatcgtcgttttttttgccgcttcgccgttttgcccatgtttcaatgtgttgtttgttgtacatttggttgttgtaaatgcgcagattgacacgactgtttttgtccggatattccaacaaagacaaacggtgcaaaaattcttcaatgtatggcgtcggcttcaacacaaatgcgacaattgcaatggcatcggcgggcgaagataacggcattccgagggccggcaaattcgaaaaaaagggaggggaaaaaaaattttgtgggtgcaaaatagggggaaaattgtcaagaggactataacaaaaaatttttcaaacatgtaaggcattaacaa

SEQ ID NO: 8468 - DNA, 3685 bp, Heterodera glycines
gataatgccaaatttaaaatggacaaataaggcaagactcaatttttgttttagacgaaattgaaaaaaaataaataaatcgaaaagtgttgggacaatgtccaaaaatttttataaaattgctcaccaatttataagaattaaacataatgtataaacatgtaatcaattcatcttctgtctcctccgaattaaaaaaaacaaatttttcaattaagtgaattttatttttccaatttaaaaaaaaaatttttgatttaaaaaaaacgaattttaaattattttgttgaaattgtaaaaaagaataaaaaaataagaaacccactcgattgtctgtgtcgagaaacactcgcgtataaaagagttggtcgtcatcaccgtcttgcaaattcaaatccccggcaatggccaacaatgcgtaaatttcgcgagcaaaaccgatgaacatgccggaattgaggtacctggatggagaatggaaacatatttgaattgggatatgaaattttgctacaattatgcaagtggacaaacatttcatttactccctgccgtttcccccgagaatttaattttttttttttcttaaaaacgttcaaatataaatttttcaaaaaaaaacagtggaattttttttataaaaaactttcgagaaaggggctgcaattgtaagaaaattgtttgggttaagcattttgacaatttggtttggcattcaaaaataaaaaactgcttgtgcgtggatcgggaaacactggaaaaatgtcccccagaaaatttgcggccctaaatttgcgcctgtgctcaaatttgaaagaaaaaaattattcaagaaaattataaacattattgttttttgtaattttaaatggtatttaggactgtaaaatggtggttttgaaaaattgatttgagcataaaaattaagcacatttccacgtttttttccaaaattttttgtgacacaaacctttcgccaaaaaccacgggcggatactgtggggcgagggtacggtccggccaacagaacggttcagcaccaaacacaatacgattgtccgggaaaagggacaaaaatttgcgaaggattatgtcggagtcggcattcaaaatgacatcataactgaaaaatgagggcaaaaatttttaaattatttatcgaaaagcgcaaaaaaaaaaatggaaaaactgacgcatcaatgaacagcaaaatcaaatccttccggtctttgaatggctccaaatattcacggagcagtcgaattttttgtgcaccaccctaaaaatgttttcaattttttgatacattactgtcaatgttatatcaacaatttgtgcatgcaattcatgcgttaaataaattttcggtttattatcgccttttggattttttttaattgaaaaatgggggggggcaataaaaagaggaaaatgtccaatttttaattgtacaagagcactctgatttcacagattgtggcaggtttgcatgtttaatgtgtgaattcaaattttgcctaatacaatagaattcaggacaggatcagcaagaacatgctcacaatccgtcattctttttgtttcataattctaataaatgactcatttttcaatgacaaaattttcaaattgttcgagtctgtctgtacagaatgtccattttttaatgctcaatggtcggcaatttttgttgtttcgaccaattttagaccaagtgtaaatttagaaaaaataaattgaattttcctttcgggctcgggatttgccagaaaaaaaaaattagtctcacctgttcgcgcatgtccccgccattccacggttcgcccatcccaaccacaaacaattggtgcccaaatgcatttgccgaccgattcagccgacacaatccgtccgtattttcagtggccaccgttacaattcgaagttcaaaattaacgtcttgtgccaaactgttgatgaacaatgatggcacaaccaaaattggcaagacaaaaaattttgcaatgggagaacgaataattttttgtaccgtgttttgttgggcgattctcagagccaaaaaatcgtcattatatcgacataaaaatcaaataaaatgaatagcttattaataaaattgaaaaacatttaaaaaagtaaaaaatacgagggcacaaaaattaacgaattagatgaaaaaaatattgtaattacgcgagctaattttctctaaaatctcaaaggaaaataaacaaaaaataagaatagaaaacagaaattgatcaaaatcggaaaactaattaagctgatcaggctgctgctgttgttgctgatcaagctcatacttcggttcttcgttgcgcatctccagcaatttcttgcttaaaatagtgaaatttatagggggaagaagtagaaaagttaattgaaaacaataaagttaggtattttagaaaaaaaatttagatttgccgaggcatatgggtctaggaaaaatccaggcatgtgtccaccaggtcaagggcagttaaaaaaatgaaaaacccaaaaaatgatggaagaggccataaatcaaccgaaaaatcagattaaaaattgattttttcgcaaattctgacaactaagagaaatatgaaaatagcgaaaaaaatcaaaatttttgaatttttttctttataacttttttatgaaattctttgtaatttttgtaaggctaaagagaattagatgagctttcgaatgacgacaccaagattgttggtaaatgaaagaatttacgctctgataaggtcctcttggtagaaaatttgtggcaacggttcgtcacgcttcggcattttgatgtcccattttggctcgtaatgcggtgaatgggcgacataagcgtcgaaccaaagcggccgttgttcccatttcaaatggccagcaatgatcaagccgagaatcctggaaagcaaatttaaatgtaaattttaaaaggctcttattcagtttgtcccccataaaaatttttttttaatttctaagtaaaaaagtcaaaatataggttttcggggtcgctgatcactgatcacgaatccgacatccatttagacccatttcgaaccccgaacccaaattcgaacaaaaagtctaaaactcaattgtcaacaaaatcaacatttattgctcaaaatcgattcaaatgcacgatttttccgtatgttggccgtcgccagcctcttcaatcaaaatctgctgtcttttgtccgttgctctgcattttctgtggcggaagcattttggggattataatgttgtgttttttaactttttgtctcaagtaagtgccatatatccatgtgaacgagtcccgtaaatctattgtttttcttattcgatatgaaaatcgtgcatttgaatcgattttgagcaataatgtgaattttgttgacaattgagtttttgacattattttttactaaataaaaatttttttttgtacgaaacgccaaattgaaacgttgtacgaaccggcttttgtacgaaactccattgtacgaactgctattgacccatcttcagacctgtgcttattaagtatttttaaaaacataattcaatgacgaaattgtccactgaccaattcgtttgatagtaaaaagttactttaatatttaagcaccatatatattgaatgaaagaattatcgctatttgagtttaaa

SEQ ID NO: 8469 - DNA, 4542 bp, Heterodera glycines
acgaacttttgcgggactttcaaaatttgaaaaatttaatctcaaaattctggcacagaaatctctcttcctatgtggctataagttgaagacccatggtcaaatcatatttgttaaggcctcccgttattatgaggaggcaaggaagtgattctaacagagaatagaatacttgaccgtaggactgatgtaggtggcatgccattctctaccacttgtctacttaaatttttgaatttaccatttgtatcatctaaacgtagaaatcgcttccaatttctgaagtcattctgaagcgatgcgtttccttttgagagagaacacaagaggaacgcagttattttaagggcgaacacccaaaaaaggatttcttaggttgaagattagtttttgcgaaatgaaatatattttttttctgctgtcattttctccattactttacatgtgcactattttgcggcgcgcttttttttcaaaaaacttggcaaagcgaggtgtccgggggaaaaaaattggatccttgccattcatggacgaatgcgagccttgaattagttgaattacctatattcgttatcagcgatcccaaaacgccaagtacatcgcagaaccgcttaagacgaacttttgcgggactttcaaaatttgaaaaatttaatctcaaaattctggcacagaaatctctcttcctatgtggctataagttgaagacccatggtcaaatcatatttgttaaggcctcccgttattatgaggaggcaaggaagtgattctaacagagaatagaatacttgaccgtaggactgatgtaggtggcatgctattctctaccacttgtctacttaaatttttgaattaccatttgtatcatctaaacgtagaaatcgcttccaatttttgaagtcattctgaagcgatgcgtttccttgtgagagagaacacaagaggaacgcagttgtacacatactgtagacccgacccccacattttgaggataattcctattaaatttgatgttatatttctcaataaagattatcacctttaatgctttatttcaaaaaataagtaatttacaataatatcttatcactcatttactttttatagcacgcaaatgaacaacgacttacttccggaacgagcccaagctggggcagttcaggacgacgacgcccggctgggctgcgtctcaaaagtttgcttttaaattttgtaaaacaggatattggcgtttgcaatggtagattttgttccgaaatatacatatatttttttgattatgtaaataaccaagagataatctgagatgttgactggcatttgctcaatcttgaaattgaatattttttaagatttaacattttattgcaaatattgctgtggaatgattgagttgtagcagcaatatgaaaggattcagaagcagggtcgacattgtcctcccccaaaaataaaaattttaaagaaaaggacaaattttttaaattttgaatgtttttcttatcataaaatcccaaaaattttcccgtcgacacttatcgacaccgccggagcccaatataatatttttatcgaaaaattgatctcgcatggcaaaagattgtcattttttggtgcaaaacctaacaaattcctgttttcgcctcggcgatcataatttaaaaaaacatactgaaaataattttagccccagaaaactctttgggtggggcctaatcgtgttaactcggtactagcaatatttgtaacaacaaaaaaacaatgattatattttctaaaaaattcgaattctggttagggattcgagatgagctaacagaatgacagatcgggcacttgtaatgttgagatacccatattttggtaaattgatgaaaatatatatacctattttcgacatttaaaggtaactcaatttatgaataactattttgatacaataaagttaaataagtgccaaaattggctatcaaaaagagtgccaaaattggctatcgtatgataaaaaacaaataaattgaaaaaaacagttaattggggggaaggtggcaatgggcatgactgggccctacgaattatgcaagtatgctgaggcggcaaccgcccatcaggtttccttctcctgctcgtcctgatcatcatcatcaccgttctcgttgtccaccaacagacccccatcagcgagtcagaggcgacggagtcttgagtctcgtcgtcctcctgctccaaactgtccgcgtcgggcctgtaggtaggagcatcttcggcggtggttgacgcttcagtcgacacgtccgctgccgccgcaaccgcccgcgcttcggttgcacgacgctcgtgctcacaactaggaattatatatatattatacctttatcggcattaggcgtttttaacttactcatcgtacatccaagtgctctttgcttgcgcagaagctcggtgataacttgggcaatagccccacgattttgctttgtgaaaggaattaaaattatcaaaacaaaatataaacattctcatatcccaatggggaattgaacccaaaggacagacaacgaaagaaagaaggcttaaccaccagacacatatatgtgtccttcattaacagaaatgaatttattaatttaatttttctcaaataaattatatattacggaaatctacgctgtttttggacccgtgtaataatgttatcccaaatttaaatctagtaaaatccagactgctatcgaaacaaccggcccctaccttttcagaaatttaaaaacattaaaaataaaaattttcccctatcttaatcctgtgacgcttaaataaatgttgatttatattacggatgccaataatacgcacatgaatattttttccaaatttatgtgcatatttgggaattttttcaaaaaatcttattacattaaaacggccccctctgttaaagactttttgacctctaaggatcgaaaaattttcattattttgggtattttcagcaaaaaatttaatagaaatggtaattggaagtttttgtattttttcttctaaaataattttacataacatatttagcgattcaagatattagcttaaatttaacgaatttgaagattttttggaaaatttagccctgaatttgaaaaaaatgtatgcacatattttgcaatttttaagcatatttattttatgtccatataattggcgtttatattcattataaaggttctattttttaaattttggattaaaaaattggttttttgaaattattgaagatgaaataatttaaaaagttttggatgaaatttacttccttgctagatattgcaccgataactaaaaaaaatcagtttttttctcgactcggtaccagttatttcgcaagcaactcttcttcttatcttttctatgtaaatttatatatgttatttaattttttctcattcttttaaaataataaaatttaaatctaattttccgatgtataatttaccgtttgtagtgattttcgatctctttaatcgttgcacattatcttcaatacatatataaattgaatttttaattaaaggactttgcccatgactgttaatcgctcattgacaaaaatggggacactttgatcaaatcgtaggaatttttgcaaattgaattgcaaatccgtgaaatttcaacttggtaagcagtaatttagttcaaaaaagtttatggctaattaattcatttgattattctccattaattttaattgcatttttcggcagaatgaatttcgacatttgggacaatttcgattgagtgccaattgaacattgccttaattaacgtaattattgttaattaagcaattgatggacccgagcaaaggctttcattgaaaaaagtgttggttttttatgagaaatcgatgggagcgaacttagaagcgaaactgttcacatcaaaggatttccgtggaaatatgggcacaaatagaaaagaaagataaaggcactgattgggctttttcctttgtgcattgcttcagaggaaggtgctattaatgttaatttaaatgataatcaatttcacttttgtgatcagagaaaacattacacttatcactgatgtccaaaattctctatcactagaaatattttgccaatttttttttattgatcagcattttgttaagcaggggcctttcagaattacgaacaatagagacaaacaaaataattgtcgtaaaacttatcattttctcgcgaaattcttgccgggaattaggcgtttctcgttcgtaattgtgatcgaactcaatgacaaacgcaaaatttcagacgacaaatatttaaggtacgctcaacccctaattgagttcactgatcaagaatccgattcaagttttcattttctgtgctttgtttatgatttttcatcaattatttagtataatgaaatttttcagattacacacaacattttaaaacagaaaataaataataatttttttttaaattataaatgaatacgcttcaaattcaagaaaagcaaaagagtcaa

SEQ ID NO: 8470 - DNA, 1530 bp, Heterodera glycines
gaaatatgatcgataagatgatctttcaccatatttttggggggtaaaatttgtaagtttttgaaaaccagcatcatctatcagcactggcggacgaataaattcactttaaatttaaaaaatgatatttaaaatctcaaaaataaactgattttgtgcggaaaaatatgctaaactggttttttgtttttagcacggtaaataaaaattgttagaaattaaactgaaaaaaaattggaacgaagagaaatatttctcttaattacccatacaaaactttttatgttcggcttaaatgcccgccccttccattcacctcaattgccataaactcggagaaaccccaggggttctctttttcggagcaaaatgactgatcaaatgttttgctggtgccattgtaatgggtgttttcctcattttttggaacaacacataatgttgcagaacaagtacagctccaattcgagccttaacatcaaaaacaacacataatgttgcagaacaagtacagctccaattcgagccttaacatcaaaataactaaattattagtttatgaaaaacttttttttccaccaaaatatctatcagagaaatttaagtaaaatattcgagaaatatacaaaaaaagtcaaaaataaaaatacattactaaatatttttgcgaaacctctaaatatttgtaaagaaaatgatttatagttattatttttcgacaaatttgaataaaatagaaaaccagtatgtatttaaaaatgttttttatagctattccattgaaattttttaaagaaataaaaattttcatttgctcttccatgacccaccataatcgtccgcgttgcattggatgaaaaatcccatgtatttggtgccagattttgattgaagttgtgcaaagattttccactggaatccatcaatgtaaatggcatcactgtattttcggcttaattccttctgccgtgcaaattcagaaaatttttcaattttcaacgtaagttttcccgtggatttggcggatcgttcatggacgggaaacggcaagggataaagggtggacaaaacagcggacgaatggtaaagtagcacactgactaactcatcactggtcaacacgccggacgaaactgttgaaagcgtaaaaattacagcccggacgggagcggaaccccgccaggggttttccagggatccaaatcccgacttttttttttttgaaaaaacgggatgccgaaaccggggtcggagttccaaatcccgacaaaatcgatttcaatcacgcgatcgagattcaatcccgacaaactcagtattaaaatctcgtggatctgaattcaaatccccgcaaaagcggaatttccggtaatcctaccccggccatggattccttcgcattttaggtttgcatgatctttatttttattagtttgtcatacttttttatagtaccaaatgtcttaccaatcaattccaaaaaatacttatgaatgatcggaaaccgaattttgtacagtccgggccaag

SEQ ID NO: 8471 - DNA, 1441 bp, Heterodera glycines
  unsure (1)..(1441): unsure at all n locations
tgcgattttctgcttgttttacgttttgagtcggggctatatgaattngggtttttatcattgctcatccccaattgagctaaaaaaaaattttgattaaatagttcaccaaggtgatcagctgatcactctttcttggtctctgactgagtttaataaagttttagtagccccaggggatttgttggtcatctccaacaattgtcaaacaaacatatgaacactgctctccaattaaaaggatcataatacacgaaatcaacatccatatttgattaaataaacccaggcaaattgaattttaatcgtttggtttttaatcgcattaattttctttgcctattttaattttttaaatataaaaatgtaacctttgaaacataattctgttggaggataaattttctccatttttcacttttcaatatcgtcccattgtttgccagccaaaatgaaaagctttcgaagtaacaaattttcctcagtttttctccgatgctctcctcgcccaattcttcctcggatttgtccctttttgtgtgtattaatcccaaattggccaattccgtcgccgcttcgcttacaatccaaattaattgcctttcattttcggcatttaaatttgacacaaatttgagcagattggccaccacaatttcgttgtttgctttatacgtttcgatgttgaatttttgcttttcctcctctgaaattggctcatccgaagttcgaatcaaaagcagaaaatactttttcaacaatttgtacatattcttttcctctgaaaaccaaaattactctctaaaatgagtccctttttagggtggctaaaattgagtaacaaaaaactttttctattcaatataaaaatagtatttttaaagaattggagagatctttcaaacgcttcccttaccgtctgagtacagtacaccaaggcaaagttctttgataattgaaaacactgctgaattttcatgcaattctccacctattctctccgtgtcaatgtaaatttcttaaaaaagtaaaataattctaattatgtgaaatataaaaataaaaatttaatggccgagactctcgacctgcccattacccttcatggcgttgttattcagcaaaaataccaaaaacaaaaaatacacctttcaatttttgccgaaattggttgaccaatagcaatggcttcagactttgttcgtgcattgcaaaaacgcttttcaaaatgctcttttggccatctgtggacgaaccaccgtaatcaccaaaaaagaatgtttttttgcctaaaaaattaattcgccaaattttgttcattcgttgcaaaaattctagacggatttcttctaagatttccaaattcgtaaatgtgttggccgaatccatacaaatttccattttcgcataattttcttccatgtctttctgttcgctttct

SEQ ID NO: 8472 - DNA, 4432 bp, Heterodera glycines
taaataaataaatatagtatcctccatttgtattaccatatataatacgcgagattgtccagcaaaaactgtgactgtttccaatggggagcagctgtatcgaagtcgaacaatgagatgtaatttaccatttggagttgcattatttcaacagtgttcagccctaaaatggcaataaaaaaattaaaaaatatttttatttgtatttttaaattgggatttaaatgactcaattaagcgacaaattgggcaaattaactccggcagaattctcaaaaaaaagaagcccaaaggacagttaaatgagtgcagtatgccgtgctggtgacataagccactgatcggtcgagtggttactgtcacagtaagtcgttgtcttaagtattcactttttgttcccaattactcacttcgtctgagtatctctttcagttgcgggtacttttgcgtcagttgtccaaatgaaacgaatttttccatttgttttgggcacagaaattttttgagtcggtacaaagcgccggtgctttcaaaaagcgaattttgcaaatgctgcgccaaaaattccgcgtagaatctgagcacattttgggcatgttcatcgaccagttccatccgtgcaaaaagaatctttaaatggctttcgttgtgccaaactttcgcattttcctccacccgttggattttttcgtgcgcctccaacattggcattttgttgtacaaaagtgccaatttttgccaaaagtcaaagatttccacaatgtcacttatgtctttaactttgttctccttgaaaaggacagaaaacatatttatgttttcctcccatttctcttcaatttctttaaaaatgttgctgatttttgcatccgtcttatgcaaatattttcgttgcagtaaataaaatttttggaatatttcaaaaattcgagaaaaataaatgcgcgaggaaattcgaaattcgccaatgcccgcaacaattgtctcttttgataaaatgagcaaatattcgtccgcccatttcgcattagtcaccaaatcttgagaagtaaaatattaaataaaacaaaataataatactattatcaatttttaaatattgtgcgattattcgaaaaattgttttataattttgagagcgctttgattgccatggaccaaaagctttttaagttttgttttaaattctctgggtttttattctttttagtttttattttgtttctattgtaagttaaaattaattatttattttatgcaaacaattttcgaaaagcataaaattttgttgttttgtgcctttttggcatttttagtgcctactgtccgctctcttttcatcaaatggatttcccattaccgaatgccattaaaaatggatgccgattttcaatttgactcagcaaaatgggtccaattagctgttcaaccgcacttttaaattcaagaattgccttttcattattctcaatgcgcatttttcgtaattggaatgcaacatttgactcaaacttcagtttcttattttcaaaaaaatttgaattgtcatacctaagaaaaatagctttatatttattatcagggctgtccgtccaaaatatgcaaatgcatatttttttcctggattctacgtagtcggatataggaaaaacattttcttttgggttacttagggtggaacataatttttgatacccaaattttttccaatttttaaaaattcataactccgttatttctgcgcctatttaaatgattctttttttattttgttcttcatggtgtcctcttttatatctcttactatcgtttcactttttatttgattgatagatttttctgccttttttcccgaccatgccaaaattgaaaattggcccactaatttttctcgaattttttatggtcaaaaaccaaagctgatataacaaaatcttagtttttctatacaatttagaccagtagaatccgaatatggccttaaatgggacctatcttttcaacctgagcttgtactgctccaactccatgcatgaagttcgagctgtacaggtttgttgcgatcccagagaccaaatctaagaccatattcgaactcaacatacccgatttaccttgtttaattaaatccagaatttccaaaaccacttttaaaacattatgttacttggtggtcttgaaaaatgccgtttttggagaccactttcagtctcggctctccaataattcaatttttgtaattaaaattttatatttttgtgttcttatagtcctaactttgctctatttaatcactaattctctggctctgtatctcttttatttttctttaaatcagccatcaaaaatacctaactctaaaatgaccatttttacttacttaactctaactccctaactccctttccattggtattgattgatctcttgccagaataatggcaacatattattgataataatggcgggtattttgaatcatgattgtgttttgttgaaattaaaaaaaaattttattaaaaaaaatttgggtatcaaaaattatgttccaccctaagtatttgcatataaaagtcgggacttttatttgcatatttaggtttttatgcatatttcatgcatattttgccattttttgtgcatattttaagatgttttgcatattttgccatttttcgtcaaatttttccgatttgcccttggggaaaaatttgattatccttaaattaaatataaatctgaatggatgcgcgagtggatcaacactaataagcttcactgacgaaaatgttgagaaatttttgatttgcaattgcaaaaataaccgataaaatttatgaggaataaaattttttaattaatttacacccctaatttcaagttttttgtgcatatttggtgtatattttacgatttttgttcatatttggtgcgtatttcacgattttatttgcatatttttgcaatttttcgtgtatatttttgacagccctgtttattataaaaaatagtataaatatttcttatattttattttaattaaaaataatataataataatttcttctttttaaaagtccttgccaatgccatttcccctcattttgccaattctctccctttttttggccttccattagtgccatcagtgctttgaaatgcgttgcgctttttgtgtcctccaaatatttttttattatttcaatttgttcgtcgctaccaattccattctcatcatttttagacaacatttgctcaatttgttcacagtcaatcattttttgggccgtattttcactctccaaaatcattcgtccaaattcttcgcctaatatttccgctaaaataaaaatgtgtttaaatgaaaatgggcacttcaatttcaggggcaatgcctttatgcataataattctttgccttttctttttaaaataaaaaattaggaaaaataaataaatgatgacagactgaaaaatggactaattctcttaacattttttgtatgccgaaagcgctttaaaaatgcaatgagttattaattacccaaaaaaatcttcaaatgatgccaaaatttccataatttgcattttccgatttccgccgtccattcgtccgttttttcaattctttccgccaactcagaaaattccactcttttttcttcaattaatttttgttgaacatttgttaatttcttgtttttcatcgaaacaaatatttgatgagaaacgtcgtaaaaaagtgccaattccaattttaatttcatttcctttttcggcagctcattttctaaggctttctgttcatttggcaaattcaaaagctgagaataaagcgcgtcaatttctttgattgttaaaactaaaataatttaggaattttgtttaaaaattggggttaaacaaaccaaaactaatgcaattggcacgatcaaatgaaaaaaggacgaaaaaggcgaaaattgcgcttgtcaaatgacaaaaaggcattaatttaaattcttcaataaaacgcataacaaatatatatatatttttaatgaattaaaatgaatgaattatttgaaaaagaatacattaataattaattttattgcagcatttaaaaacgaaacaagcggaaggaagtgctgggagaagcttattcttcatttgctaacaacgaaaatcaaatgaaatgcacgtgatttggttaaaaaataatatgtttcctgttttgttggacattttgatattttattggtgagattgatttaatgttgcgcagtatttgtctccctttttcccacttttaagtgccacgtctgtcttcaacatttttataaagacgttttcgcgtgagtgcctgtttaggacagaaattggtcggatgtgtgccgaacatccattttgacctatttcgcatcccgaacccgaattcgaacaatttttt

SEQ ID NO: 8473 - DNA, 897 bp, Heterodera glycines
gctcaaacaaaaaatgtttttttttgctttcaggcgacatctattaagcattttgcataaattatcagccataacacattgaaaagagatacaaaactatcaatgtctactttcaaattaggaaatttctcgtttttttgtgtcgtggtctcggttttcataggtcaatctcaattctcgagttatttgttctctaattaccccccccccccccctctccttccgcttattttttttttatcattgatgtctgtctctacactaaagcaagcattagaaaagcagacagagaaaatagagcaatagtgtgagcacgaatgagacaaataaggaaaagaaagaaagtaaacagaaaatagaaggcaaataaggaaataggagaatgaagaaatagtgtggcatgcattcctagataaagaaacaaagataaaagaaagatgagagaaattagaaaagggataacggagaaataaaagagacagatagaaagaaatagacaacgaggaaaagatgaaaataaaagaaaatagtgtagagaagagaaatgagatggaaacagaaatgtggaacagtggaaggcaggcattttactctctctgtcaatccctcccatttcattcctcccccccccccatacaaatccacaacacaatgcaaaccattcaaatacacttaccaaatcgataaaaatgtaacaaaatggatataaaaagggaatatttagacttccaagcttggaattgtcccataaatttaaatttcaatatgtattaaaacaaaattaaaaaccataaatggatgtatatatcaatcaaagagcagtgcaagaataatttttgctgctaattcctcgtaaattcatttttttttaatttttccctttttttgtttattttg

SEQ ID NO: 8474 - DNA, 1935 bp, Heterodera glycines
  unsure (1)..(1935): unsure at all n locations
agtaagagtagacgacggacggacgaccctcgaccccacaaaaaaatnaattaggactcgctaccgaaaatngattattaattattataaataattaatacacgacacaaaacgatgacgaatggatgtgctgagtcatccaatccccttttccctgtcccatagaagagaaaataaggggcaaacgacgaacgaatataatcatcctcctcatccatcaccattcttcattcattccattcattcttcggccgcccgttttcttatgcttacattcactcatccatccgtgtctatttgtttattgtacatgtgatcgatcagtggtggtatttttctccctcctcatactactcgacaccattctctcaccactatatgtgttgatcagtgatgatcatattgattgatcggggcgggggcaaaaagattacacagacaaatttttttgtcgcccattattttcctcatttgttgcaaacaaaatgcattagcattagctatcaatctatttaatgggaggggatgataagcaatctctcgtcgatctcgaagaatgaaaatctcgattttgtttttttctaactacaaattcgactgtgatctctaattgtagggtgagaattcggctaactaattaaccgggcggggggggggtcatttacaatcgtttaattgatccagttttacaccgtgagaggtatttaacactcccaatcgaatcaatgtgtcaccaccactgactaaggtattaatcgctacttaatgaccttgctgtcagagagggtacttaacacctctaattgaaccaacacggtaattaaactcaaatgttttatgtttaattgacccaatttcgtcccggcggaaacacacaccctaaagcacattttatgtgcaccattcaattaataaaacatggcctggagcccaaaattagcgcgcgcacacttcaaacacaactttcagaactagcaaaaacaaaaaaacaatttcctcctgtgaacattttgccacccgttcttcaacacatttccacattcattaattcacaacatcattctccgccaatgaaaaattgttgttgccaaaatgccatcgtcgtcgccgccgtcgcctggtgagtcccatcggtgcccggtatgtcgccgaacactgcagcgctcgtacactttgcggggcctcctctgggcaatggtgtgcttcccgtgcgggatgtactgctgcatgaggaggctgaggaggcgttgcaccgcttgtgaaagcgatgtgagtgcgacggaagggcgggcgccaggggatttaatgcaattttacgtagaaaaaactaggattcggtattaaaccttgtcctggattccatgaaaaacaggttgccaaaaatggcttggacctctggatccaggcctgggtccggacaaagccaaaaaaataggcaaaatttttttttaatttccctacgtttgtgcaggccataaaaattctgaaaaacgatctttttgttatacaatacagttaccatagtatacataattgtgtatgagaaacatttcctctcccattggcaggtgatcatctcggacggcggtgtgccaaccgttgcccaaacgtacaacacatttgccgagttcaaatggcaatttccaccttcggcacttcgcagaaaaagtgccaaccccaagcatgacaaggaccatgatgatgacgatggtgatgatcaacatcacggcagcaatgatcaggagacggaaatccaacggctgtgccctgctacccgtccgtccaatcaacagcagcagtgatcagcagaaatgcatgngtatgatgacattactgtacacacaaactgatcagagtctataatgatgactcactcgctcactttttcatacccatcaaaaaactcagccaatcaatcagtcaccctccttttat

SEQ ID NO: 8475 - DNA, 3270 bp, Heterodera glycines
  unsure (1)..(3270): unsure at all n locations
ccctaaaatttaaaagtataaactttttgaaaaaaattttcgttgcctgctctggtacaataccgtgcacagtgtgtacatgcgtgccacattntcgtccaatcggcgtcgaataatggcactagtctccaggctggcgtccagttcggcgtgcgaatcgccgacatttttgtctaaaattttttccaagagatatatttttcaagaaatttgtgctgcaaaagcatataggataaaactcgtgcaccctaaaacgtcgcgggacaaaaagttgacggaaaacaaaaatcaaaaaattacatttttcatgaattttaactctaaagaaattactaaatttcagaaaaaaagaaaacccattgaaaaatctttgttttgtttttgtttccttgaaattttcattttcttaataaatttttttcgaattgaataaggaccgaaaactttttgaaaattcattgaattcattcgtttttacgccgatgttaatgtcctgctccgggtaaaactatatacaattttcgtttttgaattttttgtcccacttggccactcccagctgttgcaacagtttgccattctcctccagtgcccattctctgctttcctgcagctgatcaatggctgattgcagctcaactctctaaaaaaaaaagattggaattttcaaaaacgaattttttgtgagattgagtcatgagtgtcgccagaacataatttcagcttttttcattaaagccatgaaattctcaaaaacatggagactctaatgccaggaatcgggtggtccactaaaatgccgacctccgtctcggcttggcgctgattttgcgccagtgcggcttccaattcgcgaattttcgcctgtgctgccgctttggccttcaaaatgagcaccgacgagggcaacggctcctttaaaaatgtcggtacactgcattaattactcctttttcctaaaattttcaaaaaaaaaaaatttttttttccgaccccaacagtggtggtgttgctgatagcctgctgctgtttctccatgtcggaaatggtccgtctcagctgatcattctcggccaaaagttcgtcaacatcggccacaccaccagcagcgcctccactgtcattttttggtgacgaccctttgtcatcaataagcggcggcggagtgccaatccggcgaaccttgacagaggggcacagggcacattaattgatttgtagagccaagagccgggaatttggggaaaaggcttggactggaaatccaggcaaaagaagacttacaatccagaaatccaggatcgtcatttccaggttccgttcattacaaaattcccgggctttattatttattttgctttttgaaattttattaaaaaaatttgtaaataaatttataaggaattattttttgttggtgaattcctttaaaaaaatttaaaaaaagaaattttataatttttgttaaactcgtttgattttttgtcgatagatcataaaaaaaatcagaaaaactcgaagcattcagcctccattttgattacaaacggctaaaaaacaaaatctttcaaaaactcctcctattctcgggacaatttctcgtaatccacccctaaaatttccggaattttcgaattaacaacaaatttatgaaattccacatttaccatgccgtccacatgttggtggtgccgtctttgttgttccaccaattgctgttgctggtgttcttgcggtcccagtcgcgtgccataatcgtcgccggtgccgaaaaaggtcacttttttcctgccgccactggcacttttcttgcggcccggcaccgaatcaccgccgccgatgtccatggcacccaacaaaaggttgtcagttgttgtgtacgaagagcagccgtcctcgccggttgggtccagcggtgggggcgacccattggcaccgcatgaaattttattcaaatttaaaaaatggtattttaaaatttatctcgttacaggcctgtagttaggggggagagaatttttcgaaaaccgggaattttgagaaattttagtaataaaaccaaaattttcttggcctgatgcttgtctcttaccaatggagagcgggaagggtgtcagaaatttttaaaaaatggccaattttcgtgccaaaattttttgatttttttgaattttttaccaaattcatggcaaattctagggtctgcaaccaattatagggccccctgactcgcactaaccggcacgcaacagttgcgggatggcacgtcctggcgatgcgttgcgctgcgggctgcgcgcccttgatgaacagccgtcacgctttgttggcatcgcccagcgcgaggcgccggccgctgcacgtgcgccgcctgcagcgccgctgtcgtcggtcgtggtgccaacatctttacgctcgcgtggtggcgcgtccaactcctgcaaccgtttgccgagcagcaacacagcaagctgtttagagcgtgccacctgcagtaaggaggggaggggaggtggctaaaaaaggcaaagcaacaataaaattttcgtaattttttttaggaaaatttttatggcaggttttataaaactttgcaaattcccctttaaagcattaaaatttgcgcccgattttcaaagccaatggagagaaaaaaaaatcccaaacgaaaattcgtaaattttcagaattcaaggcgtgtctaactctcgaaccaaataaaaaattgcaagacatttttaaccgattttaaatgaacggcttaaattaaaaatgaatgtttggaaatgctgatgttttataaaatcgattttaaaaaaattgattaaattttaaaaattccgtttcggactggcaatgagaaacctggccttgctcactgaacgcctcctgcaagtcgatgatgcgccgttcgcgttccattataatctaaaaattaaaaaaatcatttttagtaagaatttaatctaaacatttaaaaatgacttaaaaacgggtaaatcactgtatcagaaattaaaaacaaaaaaaaattttttagtatagaattcccatgcccatgataaacaaagaccaattgtaaactaaattttacttcgacaaaaatgaaaacattttgttgctgaaaaaaattgcatttagaattgggttttctcggacatttgcgccccagacatttgcgcttatgtcctaaatcggagtaaaacttaagtttttttcaatccctgataaaaagaacagctttaaagaagcgattagaagtgattaatg

SEQ ID NO: 8476 - DNA, 1656 bp, Heterodera glycines
tattatttccaattcgggcgcgcttctccttttgttggcacttgcccattgcttagcgaatgaagggtctttttgacgaggatacttttgttgaggatgactctgaagacgttttggctccacagtccgacattgtttgttgttaccattttcggcgctttacaaaatagcgcctttgaattttatcaaaaaattaaagggggacccttttgttttgcgagatttttttgtgataaaaatcgtaaaaattaagttctctggggttttgggttcgcggtcacacatttgacacaccattttggcaattttcgattcccgaactcgacaaaagttcaaaaattatttgctttttgataaaattcatagaggcgctatttcgtaatagcgccccattttctcttcaacaaactctaataacttaactttgtttgtttagctgtccagcaaaaaatacgttccgccgacttatcagacgccaatcatcgaccaaaatgctttctttttcttggaattatttgaggaaacgcaaagcattggcaaaaaatggctgaaatcggagtccaaaaaggaaggcgctgaggaggcaatttccaaatacaacggttaatttttgcatcgttttgtttgtttcgttgttcgcgcaaatgtttatcactatcgaaattttgaccaacgattttcaaaaattggattggggtcgaaaattcagaattttctttacctcaaatttaaattactatcttaaaaaggcttatttttttacgttttgttaaggcgaatggcaaattgggtcgcccactgatgaaattttggccaatgattatggactcattgtacggactaaggctcgacaccacgccatttctgcgcgacttcgaaagcctttcaaattcgatgggagtgcattggtcgtccagtgagtggaagacttttgttttgttatcgcatgaacaatttgtttgacagatacgaagtgaaatatgagcagggtcaagaatgtggcggtggttatttgaaactgttgcgggacgacgcctcaaaggatttgaagcagttcaacgacaaaacaccctatgtgatcatgttcggtaggtcaaaataattttgttgcagcaaagcttaataaaaaaatcatgtttcaggaccagacaagtgcggtatgacaagcaaagtgagttggggaggggtaggggttgagtaaatccattacgtaaaagggaggaatatggttgtttatgcgattctcactcccgtgaaacatctcaaatttcacaacccgagaatatttttttgctcgctcttcacttaaatttccataggaaccttattcttaagaaatttaaaaaacagagaattagtggtcgatacgcaatgttgtacaaattatttcgttaaatcgaacaccactttcaggttcacctgattctgaagcacaaaaacccgaagaacggaacaatcagtgtatgctttttccatcgattgccttttcacaatttctgtttgaatgaatgtttttttttttgcctttttctcaggaacaccatgctatacagcctaacaaatcgctcaggaattactttgaggacaaaaataatcatctttaccctcttgagacccgacccgacaacgcattaaagcctgtctggagaccacacg

SEQ ID NO: 8477 - DNA, 3871 bp, Heterodera glycines
tgtggcaagaaaaatgtgccttttgttcaactgtttcccgccagcttcttttttccttaccacggttgcccgtttgacaaagtgcgactccatgttgaaggcgatgttttccgggcgaatggaggtaccgtggaatcatttttcgtcctaacgatgcaaattgtttttcgaaattgcctattttaaacatcgtccttgttcaattcaaccccaatttgatgtgatcgtccgtttttcaggttcgtcgtgacacggacggctatgtgctgatcgaccgatgtggcaaacattttgggctcattttgaactttttgcgcgaggggacgctgccgttgcccgactgtcggacggaagtgctcgaaattctcattgaggccaaatactatctgctgcaggtgttgtcgtacgaaagctaaaaaatgctcaagattaaaaaataaatttaaacaaaatattaaaaaaaataaaattttttgatgaaaaatctttactggtcggacagagtcagattgaatcttggaaaacgctacaatttaatggactttgatcctttttggtcataaaatactcgacatttctttcatagtttatttttaattagaatgaagcatttagttgcaaaattagcaccaaaaaataaattaaaacttttttgcatttaaacaacaggaattggtggacctttgctattcgtcccttaaagcccttcatcatgaccaactcgtgtccacgcttggcatttgccgtgtccctgtagttgtgtccaaaaagcaagttgaacaaattgtgcagagttgtgctggaaaggtgatgaattgaatgaaaaagccacatttatttatgcaatgcaacttttagccggtcatcgagctgttgatgaaccgtcaaaacaacaaatactcctacaatgcgtcgtccgacgagaacttcttgcgcaaccaggaactgttcgacaaactgatccttcgcttcaacaaccgcgtgctcttcatcaaaagtcactccattcacaatgccaagaagaacttatgttatcaaatccaaaaacttatttgcagatattggcattggcagttcggagatttgccaatggaccttctatgggaagacaaatcgtaaaatcgaagttggtgtcaaagacggggcacccttttgggaagcttcttttttgtgtgggtgggtgttccgggtttccgacttttgttcgtacttacgaatttgaactatttttttcttccttatattttttgttcagatttgttgcacttcgattgtgtacgccacggataaaaagcaaacaaaagtatgatactgtcttattgaggcactgagttaacgataaaaaaatattcaaaatctttattttttatttgatattccatcgctttgtgttcaggtggagtttccggaagcgcgtatttatgaggaagcactgaacgtactgctgacctttgatcagggcgaactgtctggtggtgccggagtttgcacgcgttgccggggtcaaaatgacgacaactttttggtcgaatttcccgccgagctcggccaaactggcgcaaaaacgctgtcctcggcccaacaacaggaaaacacagcacttggcggtggtgcagttggttcggtgatgtgcaacggacgaattgactggcgattggtgcccgccctcccccgcccatcttttatttatattttgttgaatttaaggaacaattggcactcaacagcaccctttttgcgacatcatccaccaccaccaacagtggcacttccgccgatgaaggggcatattctggccaccaaatgaggagaaaaggagcggcggcttccatggcaataggcgagacgacttcgacggcggcgagcagtgcaactgtgacgactactggaggcggtggtggtccttcctcaactgtgccgatgagccacaggggaacggcgggacaacggaaaatgagcgaatgcgacgattgacggaagaaaacccaaagacattccaattgcaattttttccaattattgtgtagctcccctttccctaagcttggcagtaactttattgtacagaaactccaaaaaagagaaaacaaaattttacttggactaattaaagaaaaaagggggtggggacaacacaatgacatgacggagtgacgatgaaagagttgcaacaacaacaatcagatgaatcgatcgtaaaagaatttattgcttcaaaaatgctcatcattcattccctgttcccttctccacatcagtcctgacgacgagggcgactacgacggaccggctgctgcggcgaggccttaggcatggacgaggacgggccctcctcatggtcatcatcaacttcgacagcatccgcctcctgctgctgcacatcgtccgtggcaggctgagacgccttacgaacacggcgggagggactgcgcgaccgggacggcgactcactcttcttcgacgaggacgactgggaagccgaagcgtgcacatcatttttggcctcatctgtgattatatttgaggtttgatcaaactcaaaataccagacaattttgaattaattactttacgaaataactctaatttatacctaatgaaaataaatgcattcaaatgaactattgtaccatagaggataaaaactgtcagagtccgatactttcgaatagcacagtaactcattctttacctggacgaaggtcggttggcctctcttcctccccctcttcttcctcgccttggtcaaggccctcaaactgaaaacaaagggaaattgatgaaatttctcatttcattccgatgtcaaaaaccttaatttttacaaaaaaaacgtcatcaccttctcgtcatcttcggttggttcgtcagttttcttacgatgcattggacgcgcttttcgattgaagcagaagatgcaaatcagaatgattgggaccagcacagcgaaaatgacaacaacccaaagcctggaggaaaggattaaatttggtcgatattttaactcgcaattcgaaagccaaactttaaaaaatcccacacccacagaaaataagccctaattccatcccattatcttacaattaattaaacccccgcttctgaccatggcttttcctccaaagtgtccattgccgaacgaagggcactcttcgcgtcgcccgtgctgctcaggaacagcttctcctgctcatgtttcaggtcgaaagtctgtgtggccaactcgcggacactgtccacgtcgttggccaacgcaatgttatcgaacacaatttgttcgctaaaagcacgagaaaagtcgaatttacatgatcccaaatgcccaccaacctcatggtccaaagctcaatgccgacagctccgattggctcgagttgtcggtaggggtccgcctcaaaataggccggattgtcaatgagacgagccgaccaaacgcccttgtagttcgggtttttgatcatcggatgagtccatttgccctatcatttgaaacaatcaatgaaaattaaccatcaggtgcaaaatgtgcttggccaaccttgtaaagtgggttcggtttcattggtcttttccagggcccacaacccgaacggtccttgcactccgggttaggcaccttcctggcctcccattcgccgtccatctgtaaaacaaagctaaaactcaattctcatttgaagtccacctcgtcgtcccaatctgccggtttttgagccgacggatccgcgacgagcgcctccgcctcttccaaccaatcgtccggctttaccgcgtcggtgtcctcaacttctttgggttgattttcatcccagtcctcgggtttctttgcttccggatccgcaatctgttctcgattatcccaatcggccgg

SEQ ID NO: 8478 - DNA, 1914 bp, Heterodera glycines
  unsure (1)..(1914): unsure at all n locations
aatttgaaccttttttaaaaaaatttttcgatttataaactgctgatgatgagaaagccgccggcgtttttgatcagcgggaatgcgcagcaaataaatgtcaaaatgaattatacattaaacacagtcatgaactatattattattttttgtanatccatctttttttgatttgacggattttggaggttttaaatgaaaaagtaaattcaaaatgtgtcgagttttgtgtttttgagtccaattaattgatggttttgagtccaattaattatgtaattacctactcaattaatttcctttttcctttcatttttttaccaaaattcaaatattttatctccccgttttatcttatgacgccattttagtctccttttatctgttttcctccatttttatcacattttctcatcgtttgtctgctgccgcttggatcgttcccatttattttcgtcaaatttatttttattatttttattagtttttaaaaattttattttttcgccaaaatgctctcagaacaaaaataaacaaatcatcccattgcaaaacagcattcaaagcttttgctgattactaatttaaatttaatctttttctaaaaaaaatatttgcgcctatcaaaaattttcaattattttttagtatttttaattcgcaaaatgttttactgaatattaaaaaaatatttgtaataattttatttacgtaatttatgcatgttgtatcagcagagctgggagggatcacatccggcacttttttatgaaaatttgccaaattccggcatttttacatttcaaaaatatgccttaaagagaaaaatgactatttgaccctcaaattgaacttttgaataaaattgacacaaaaagatctaacttttggtaattctcaacaagaatttttcgaatttttgcaggtgtccgcctgacccaccattcttcagaaattcacaaataaatataaaattttggtgtttttcaaatttttatttttagaaaaataaattgaaaatccgcattccgacagtttttttgtcgcttctctgcggttactgccactgctatttgtattcctatttattcaattctttcgtttaaattctttttatatctttgtaattatttaataattataaataaaattttaaaatatttgaaaatgaaaacataatttttgcgcactaattagccttatttatggaaatgaattttcgggttaatagcaaccaattaaaacccatttacataattaactaattaggtaattagtaattggtgccaagttaattaaataggtaattagataattataaccacaatttttggctatcatggggcaggcagtgaattttcacattttcttatcaaaaagctaacaaaagctcaatagtgcagctgttttcacattatttattatttttcccttttttctcttccgatcatttgatcagtgccccaacgctatttctctgttcctctctctcactctgcattttgcactctatttctccccctcattttctctgacgatctctcatttttccttattcctccccactctattttatcgaaatttcattgataagaacgccattcaacaaatgctttttggttgaggtcagccctcagaaaaaccgctcaaaactggactcattactgaacaattcacaaaatttggctgattacggggcaatgcgtgctctgtgcgaaggcctccgaaagtccgtcaaagttcacccctccggcaaaaatgaaacgtaaattttttaattaatttttgacattttttgagtgcattttccggtgctttaatttgcttcatcgttcagtcaatagatcacatgccgacatgagtttataattaacatattggcttttagttgatctaagactttcgaccgatcta

SEQ ID NO: 8479 - DNA, 1785 bp, Heterodera glycines
  unsure (1)..(1785): unsure at all n locations
aaaaatatgtatttcatatattagacaaagaatgagctctntaatgtnttcnaagttnctcataatattgttaatggaaaagattaattataatgcacagtntaaaattaattatgtaattaatcgactctaattagctctataatttttattaggacatatagagaattaacaatttttaattggttatttttagaaaacaatttattataaaatgattttttccataaaaatttgaaaaaatatttcttcagctttgtgcccattttgaattggctgccggcataccaatggcgtcaatgtttgctggccgatgccatcggcggtttgaccgttggcattatgcacgtgccgcagggtaattaattaattaaaaataataatttaaattaattaaaataaatttaaaggcattgcctatgcattgctcgcccgtcttcaccccgtggtcggtctttacacctcctttttccccccgttgttctacatgcttttcggcacttctcggcacaattcgattggtaaaattatttgtacattataatttaatttttaaaattaatttcgaattttctattttttaatttaatttttcgtattaattttcggctcttttgccgtcgtttctctgatggccggcatggcggtggaacagttctcttccaatgacactttcttcagtggcggtgacgaggacaaagtgaaaaataaatattttgaaattattttaattaataataattgtattatttaatgaattatttcacaataaaaaaatatttcaaaagatttaattttatttattaaagaaatttcagataaaattgaagtttaacatttttttatttcctgttttccctggccgattttttctaaggaatttattatattttcatataaaatttaaataaaatttctttttccattttttcaattttaattaaaattttaatttttttttaattttccgttcgatttgcgcctctccgacgcgtcgtcgcccgtccgcgtcgcctccaccctcgcgttcaccgtgggccttctccaattgctgatgggccttctccgactggaactgatcaccacttacttttctgatcaggtgcggccgatcacttctcttttttttgtcaaagttttaaattaatataattgtttattatttcattaataaaaaacaatttaagcaaaaataacatattatctttgaccaggagattttcaacacattgttttcaatcattttatcccccgcccctctccgaaatgcaaaattggattttttagtaaaaatcgacagttgaaaatttgtatcagtttgaactttttttcttaaactttaccaataattcttattaattttcggccattttttaaaacgctttacaattaattttgttattttaaatattttaaccttttctttttttttaattattttttggcataattactggctaattaattgcaactacatcttccaattacatttaattggtcccattttctctctaattggtcccatgttctcgctaattgtcaggtggtcgccggcttcaccaccggtgcctcaatgcacgtgttcgtggcccagctcagcgatttgtttggcctccgatccgtcggtttgccgcatcgcaacggagccgggtaccttttcatggggaaaagtttaaaaaaaacaaatttaaatataaaaacattttttatttatttaaatttttaaaaatttttttcagaagctttacgacaccgccagcaacattcacagggcaaatgccatca

SEQ ID NO: 8480 - DNA, 4094 bp, Heterodera glycines
  unsure (1)..(4094): unsure at all n locations
cagtcagtgttcggtacacatcaaagccgatcatttgattgatcagaatgaaccaatcaaatctgatttgacacattctcggcattgaccagactgattaaatatgaattatttgacggtctcatcgctcagggaaactgatcacccatgctaatctaattagcctaaatttcaattgaattactgctcccgtctgatctgaatgacccgaactgacctgatcgactttgatcaaacatgcttagagctagtcattggcgatcagtttcttctgctgatccaaagtccctggtcgggtgtctgatcaatgcttattgatcaattcattgaatccatctgatccatgccctggcataatttgttttgcttttcatccaatcgtgctcatttatttgaccatgacctggtctgatcaggggctgacctgatcggacttggccaaaagcgatttccatctcagtctgcccaccccaattttgcccaatttgtcgctggtcccttcgctgctgcccgacgcacttggcatttccgcggttgttatcgctgtgcacatttcgttggccaaaatgttcgccaaaaagatggcctaccgagtggacgcgggacaggtgaaagagaatttagagaagaaaaactcaaaaaacaccccaaaaaatgtctccgagtgatcggatcaaattttgatcaaaattcatcgaccacaaaacatttgatcgattgtcaggaaatcaatagcgagtaaattttcgattgcctggccataaaatcgaaaatcaagttatttttggcaaatttatcgcaaaacctcttgtaaattttgaaatttgtgccaattaaaatttattggcggtgcctttaggaactgtacgcgttgggcttctgcgcatcgctttcctccttcttcccggtgtacccggtgtcctgctcactgggccgaacgctggtcaatgtggaggccggcaccaaaacgcaggcaaaaaattgggggaaataaaattaatataaattaattaaatggaggaaaagagtttaaaaaagtaattaaaacaatttttaattatttaaatatgttgtgccgtgtgttcagttctcaacattgttctcttctctgctgttgggtgcaattattctgtacattggccaatggcttcggacattgccaatggtttggccaacatttttcaatttaatttaaatttaaatattttattaatttaagtcattatacattattcattatttttaaatctttacttatttaaacatttcgatcatctaaactattcgattaataaaaattaatttaattttaaatattaattttgattaaattttaattattaatttttttattaattcattttctttttttccgccagtgcgttctgtccgccgttattatcgtcgcgctgaagggaatgttcaaaaaaatcaccgacctcaaaacgctgtggccattgtccaaaattgattttgtatgacgccactttaattaactaattaattgatttcaaattttaaatgccctcaggccatttggttggtcagcttttgtgccaccgtttgttgggatgtcaccgaaggcctcgcagtttccatcatttttgcgctgatgacaaccggtaataaatattccaatgtttgtgcccccccattttggcatttttgtaaatttatattttcattttttatttttttatttcgttagttttccgtacccaatggccccgctggcatttcttggccaatttgtcgggcaccaacgattttcgcgactcagaacgctaccagacagtctgcacatatccggtgtgagaaataaaacattttcaaaaatagtgattttttatttccattttaattaataataaaataattttaattcatttttagggcatttgcatttttcgcttcgattcgccgcttctcttcacaaatgtggacaattttaaagtgcattttgaataccaataaaataattaaaagaatattaaaaacatatttcttaattattttgcttatttattttaatttcaaagataaagctgattaatttaattttatttctcaatttttttcctataattaaaaattcatatattttccttccccaaggaatccattcacaaggcattccatcgttggaacaatgggcgccgtcggcacggtaaaacggatacattttcaaatcaaaaatgccataaattttaatgatacaaaaattgcataaatttaattaacttcattccatttcaaaatttaatattataattaaaatattaaacaatgattacatttttattaggaaatttcaaatgtcaattatttaattatccctaataagaattattattatttcattcttttttaattaatttgattataaactcatctcaattattgaattaaatcatttttatttattttttgtttttattaaatttaaatgccattaagagccaaaaatgaacgcggtcgaaaacggcactttgtcgctgggcatacaaattgggcattacgcggaacagcaacaaaagcttgcccagcaccagcagcattcattgccctctccgccaccgccgacaattgttgtgcacggcacgggcgacgacgccgaagggcaaaaatgggaggacgacgacgacggcacaattccgaccaaaatgggggttggcgatggtcccaaaatgccaattggtacaacgacgaagacagcattggcaccgcaagacaacaaaaatgngcacgacgaaaaggaagcggaagatgcagcagaaccttgaggatgaggaaggcaccaaaaggctcgacgatgccgagggcaataatgacaacgacaattaattggatgcacacaatggcattggcattgccggtgggcaaattaaattaaatggaccaaagcgaatgattaattagcaaattgatgaatcagactaattagtcagttggactaaatcagactaaaatattttattttaaaaatgttttaagttttcggagaaggcgtcgtccattttcttccgccatttcatcatcgactgttccggcttcaccttcgtcgactgtatgggcgtaaatgcactcaaagaggtgcatattttgttctattacaattacactaatggaccctaattaagctaattagggtaattattaaaaaagtgattaatagccgaaaaaacaacaacagattttcaccgaaatgcgagagcaaagagttcttgtgtattttgcagcagcgaaaggtgggcggcatttacttattaaaataaattgtcgaaacaaaatgccaaagtaattcagccccggtgcgcgacctgttcgaaaagtgcggctttttccgctacgtgcaaaagcacaacttttacccgacaattcgcgacgcggtggcaatcgcgcggaagcggcgaaatgcgtaagcggaaaaataaataaataattaaaatgtgaaataatggtaaaggagggagagggaagcttaaaaataatgaaacattccactaataaataattgttattttaaaagatgaaaaaaattcgttaatttaattattattttaaaataaattaatccatccaatttttattgaattttaataaaattaaatttcttattctgacaatagttttttttataaaattatgatcagggcaaagtatgcaaatgcatatttttttcctggcttctccatgctctaaatagtaggaaaaacattttcttttttgtgtttgcgtataaaaatcgggacttttatttacatatttcgagattttggtgcatattttgccattttttgtgcatatttttcgatttttttccatatttggccattttagtcaaatattttccgatttaaatatctcttaagaaaattttgacaaacaatagatgagatttaataccgaaaaccttgagaaatttttgatttgcgattgcaaaaacaaccgataaaatttatgaggaatacaatttttttttaattgaattttaataaaattaaattttttaatctgacaataatttttttaaaataaattatgcttataaatttgtttattgaacattttctaatttaaataaaaaaatttca

SEQ ID NO: 8481 - DNA, 2025 bp, Heterodera glycines
cagttggtagtgctacttttaaagaatatattaatatattttttaaaatttttttctttaactccaattttcatctctaatttttcactcagacctccattcttaccagtgcttgtttttcccggttcccggttgccctaccgggaccgggacctcggaggaccgggaattcctggcccggtcccggtcccggcgcactctactaaaaatcctgaaatatgcaataaaatatgtgccaaaaaatgctgaaatgtatgctaaaaaaaaattgccaaaatatgtgttaaaattggaaaatccattgtctttattcataaaaatcccagaaagatctcacattctttatcattttcgcaccacaattgaaaatcaattcatttaaatcccttttttctgataaaaatatttgccaaaatatgccaaaaatgttcggaaatattttaggcttctttcgcgtgtaaaatctgttggttaacccacatttgcgcctatgtccaaaatcggcttcaaatttacatttttttaatcctagatggactgaatggtcctttcgtcgtgtccgcctttctaaaaaaccaaaatttgcaccaaaaattaaacggattcgacttccggaattttatttggactctaaaatgcatcccatctgcttactccctaagatatactaaaattcaaaaatttttacatcataggaagttaaaggtaaaactcgtccggtgggactcgaacccacggaaaaatttcaacgcagaaatgcgttttttgagctcctttcttcaaaacaatcgagcaaaaaaaaagttaaatcactaaaagttgcatccctagtgatcagaaaataaaaaacaaaaaggatactttggttttgaaaaatgtaaatttatagtttgtaactctcaccaacaatggatcattttccaaacaaccggaagatttcccttttaatgttccaaacaatgtttacttaggaaaatgtcaattagcaataaaaattgaatactctccgaaaagttttggaatcgggttttccaaaaaaaatatattcaaaaatttcattaattttcaccaattttacgaatttgaggagggagagaattacattaattatcaataagtttcaaaaaagttatgatcaaaaatgtatgtctgaaaaatggttccttgggtacttttggccatactttgcttaaacttgacggacgaaatcttttcaaatttttgaggctaatagagaacccttagggttatcgaatgatatcaagaattaaaatttagttgctcttaaacaaagttatggctaattttttgttataattttcatttgatggtttttatataaacgactcagcacagcaaaaaatcataattttaaatttttttaatgtatagtaatgaccttgggggtttttgggtccctgatcactaatctttcgattatttgaccaattcgattttctaatctaaatttgaacaaaaaatcaaatcgaaaaattccatttttcaatttttgtagaaattggtcaaaatatgtcagattcgtgatcagcgacagcgccgattttttgaatatacgaagtttgcttccgtttctaccagctttgcttaacagagggaggataagtggggatattgtccatgtaatttccaactttaatcgtgtccagcaggactcaaacgaactttttgcttacagttggtacatgtaaaaagttggccatttgtgccccaaggcagacatgacaaatatttggagaaatctaggacgaaatcataaaacagtcaatgcctcaatcttggcacagttttacagcagcggatgggtggacgtgttggccacggatattcgcttggtcttctccatgggcatgctccactcgggcgaacatcccagctgcgcatgttcagctgcacagcgaacagtgagtttatttggcacgggggcatccgtttttggcccatataaaagtgccattttccactccttccctccccatggtttcagttggtcacatcgaagtcgaa

SEQ ID NO: 8482 - DNA, 3941 bp, Heterodera glycines
cttgggtacttttggccatactttgcttaaacttgactcttgaaatcttttcaaatttttgaggctaatagagaacccttagggttatcgaatgatatcaagaattaaaatttagttgctcttaaacaaagttatggctaattttttgttataattttcatttgatgtttttatataaacgactcagcacagcaaaaaatcataaatttaaatttttttaatgtatagtaatgaaaatttgttccttgggggtttttgggtccctgatcactaatctttcgattatttgaccaattcgattttctaatctaaatttgaacaaaaaatcaaatcgaaaaattccatttttcaatttttgtagaaattggtcaaaatatgtcagattcgtgatcagcgacagcgccgattttttgaatatacgaagtttgcttccgtttctaccagctttgcttaacagagggaggataagtggggatattgtccatgtaatttccaactttaatcgtgtccagcaggactcaaacgaactttttgcttacagttggtacatgtaaaaagttggccatttgtgccccaaggcagacatgacaaatatttggagaaatctaggacgaaatcataaaacagtcaatgcctcaatcttggcacagttttacagcagcggatgggtggacgtgttggccacggatattcgcttggtcttctccatgggcatgctccactcgggcgaacatccccagctgcgcatgttcagctgcacagcgaacagtgagtttatttggcaacggtggcatccgtttttggcccaataaaaaagtgccatttttccactccttccctcccattgttttcagttggtcacatcgaagtcgaaattggcggcggagtggtaagcacagacagaagggctggggacatttttgattagtgatcggaattcgcgaattttactttttatctttttggctcggggttcgcgatcaagcagtgcttgcaatttccgttttaaattttcgttttatatagccttgctattaatatattttggtggcactatttctcctctcatacggcagattccatggcttgtcaatttgtttcgcgctgagctcggcgaaacgctgcgccaaacactgcacaatcaggcaattatgaacacattttgttattaattacctgcgaatcggattggcgattaaatgcaaactaattagtttctgatttaaatggagcttaatctgattagagacatgagactgaatgcgtgcgatttgtccagagaccagtgatcataggtcccttttgatcattgtttcagctttgtcccatcctccaaaataacatcgtcagccaactgaacgccatgttggcctctttcccgacactgcttcaaattggggacggactgttcttgaaatatgcgttcaccagtgatgcgcaagtgaacaggtgaaaagagcggaagagagagaattattggataattgaaaatgatcagtgaaattttgctgaatttttgagtttgatcgaagagaatggagtctgataagtcataaaacggccttgttacccctcaaaatttccatgtgtttttttggaactgatctaaccgaatctcgagattcaaatctcattgatcagaatcaccactttttctgggctaatctataagcgtaattttgagtctgaaattcttgcccaacagatcaatagaaattttgtgaacgatcattcgataaggtataataatgcccacaaaattaatttatatttggtgaatggcttgcttaaaactgattattaataaatagtgaccagaagaacactgcttttcaacggaatgctcaaaaattttaatcggttttttataaagtcgcttggtaatttggtcgactccaaaattggattcagattttaccagaatcctcgttcattatacataaaaaatttttatgaatctctgattctgatcggacaccaaaagcattttcactctaaccctgctcaaatgttgatcaccggcgatcggtttaccaatcaataagttcatttccttttccccctcgccccattttagttcatttctccaaacattcgcgcttgtagaggtgtacttgcaacacaacaatgacaacagttcggtgcccatgcggtccccgtgtcccttctccgcccccgtccctctaccgatgccgttgcccgccaatgtgccaatggcatcgctgtggttggaccgcacagtgattgactgtttgctccgatcgcttcaggacgcaaaatacgtccaatttgtcattgggccgacctttgacggcggacacttcgccaaattcttgagcacaaggtaagtaagtaaaagcagcagcagagagcagaggaaagagagagaagcgatcagtgcaattaatgtggcaaaaccgaattgtggcacttaggaaaagcattggattagcgttaggggcttttgggattaaatgacattttaccgactgatgaggttcaaaaaagaggctgtaattctcactcaggaaaagttgcaaatccaatgtccttcttttcaacaagttcagtttaatagttataaattttgatcggcttttcagttgctttataattagaaataatcactaattagtgattttctgttccatttggtaaaatttaagcgattgattttggctttggttcgtcaattccgatagactcattacaagtgatttccaaggatatttgcccttgttactaattggtcaactaattagtgaatggccgggctttatcctcctttattccccgctgtgttagctgtgccttcttccaactgtgcattggccgcttcttccccccgttggaacggcttcatcccaaccagcacgtcgacctgcgcttccatcccaccaatttatcctccgttttgttcctcccctccgaatcggcgctgaacatcacttcgcgtctgttcatggacatgcacatttcaccatggataaaacacgcgggccaagtgcttgcccggctggagatgaacatcactggcacggcattgccacggctggaggacgggcgggtgaagggcgagatggacagagaaatcaaagtgggcaacaatttcatttctgttggtcaaattttggcatttttcgatcaattttgcactcagactgactcaatcctgcacattttaaaaaacaaaaattgatttaaaatagattaagtctcatttttatgtctcggtcttctcgggaaataacaatctcgagcatgatcactacagcaaaactggtcctactgtttgatatactgtccgagttccgaaaaatttctgccttttttcacaggtccactttgctgagttgaacagctccattggcaatttttcgcagaagtttctggacacattcgaccttctgttcaaggtcagaggctctgtttcgccacggacatttgaccccccccccccccgcccggacattccgtctcagtttacggacattccgtcttggtttagcccattctgcaaattgcactcaaatcggcactccgcgtcggtttcccattgccaacggtggagggcataaaaatgggcaacggcagtgctttgacggtgctggagcgggggctgcgagtggatgccgaactgatctatgcggagcggaatggcacggcacaaatgctgcagaagaaagagaaagcgcgggattcggcatttgtcgcgagtgatcacactgatcagtattgactcaacaaaacctttgcaattttaaattgatggctcaatcgaatcaaaaatcagaaataaagtgtgtccaataattataaaggcacccaaaattttttcgggtccgaggagggccatgatcatcatcattgtctggcttttttccatgcttgtttgcttcaaactttggacaacacagcgattccttacctctccatctctg

SEQ ID NO: 8483 - DNA, 2406 bp, Heterodera glycines
ctcaaaattacgacttttttggaatttcatgttataacttttttggtaattgtctaatcgcgaagcaatagcttagaaatatcttctaaacatgttaagctttcgattgataccaagcttgctgaatttggttaacaacaaaaaaagttataacccaaaaacttgggctggcgccaaaacgtcggcgccaaaacgatacggacccataatgcgcaccggtgccacggttatagtaattccttggccgtatacctatttcatgccagaaaccacagatttgctgaaaatattagttttacatgtagagagcttcaagaatgaaaaatcctagatctgggttccatgttggacctttacttaaattttctggacaaaaataaaaggaaattccatgtcaatggaaaaatcaaaaccttgatccatgctaagctctagttcatatagatagagctcgacattttgaaaaaagcctgtacttgtacctatacctgtatttcccgaatggcctgtacctgtattttctgtacaaaagtacaggaaaatacaggttgaaaaacttgcctgtacctggatccaggaaaaacacaggcctggatcctggtacaggtcgagctctacatataggtagtttttaattttgctgtcatcatttcaagataaaaaaacggactaaaaaaacattttcttaattcgccctcgaatgtctctttcttcgatccaccatatgtcacgtctgaaactttggatgaccccagtgcgcgacaatcactttgggttggatgacctcaaaattttcaacagcgatggttactctgaaaatgccccattttctcgtgagagcagccgaaactcttccgcggatggcagcatcgcatgcaacgcggatgctgctgatgcggtcattaacatgaaaattggcgtctggaaaccattggtccaattttttgaattttaatatgcggaatcttaggcataattttgaacgtccgggaatttatttttctgattaacaattttgtatttagcctcagaaaacttgtggcttctgctacatacaatacaagcgtcactgtcagcgactcggagttgcatttccgcgtgtcaccgataagggcttctgggtcggacacaccaccaaagacgagcacggggatgtcatgtaggagagaccgtattggaatttgattctatggtttaatacagtaacgctttatcattcaacattttgtttttcaaattttctttatttttcgtttgttttgcagctgtccggagttgcgcaagctgaagtgtccgttgtgttacgcttctggaaagaaggcgcacacattgaaattctgtccattgaacagcatcaaagggaggcgtgacgaagcataaagtttcgtagaacaactaccaaaataacttgtttgtcggattgtttttgtattgaattttgttatcaccttgcttattgttagtttgtccaccattgctattctgttggtttgtcatttttcgtttttgaatattccttcctattgccttcctttgcctcttttctctctcagctctctctcacttctctttctttgtagttttatatcatacgaacccattcatattgaaaaagtaaagtgccaccgaatcaatcttttcgtttgatgagtttttggagtatcatttctcaagcattactaaatattcaaataaaaatattatgcgaaatcagaatttagcatctgccgatgacttccgtttgtgaacagcttgaaattgtgtccgagatggtcaagacgtgttctgaggatgtgagggatgtgtggccaacatcctccgaaaattacacgaagagtaagccgtttttttcaattacctttatagcatacggttgttgttcacctgttgcatgtccagctgaatccatcagccgcggagcgtttggaattgtgcgctttgccgaagcttctgacccgactttcagcgttgacggacttgagaataggagttgcatcatcaaaacaatttaccttcgtcgccgcttggaggccattttagcagaggcatcggcaacgaatgtgagtgttgggcattatccaaaattgcttattcactgattgggttgttctaaggaatttgattttgttgatgaacaacaaccagcaaaagtttcccgtttctatcgtcgcttggtcatggagttgttcatcctttgccggtattattcgttttccttttttcattttgtttaacttttgaaattgagttgccgacatgcgaacattatgcatttgcatgcccttttcatctcaaattgggacctccatttggttttgcctcgtttgtatgtgcttgagaatctgataacgctgtacaaacggcgacgccaatccgaagtattctccccgtaaaaaattgcaaaaa

SEQ ID NO: 8484 - DNA, 4074 bp, Heterodera glycines
  unsure (1)..(4074): unsure at all n locations
aaattgcttattcactgattgggttgttctaaggccctttattgtgcagacgaacaacaaccagcaaaaggnncccgcttctatcgncgcnnggncacggagnngnncagccnnngccggnannangcgnnngccgnnnngcannnngnnnaacgngngaaanngagnngccgacacgcgaacagaangcannngcaagcccnnnncancncaaanngggaccnccannnggnnnngccncganagaacgggcangagaagcnganaacgcngnacaaacggcgacgccaagccgaagaaaacaccccgnaaaaaattgcaaaaatgttttgtgtattttagccaatgccaatttcaataattgcgaaaattttgcgtcaactttgtttggcactcgaatatttgcagcaaattggaatttctcaccggtaatttttttgtattttttgttagtttttgaatatgtttgatttattactttccgtttctgctttttctttttaaagggctgtccaacccgacaatatcttcctcacccgtggtggcacagtaaaactcggacattttgcccaatcgcgggccatttttgaagaatctgtcgacgaagaactccactgttgcaaatcgcccgtggggagggaggaatttatgagttttgagaaggtaatcagtattcaatatgtcttatttcatggaaagcatttcgctaccgtatccttgtttacagtaacttgtaacacttacagcagcacaacctgttctttggcacaacgttggccgattgtgtcggctattccttctccgctgacctttggtccttgggcgtgttggttttggcaatggtctcctattatccggatgaacgcagtcaaaagttgcacaagaattttgcgatggcaatgcaccaggagcagatgccattcatttggttgaccgttgacatgctggtgagacgaattgacagatgacatggcaaaatcgaattactctcctattttccatttagcaactccgttctcggctggtcaaaagtggtggcgaagaattgaagctgttcctcagcgactatttgctcactgtgtccccaaaacggcgcgccaccgctgccacactgccgaagacggcggagatgaggcggtggtgcctaacgacggtggaagaagatgccaaattcttacgccggcacttcattgacgaagtggactttgccaaccatctgaaattggagaatgacgcaccaaattatgacctactcgaaacggtgtgaattcggtcccaaaaatgagcattaattttaatcatttgacttttaacaacagaaggacattccggcggaattctattgggacgaaacgtggaaaaagttggaagaaacggaattggtcatgcagatgttcatccttccgaactacacatcagaacagtggagttttaaatgctttctgtaaaaactctgtttttcagacaccgcattaaattttcggatcccgagccgctctttcgcattctttacacggaaattcttatgggacgaattgaaatcactgaccttctgacagtggattattggattaaacagaccatttttgattttgtgcaaaggaattgcgccaatccaacggtggaaaagaaaatatgcaatgacttaaatggcgttttacgtaagttttttgactagaaagcttcaacaaatatatgcagttttgctcaattttttttaaagatagtcatgtcttttagggcgtcgtataatgctgcataagtcgcgttcaatcgaagtcgaaattcgtacgtcttccccagtgcgacatcgactgcacttctcctcaatatcgccctaattgataagtgacgccttggatcaactgattcaataataatatcactatttgactgactaataatttttgatagtaatttgggtcgtttttaacctttttgtatttttaaataaaataaccaaacagagccaatcataaagccccatgagggaattccgtaaagttaagctttatgcctttttccaaacattctgctaattgtaagttaaacattttcggtagattttcggatttatcacaaaggggtccttttcgggaaaatttattcgtgtagtttacaaggctaaaaacgactggcatcccttacatatattatatttcttaataatttgttttcattttacaattattgttatcaatttatttgaattgacgaaaaaaataatgatttgattgatcatttgcttttcgtgtcacatatttcatttgtatatttttatattacattttacaatatctgttgttatattcttatttttactttccaaaggtaacaaaactaattttgccgatgcaatccgattcggtccaattggtcgaatgttcttcgtcgtctcacaatcggccgccttcgcctgctgacattcgatggcccctttctgcaaaatcggctcagatgttcaaatggcattttctgttcctgtttttgactttctctgttgttttactctgctgggttttgtatgtcaatgcttgcgacgattttatgttccaatttaaaaatgattcgtcggagcattcttcaggtgaacacatcaattttgattatgcattgtttatttagggtatttatcgtttttataccaccctttcaccctcttcttttcctttaaattatgaacattttttttatctcagatgattatgccttcccgacaaaaccggtcattctgatgtggacttcggtgtttggacaaaattcgctcaaattaggcccggactgcccattctttgaccagtgctttttcacctatcaacgtcgcgcattggcccacgcggacgccgtcctctatcacgttccggacatcaaatggacttcagacgaacgcccggactttccggaacaaatgttgctgccggccaatgtgaggaacgtttttctcacccaagagaatccgagtgcgctaagagattatcaccacgcggaaaagctcagaaaggcaggtaaattacccggtttttaaaatcgtgttcattatttctcgcttcttttcaagctcccaactttttccattggacattgacttatttgcgttcctccgattttgtgatgccttacggtggcttttggatttctcccgaggaaacacttcgtctcggcttttcggtttttcattaaaaaaaattattttacaattcgaattatatttgcagcaaaaaattgttttactaaagtaaataaaattcatttgatgtcaaaactacacttttgcatttcggtttttcgcccgtccgtctgcccactgatcgcactaccattttgaaggacaaaattgtgaggggcgccgtttggtttgtgtccaattgtcgcaccgagtcaaaccgtgaattggcggtggacgcactttccaagtgacttaatcatactgattttttttattgtctatagtattcaaattcggaaaggatttgctatatttatacggttttctgaattgttctaggaaattcgaatttccttaatcatttttgggccgattccgcttattttgttgtacctaaatccaagccaaatttaggcatatgctcataaacattggcggcaaatgtgccaaaactgagcagggcaaaaaactttgtccacgcaatgcgacttcctgtgaccacgtgttttccgcccattactttttcatcgctgccgaaaatgacatttgcaagtgcgcaattggacaaacaaaaactaaaaacagaaaaattaaatttataaaaatttccagggattatgtgactgaaaagtattgggaccgttaccgtcttccctccgtgccgatgtatgagaaaacacatttatgaagggtttggtgagaattgcagacaaattatgccagatcagattataaaaaataaaaccgacaatgccatcccggattcaacatcgctcccaataattcggtcattggcatggaccgattcgactcacccaaagcaatggctgaccacctcaactttctgatggacaatcctgccgaatacctcaaatatttcgaatgtggagaacaaaattggtccattg

SEQ ID NO: 8485 - DNA, 1572 bp, Heterodera glycines
  unsure (1)..(1572): unsure at all n locations
cgggttcggggttcaaacaaagtcaaaaaagatcaaattcgtgctcagcgcatcaaataacccctanaaatatgttttttttttggatttttattctttttttttgtgggaccaataatcttcacaattgccaatgaaaatgatgcaagcaaatgaatggggggagagaagggaggcaggcaacacaaataatgccacaaaaaaaaagcgtcttttcccccttgtctctctgccccctctcccccttttccgttgtctcttcggcagagtgggaatcaaatcatcattttgccaaaataaaatctgtaaaaatcagcattttgaaaaattaaaaaacaacaacaaatatagttacttcggagaaaacttggatttgaattgaatttctataattttttgtggggtttacctataggtctttttaacttaagaatgtcctcatctcttgacgattcatttgttttgcctcgtgataattgtgacacggtatcttttaatcgaaaaattgtggctgaattaacaaataaccctaataaacttaattttgtgactttatgtcgtatcgcattttctgacttcccgcacttcgtttttaatgatttggacgaatgattcgcactttgtttctaagattcgtctggttgacgttttacatttgaaactcaacgccaacgcaaagcgtggcctcatttaccgtgtgagatgcttcgacagtttggcactcactcataaaaatgctggtaattaatattatgtttacctaaatgtttgtttggtaatagttaagatggttcggtgggggtcgattgggccccgccgattgggccccgccggttgggccccgccgattgggccccggtacgattgggccccgccgattgggccccgccgattgggccccatggggcagtcacttttttagtcgacttttggtttactctcactaaagaaaaattattacctatgtatatttttaaataaaaaatggtttttttaagcgttaactttgttgcacattaattaaaatgtatttttttcatgttgggttcgaacctggacctccgaaaaataggaatttaacccactgatccaccgttttttaattttccccacttcaccaccttccctgaaggggaaaacacagtcaaaattttgatttttgaggtccaataacttttctatttggcttcaacacaccgctaacattaaaaattcagagtagccggccctgcactatcaaatagttatgatacatgcattttctgacacagttctgacggttcccttgttagatttggcccaagctataagcttaattttgtaaaaaaaatgtattgtacgaactgctattgtacgagttattgcctttgtaagaatggatagaatttcatacttaataaatttatgaataatttaatttttttaaaacatgtgaaacgaaaaaaaagtggctgccccatggggcccaatcggcggggcccaatcgtaccggggcccaatcggcggggcccaatcggcggggcccaaccggcggggcccaatcggcggggcccaatcgacccggtccgtaaa

SEQ ID NO: 8486 - DNA, 2860 bp, Heterodera glycines
actttttgttcgaattcgggttcggggttcgaaattgagcgaaatggatgccagaatcgtgatcagcgaccccggaaacccctagaaacttgttttgaatgactttaaattttaaaaatttccaccaaaaaataggggcaaccatcttaactattaccgtttgtttgtccctctttttacttttcactctcatttttcagaatgtttttctgaggccgccgtttgtcagtcgcactctttggctatcgtcggtcgcctcttgcaaaagaagggtttgctcacgccgatggattggtccgtcttagacgttctgaatgaacaaattgcggctgtggaaacggtggacaatgtgacggaaaattcgacggttgatacttttcccaatcacgcgaactttggcattgtctgtccatttgctctccaattcgtcataatattcctcatttagtccgattttttgcgcagatttaaagaattgactcagaatttaatgttggccaagcgatacgaagccattgggcccatttgtcggttgatcattccattgttcgaacgcaacgccgactttaaggtagtgactgttgaagaactaacaaatgtccatttggttgacctccccattttcagtcgcttatcgcaattcactcgcaaatccaacaggcgtaccaatgtgtggaccaaataacgacgaatgtcatcagaaggcagcaattagccagctatttcagggtctctttccacggccgggctcaatttgggtaaccgtttccgtacttctaggttttgtcaccccttgaaatttcatataaccaaagacgacttttgggttgattaatagaaaaaaacaattcgagaggatgacatgccaaaccctagaagtattacctttccctctggtccatcatcctttcccctccatttcatccccagcgatgaccatggctctgaatggatttaccgtgagcgtccgttgacttcgttggccgaggcatgtgatcgtttgcgcgagtcggtgcagtcttcgctggccaattgccgtgttcagctgctgaacaccgccaacttcccgccctcccctcccccgcctcgtccgtcctcttcaaagtgttcttcgtcctcctccttctcttccgtttcgtctctgcttccgcttcctgtcgatgatccgtccgtcgcttacattggcgtggcccacgtggagccatgcaaaacggtgcggacgacgcattcttcggagaaagccaattgcgggggcaaattgggcggaagagcgatgtcgcgcagtcgttgcgaattgacatcaatgaatggcagcacttttgggttggcggaggaggacggcgaaggggcggcgatggaagtggcgcccgacccgaccaactattggctgcacaccaacgtacgaacttttgtgctaaacgaacgccaagcggactcaacggtgtcggacaacgcgcccgaattggcacggatgacattgcgacggacgacgctgaccggtgtgccgcggggcggcagagcggcttttaagtcgtcggtggttcttttgcagttgaaaatcccttcccgggcacacgccgtcggcaacgcgttgtgcacatggagcaaacggtgctcagtcccttggaattggcctgcgagagcattcttcaaaaggcggaccaaatccgacacattttgtcctccgccggactccgtcggtgtcgccaccatcacaaccaccaccgactgatcaactgcgggtacgacaaaagtgtgctgaagcgggtggatgtgaagcagttgcagctgtttctgcagggggccgtcatgccgacggtcagcggacgctgcccttttcattggcattgccttccctctatttgttaaggttaacgccggtcttttggcctacgcggagacattcaccgcaccggcgcagcagaaacggtacggcaacaaaggactgctccgcctttggaatgcactgaagtaacaaataaaaggataagcgaacttttattgtccatcgcttttccctttgggactttgctggacgaattggacgaggcgatgcgcgtcaacgaagcgacgatgggcaacgagcggcgcgagtatcagcaaatgctgcgcaacgcgtacgaaaacactgtggagaaactgaacagggcattcgcacgcggcagagagtcgccggcgatggacaaacggcggagtatgagcatcgacagggcgaagcggagcagcaagcagggcatgctgatcagaccgatttttgctttgtgataagcggggcgcgacccaaaaattttaatataatgacgtgcggatttaattcgctggtgcgttggccactattaatttgtgtaagcgtttttcgtgcattattttgtttgtttttgtgattttgatatgaaaataaataaataagaaactcattcgttcgttccttcattggcaacattcaattgtttccttcttttgcatacgtttttaagctccgtttttatttgactttttgtggggttttttctttcgaaaagtgcataaagacaaacggaaattgagaaggcaaactgacccaattttatgaagaaaagcggatttgattggaggggggggggagaaatgccaatgcgatgacatcggagggtttttttcaatttgttccaaaatggtccgagtgcaattggacaactgctgctgcactcactggacagcgaaaagtgatcggttaagcggagaaagggggccgctgttcatcccatggccaaagggaagggtgaaaatgggtgaatgctttcgcctgtcatttccctcttttatttgcccaactttaaactccgacaagtaattaccgctgatttgacaagtcattatg

SEQ ID NO: 8487 - DNA, 2629 bp, Heterodera glycines
atttataatttaatagaatgctgcttgagatttctgtctcggttatcaactcgagaaaaatcatggtttttttttgatcccaagttagggaaatcagtatattttcttgaagtttcaagcaattttcttaacaaattgcattaaaattctcaaaaattttcacggttgcctaccgaaaccgcctgacaatcatttaccatatttcagaaaaatgtatataaccacaatggcaaaaaatagtaatttttttgtcaataaacggataaatttttgtaaagtacaccccttaattcgggatttcaagattacgaaaaatacaccctaaaaatcggttggaaaaagaaaaatacacccgtaaaaaccgaatttttgacttcatcccacccccccccccaaagcccaaagccaagtgtcttgctacgcccttgtcctggactgggaaaacggggaatgaaggaaaacccaattattttattttcgccattttcaattaatgaaaacagttttatttccaaaaattaaggtcacctttagtgaattgtcctccaggggcacaaaatgcttttgagaattgaagcgaaataataaaaaataaaattataatttttaaatgcataattaaaaaagtgggcaagcaattagcgataatattttaagaatttgaaaatgaacaaattatttctttgcttgaatacgacgaatgacgagcattttttttgccatttctgccaaatagcgccaattgccaacgaatgtttggttggctgtggctttaaaagtgaattggaaattgatttctgaattttattttttttatttgctttttacgatttttatgcccatattttggcgtatttattggccgataaaaatgaattaaatttccttttaattgttgagtaatatatataatttcatattgatatgaagaatttaaagtaaatttgatgcgaaaaaactcaaggaataataaaataatttaattaattatataaataggtgccaatgaattaataatagattaatatttaaatatgaacttaaaaaaataacacaaaaattcaccattttgtataagggattatgttttgtaagattcaattttatccttgtacatctgcttgttaattttaaaagaggataagtcagggagcgatttcaaagtcaacattttggccttgggacagagaaggtgaagcttccccgagaggaatattaatggatcaattgaggtgatattatcgagcaaatagggtcgatagtagagactggaaatttcaaatttgcggatcccgctgcgggatttgaatgcaaaattttttgcggcagggaccccgcgggattaaccccgtaatcccgcattttccaaaaaatgcgggattgcggactgggatcccgcaaaatctcgcgttgaattctcgtcactagttaatataaactcaaggcggcgtatgtatattccacattttacggtgccaaaattcgaaattcaaatttgcaaaattgaaaatacggcaattacgaaatgcaaaaatcggaatttcgcttcatccctggtcttgaagtcatttttgcggcgcgctttatcaaaaacttttttgaacagggggtccggctgtgccgataggcgctgccgggaaattttttacaaatcctagatgaaacttgagaaaaaaatggctttattttattgattttatttataaatattcaaaaatatttggcattctgtctttgaaatttcaaaaatgaaatgcggatcccgctgcggcattggaactccaaattttgcgggacgggatcccgcaggtataaaacctgcaaatccgcattttcctaaaaatgcgggattgcggactgggatcccgcaaaatcccgtgcgtgatccgtcccgcaccgagctcaagtattagctgtaatatatctgaagattttaaaaaagatactgtattttatgtaattataaattctttgtaattcattaatcaacgaatgacattttattcttaaattttataaataattaaaaaatgtgtatttaatcgtaaatgctgtgtaatcaacagtttgttctcgtttctccattatttattgtttgtcaatattcctaaagtgaatttataaatttaaattttatttttaaattttaccattgtgccaattgttcactggtaacaaatgttgattttagcctgacatgttggaacaatcccttcaacacttcactttcatattctttgtatatttttgcgtccaattctttgctcaatttttcgtttattttttcttcattttcttcgtttatatttttaattgcatcgtttaattgaaggccaattagccaaattttgcaaagcggggcacttaagcaacgggttaattatttaattaatttaaaatgtctccgattaatggcattttcgctgttcatcccacggaattgaccttcgggtgaagtcggtcaggttgagggttgccggacattcgttctgctgaccgttggccatttcctttgtcggctttaaatgcccaaattcgaccatttggtcggtcatttcgtcgaaattcgcaatttttaagcgaattttgcgctccacgaattggcaaaactgagtgatgtgttcatgga

SEQ ID NO: 8488 - DNA, 4045 bp, Heterodera glycines
ttcttaggggtgtatttttcgtttttttgttgcatttttgttaaggattttttcgaaaatcctgaaaataggcacattaggcacaaaaaccccgaaaaaggcaaataggcattataaaagtcatcgtaaacacctcaaatcaagcggataatatgcgcaaaaattttaggcatttgcctaaaaaaggaagccatagaaataagtgaataaaaaccttatccgtaaaattttctccagtgaatagatttgttaaactgtttttgttcggctcattacgaaacattttcaattcaaaaagtgctaaattaattttaaaaaattaattaataataataatttgccatttttttttactttttctcatcgctttttgtattattttgaaagtcgctttgtttatattgtaagtgcaattttggcttaaaaagctcggcgtgataattggcattgtcagtgtttcttgctgggaaatattccacgaaaatggctcaaaaacgccaatgggtttatccgaatcgctcaatttgacgggcattggccaattcctgcacaaaaatatagcaattaggatgacgattttgcttaattattttctggaaattccggaatacaacatctcaatatttaataactagagaccggatttatatggacaaaaaaagccaaattaaggattataatatggaagaaaattctgaaataggataaaaatcctatggatacaaaaatttgccaaaatatggacaaaaaatctaaaattgagtttaaattttcgtaaacttttaaatcataattttttgagataaaaattttcacgaaattttatctcattgagaaaaaatgattttcaaataaagtttattttcaaggattttaggcaccaaaaaagtattcaatctttttcgagtttttttttcaaaatttttcgttttaaagagtgtttttctcgaaattttttggtctttatgcggtaaatttttcgaattttcttttgccgaaatatggatttgacaaatatatgaattatagaaatccatacaattcctgtctcaattaatagcaattatatattttttaaaactacaccaaattgtgaagatgaacagcaattgttcaaacaaaaataaaacggacccatttggatacaataatatgatttttgtagccaaaattgataagctaattccattgaaaaagccataaatattcccataaatataattgcctaaatttgagtgaatgattgcttttttttaatttatttgctcacttttggcccaaaattttagcgccagcgaaagggccctaaactttgtttgatttttctcatttagcaggccaattatttctttattggccaaatagcctaaaaatgagcgaattatttggcattttttgaatttggccttccgttttaagcaatttaatattatcactggaaggtagagctcgacctggatccaggtccaggcccaggccatttttcagcaacctggatttttgcccagtaaattcaggtgaaatatgaaaaaaatacaggtccaggtccaggctaaacaagaaaaaacctgaatttcctgggcaaaattttagaatttattattccaagagaccgatgttttttcaagttttcaaaaaagggttaaataaatttaaacatattttattattataaattaatatttttagatgttcctaagcaattaattgattttttcaaacatttgtttttgatttttaaaatgagtttcaaaaattccaggtccaggcctggatccaggtctcgaggagcctggatttttcctggatttttatccatgaaatccaggtccagatccaccatggaatccatgtccaagtccagccttttttcaaaatctcgagttctactggaaagtgttcggagcatcgcccgctgcggcctctgctgattggccaacacttccatcatccattcgatgtcgtcgccgtccaatggttcgtccggcaaatattccatgccggggatcagcaccagcgaaatgtcgaatttgacgccggacattttcagttgcagcatttgaatgtaggcactcgaaattttggtgatttcatccaattttgggttctgaaaatttaaacaaattataaagatgatcaaatttggccggtgatcggacaaattcaaagggaaaatttaattggccaattttaaataggaaaaagcaaaactccgattcattttaaaaaaagtgatggaattgagtaatcccgaagcaaatttaaatatgctattattagtcaatattattagttcactttgcaaaattggcagaacaaagaatcgtcgccgcattttctctcctccaaatttccgtcatttaaatgatgacaattaaaaatgtaattgccaaagaatttgtttttctcctccaaatacgacaatttttgtggcattatgcaaattgtgtcgatgtccgagccgggcgtttgggtgtccaacaaatgcgaacccgtcacaatcagtcgagcatcgccatttgactgaatattttcgcattcgaaagtcgatttttttgattttaatgatttagaaaatcatacaaaaattaatttttaaattagaaaattaaattacccatttcgaaatggtcctttttattccctccatcaaatctttcggcgtttcttttcttccgtacccattttcctccaaaatttgatgaagctgaattaaatagaaaattttttcgtttttaaaaattcataactcccttattttttcatatatttaaatactctttttttattgtatcttttgttgtctattcttaatttcatctcggctcggtcattaaaccttttctattctctgtcaattgcttcagctttttttccatgaccatgccaaaattggaaattggcccactaattttactcgagttttttaacgttaaaaacgtaaacctggaataacaaaaacgaagtttttctgcataatttagagcagtagaatctcaatatggccttaaattttatctatctttgctacatgagcttgtatatgcttcaactccatgcatgaagttggagctgtacaggtacagtgagaacccacaggtcaaatctaaggccatattcggactcagaatggccgatttaaaattttcgggggacaaaacttatgttacaccctaagtagataggctaatatcatttaatttattaattaaccatttcgtcctttgttttgtattctctgccctgaaaataaatctgttgcaaattctcgtgcatttcacataaattttctaaattttctctctccgtttcagagcgaccggaaaaacgttcagataattttttgtctaaataatttaatttttaaactatttgttatttatatatgcttttagccttcaaaattataaaaaaataaaataaaattattcggttaattattataatgttttttttaattactcggttaattaatgtaataatttatttattaattaattattttccacctaaattttgttgtctcaataaatttctccaattttcaatgtgttcattaaatctgtccattgagtttgcttttgtctgctttgtctcaaaaaggtcgttcaaaatgtcactttttgtcatttttggccaaatgtctgtcccattctcgccctctccaatgatcgttttggccattttgttcttgtgcaattgcatttgtaccagtttaatttccttttccaccgtactccttcctccatcgcctaccgtactctcatcaccacaatttgtgtctttttctgtggcaattcgcttcaaaattccacacaatttttgttttatctccaaagtgccaattcctccgttttcatttttgtgcttttccattaatttttttaaattttccttttcccctccaatttttcgttgtgaattttccatgccattgcttttgcttatcttctcaattgtttcaattctgtgctgaatttcgttgataaatgctccaatgttcagcatttccttctttgactttgaagggtttttaaaaagtcga

SEQ ID NO: 8489 - DNA, 7067 bp, Heterodera glycines
acggtagatgtaccgtaccaatcccccctcataaaattgacccaccgtcttggcaacggaccgtacccaccccctcccatggcccacggtcttggcaacggtagatgtaccgtaccatttccctcgagacggtagacgtaccgtacccatccccccccccccctttgccctccgtcttgaccacagcagctcctgccctcgacccctttttctcattgtattacttcgtttcccaccttaatacccaactttttccttaacaaaatgggttgataaataattttaatttttttttaaatgttgcacagcaattgaagcagctccggtggcatctgaatgccgcttttaccaatgcgaaagccttggttgcttttgtagtctgcaaaattggcgtcatggcaactcgtacacagggcaactcatacaaaaaaaatttctaagaattttcaactaaaacttagaatttttagattaaaaaaatttgaatggattttttagcctagaaaaactattaaaaaaatcttaaaagttttttttactaatttttcagctgatttttttaaatttcttaaattttttgaaaatttaagtgttttaaaaaaattttctaggcgaaaaaatccatttagatttttttaacctaaaaattctaagttttagttgaaaattcttggaatttttttttttgtaatttgtacgagttgcctttttgcacgagttgccattgacccgcaaaattaagcaaattttgtttctttttgtttattttttggtccattttaatccactcactcccccaaggcaaagaaggccatggttcgcccaaatgcacaaaaatgccgagaatgagcaacggggtgacaatgggcatcatcagcatttggcatcggcggtggatgaacattttgttgagtgcgcgaaaaattgaaaattttcgggacgaaaattaataattcttattaaaaaatgaagaaattaggaaatttatacaattttgaatttatttttgcgcaattcattgattctattttaaagtgattggaagtggcgttgcgattttgcctggaaaatcccaaaaaattttgcggattttgagggcaccgtgccgctttttggggtttgacggatttaattttcactcaaatttgggctagctgatttcacttaacaaattccatttttcgcccagcggcgcctttacgccggcccaaaaaaattagcccttttttaaatttggttcttaaactgctcaatgaagggtattttttggacaaaatttgttaattaaaagaaatttcatctctcaccccccccctcccttcacgaaatttatgaaaatttttttttgaaataataaaattttatcggagaaaaatccaaaagtgaattcaatttaatttaattccatccaaattggtaaatgcttgtgtaaaatgggcagaaatcggcagcagaaggacggacgaagcgaaaaaaagccaatggaaatgattcattttcattcatttagtgatgatcgcttaaaatgggatgaaaagccaaatagaagcaggaatgattaattatggaaaagcaaaataaaaaaaggaaaaatgtaaataatttatgaatcattgggaaaatgaaaattttatgtacaaaatttgtaataaataaatattaaaaagagtaaaaatatatgaataaaaaaataaataaataaagtttatacaacagcagggctcctccgatcgaaccaagtcacgttccaagtacagaggccatacacaaattgccaagtacacaaacgggggaaatttagtagagactagagaccggaaatttcaaatttgcggatcccgctgcgggattggaactcaaaattctttgcgggacgggatcccgcgggattaatcccgcaaatcccgcaatcccgcaaatcccgcattttccaaaaaatgcgggattgcggactgggatcccgcaaaatcccgcgcgggatcccgtcccgcgccggtctctagtagagaccgagatttccgaatctgccgggccaggccgggctgactttttcagaagcaacctgttcgggtgatgaccccgagagagacttttatttattttatttatgtaatttccctctctctgtctcctgcactatttctcccatttaattgtgtctgcactccctttgtaaaggtcagacacatcattcctcccccacattgtgacccccgctcatttccatcgttcagtctgtcttcttgttgattcccacattttcctccaattgtcctccgccccaaatatttatttatttgttttccaataaataattgattatttattggactgtttaagctcggttaggtaagaccgaacaattggcgacgcccctcttcgactcaagccgggttggctgagcatcatcatccaatttgaaattctaaagccgggtcggctatcatcgaatttcttaagccgggtcggccatcatccaatttgaaattctaaagccgggtcggctatcttcgaatttcacaaagccgggttggcattcgtcaaaaaagcagtaaaacgaaaactgcgaacttcaaagccgagttggcattcgacataaattgctgaaagcgaacacaactcaaaaatggctgcgaacctcgaccaattggtgagattgatgacgcagcaacagcaacaatttgaggaccaacaaaaattggtgcagcagcagtcgcaacaaattgcgcagttgctagcaaaccaaaatgctgcaaacatcgcagctggtcaacaaaatccgccaaatgcagttgccattccttcgctgccggacatttcgctgttcgaagtgtgtgatgagaagagtcgtgtgagcgaatggctcgaccgattcaaattcgccatcgactgcgcggctccaacagcaagtgatgaaattaaagtgaagtcgctgatgaacaagctgagcgagatggctttcagcgaatatagccgatctgttctgccagcttcagtcaccgattttgacttttcgaccacagtgcagaaactggagaagcttttcgccaaaccccagtcaatcttcatcgataggtatgaatgccttaaagcggtgaggggagagggcgaggagtttcggcacttcatcaaccgccacaaaaagctgctaaacgacttcaagttcgacgatttgaagaaagagcaattttatgcattaatgctcttaacggcacttaaatcgccgagcgacgcagcactgaggcagcgaatattggctaaattggcaacggatggacaaaacgtgtcgtatgatggaattgtggaagacctcatcaacttccaatcaacgattgcggaggctcgagcgatcgaaacgccgatcagctctcgaaatgttaatgctgtccaccaaaagggcaagcaaaacttcctgccgaagaacaaattccccaaaagtggacaaaccacaacggcgaacaaaagttgttggcgatgcggagaatgtgaccatcagccattcgactgccgattcaagttgacaaaatgtcacaaatgtggtaccacgggtcacttgggaaagaaatgtgaaagtgttcaggcatggaggaaagaaaaaagtgcaaagatgttgggaaacaagaaaatcggacatttgaggatcggtatgacctcctgttcgatcaatgcactttcgttgatgcagatcaaaattctgctgaaccaacaaattgtcaaattctacctcgacacgggatcggacatcgacgtgattgatgagctgacttatgccgacattggcgagccaccgatcgaaccgtgcaatgaaattgggaagacctttgatggaaaagaagtcccattcattggaaaaggaattggcatattcaaattcggcgagattaaagtgaagcgaccatttttcgtggcaaaagctggctcacttaatctgctgagttgccaaaccatggacaaatttggtttgttggatgaaatgaagcagaagatcagcaacgttgcagtaaatttgtgcaaagccggccgcccaaagggagagaaaattattcccagtggcaccaaacaaatggccggaacagaagccaaaattgaggcattgaaaagggcctttcccgaagtcgtaaaagacgggttaggactctgcacaaaagagaaggcacatctgtcattaaaaaaagacgccacacccatttttcgaaaggcacgtcctgtgccatacaactctttagaagttgtcgaaaaagaattgggccgattggaaaagatggacgtcatcagcaaagtcgatcatctgaactgggcagcgccgattctaattgtgaaaaaggccgacggctcagcgcgactttgcatcgactattcgacaggtctaaatgatgcgcttctcgactgccagcacccgctcccagttccagaggatatttttgccaccctgaatggaggtaaaattttttcccaaatcgatctgagggatgcgtatttgcaaatcgaattggacgaagaatccaaagatttgtgcggattggccacacataaagggaattaccgaatggaacggttgcccttcggtgtaaagtcggcaccaagcatattccaatcaattatggataaaatgctggccggactaaattttgccgccaccgcttacttggacgacataatcgttgtcagcggaacaactgaacaacacgtccgacatttggaagaagtgttttctcgaatccaaacttacggattccgagtcaaattggaaaaatcaaccttcttccgagaccaaatcaaatatttgggtcaaataatcgatcggaatggacgccgaccggacccagaaaaattcatgcaattgtccaaatgccgtctccaaaagacatttcgtcacttcgatcattcctcggcatggtaaaccattaccaacagtttgtcaaggacatgcgcttcactcggaagcctttggacgacatgctgaaggatgagatcgaatggaagtggacggaaaaacgacaaaaagcattccaaaaattgaaggaagtgcttacatcgaaactgctactcacccattatgatcctaaattggacataattgtggcagccgatgcgtcggaactcggaattggggccgtcatctcccacaaattcctgaacggtcaaagtaaagcaattgcacatgcctcaaggtcgctcactccagcagagaaaaattactctcaaattgaaaaggagggcctggttcatggatgcatttaagtgcaaaagttccacaaaatgatctacggcagacacttcacattacaaactgatcacaaaccgctgatcagtatcttcggaagcaaaaaaggcatacggcagtgcagcgcaaatcggctgcttcgctggtcacttactttgctggcctacgacttcgacattgagtatgtcaataccaacgagtttggtcaagccgacgcactgtctcgcctgattgccaaagaatttgaatgtgatgatgaacgagtgatcgccgcgtgtaacatcgacgaggatcttggaactgttttggatatggcaaaacaaattctgccaatcaaatttgaaaatttggtctcagaatccaaaaaggataaaacaatgcaaattgttatgaaattcgtcagagacggttggcctgatgaacgcaaattgacgccacaatcagaagaaattgagcttttcggcagacgaaaagccgatctgacaattctgaaagactgtctgatgtatggcgaacgaattgtgatccctaaaaaattccggaccaaaattttgacactgctacacaagggccatcctggaattaaaaggatgaaacaactcgcccggcagtatgtcttctggccaaaattggatcaacaaatcgaagaatttgtcaaaaattgtgaccgtgtcaattggccgctaaggcaccgacgaaaacggatttgcactcatggccaaaatcaacgcggccatggcaacgaattcatgccgattatgcgggccctttcttcggaaaagaatttctgattgttgtggactcatattcgaagtacccggaggtattcgaaatggccactaaatcagcggccgcaacaatcgaacgactgcgttatctcttcacacgtcacggtataccggaaacattggtaaccgacaacggaacgcagttcgccgctagtgaattcgcaaaattcacagaagcaaatggaattgcacatctcttttccgctccgtacaacccaatgtccaatggacaagcggaacggttcgtggacacatttaaaagggcttttcgaaaaataaaaggggagggagtgccaaataaggaaatcatcaacactttcctggtcacttaccgcacgacaccgaacgattcgctgccggatgcaaaaacccctgccgaaatgctccttggccgaaaaccgcgcacaacgattgatctcctaatgccgcctcttccacagccaacggagagagacacaaaaatggagcaccatttcaatcgccggtttggcgctcgaccacagaaatttgtgtcaaataagccagtttgggctcgacaccgactctcgcagaattggagagctgggacaatttgtgaatgctcgggagtcatctacacggtaaaattccccgacggttcgacaaatcgctttcatgcgaatcaattgagaaaccgggaaaacaccgaaaatggccacgaaccattggcaattttaaatgaggcattccatctgccgatcaccgcaccgaacgttggaattgtagggcaggaccttgagccaaggcctgacccgatcaacgatgagcaccaggacgagatcgaaccggagcaggcccgtcgaagcccgacaccgcagcaacaacaagtgccgcgccggagtggacgaaaccgccgagcccctgatcggtactcgcccggatgagccaatcaaaaggggaggtgttcgggtgatgaccccgagagagacattaattaattttattatgtaattccctctctctgtctccccactatttctctcatttattgtgtctgcactccctttggaaaaggtcagacacatcatccctccccc

SEQ ID NO: 8490 - DNA, 5580 bp, Heterodera glycines
  unsure (1)..(5580): unsure at all n locations
tggagagggattgcaataacatgaataaaaaaatcttcttaaaagaaaaaaaaaaattttccattaaaacaaaaaaaaatttcattaaattaaacgctgacgccttctcaccattatttgctgacgctgtctcctcatccgagtaggtttcggcacaatgcctgaaattgtgttgctcgtcgtcctcgccctccgattgtggatgttgttgttgtccagctttgccatcgctgctgtcatccacttgtttgtcctagaaacccattggaaatttagtttatgtccttgcgaaattttaatttaactatatatgcataactggtacttttgcagtttacaggctacttttaacatacattttcagatgcttataaattactcaatttatatgtttgtttaagcatggaaatctaaaagactaatattcataaattatttactctctccaaaaatctgacgctgaatttgaagaatggcttcgaaaatttaaaaaatattattgaaactcattttgcgtcatacatgtgaaatttgaaaatctgtatggatggtaccctcatggacatctctgcccatgatggtactcttgtatacaactccaggggtgcacaatagcgctgatcagagcccgggttcgttatcagcaccattaaaaaccctttgaaacttatttccttccaccaattataaacacaattttttttgtgaaaaatgtacgttaaaagtagcctgtaaactgcaaaagtctgcaaactaaaagataaatttccaaacgctttttttatgcttgattactttaagcatatttaaaatagtgaagaaaaaatttgtgttgggtcaggcatatcatccatgggctatgaattagactatgaattataacaaagaggaataaactgaaacattgcaaaattattttgtatttttaaaaacaatagtattgagacaatttaaggactagactttcatttaaacatgtgcttatccatatactttttattcatattctttatcaaatatataaacattaataaatttttataaaaatattatgaaataagaattgaaacttaaaccaaataatttatacatttaaaatatctgtgaaaattaaaaaataaaaaaattaaactggtctcaattattatattacattaaaaatgttctaactataaattttgtcaatgaagaaaaaataaattattaacaacaaataaatattattttaatcaattctaaagatgaaggaatacggaatgcgagataaaacaaatcttctgcaagaaattttattatttttgatagttaagaacatttttataaatgaaattacaattacaaaattttcaatatatattatccaaaattaataataaaatttttttgtatggatgacattaaaaaaataaagttaacaattttaacgagaaattgcattctttaaaataatgacaaataatattgtgtatttttatatgcaagcaaacaccatttccttaactattaaatattaaaagaaaacaactagttagaaaacctatttaaaataaaattatattactatatctaaactagagtgcagcgggaccgagaatgggcaaaaccgggacagcgacttgccgggacctgagaagccgggaccgggacagggacctcgcttttcgtccggcaccgggaaccgggaattttaaaaattcaaattttgatttatttcaagtgaaaataatacaaaattaaattttattttgttttttattttataaatcaaaaagttaaaactaaattaaattaatgaaaattttcaaatcaaattttctttaattatttcaaaaattaatcattttggactaaatttttttgtgttcgttatacttttgccgttagaatttgtttttaatttattttgttaatattttttaattgagatttaaatttttgcattgatttattctcatggtaaaggctaccgcgtttgattacggcgtagttgaattgttaaagtaaaaatttccaataaaatttttatacgttttaaaaatcaaaaatgtaaaattacgttcgagcaattattatgcgcaaaatgtataagtaaatttgggttgaataacgtttaaacaattttttttatcacttgcatattataagtttggtatttcaatggttattattttcataatttaaatttttctcaatttatttgaagcgaaagtattatacatattacttcgtgaaaattatattttgattataaattaaaaaatatttcatttttttttgctatatttcaactccatgcacaatgtttgcttaaaggcaggcggcaatataaaaatgtaaataaatccgtttaaaattaaaaaaaattattataatatattttattagaaattttcatcagtcggagaaaccacaatagattagtcagatagtgtatgataattattcaattgttttaattattatgttatctaattaggttgaataaattaaataaccataaatttttcttcttctaatttttgatcttaatcactgaatttattcaaatgattaataaaattcactttatcatctgttaatggatattttatgtacacaaactatataataatattttttcattattctgtttttaattaattttatctttttaaaggtaaatttcttttcggttaaatatattttgttgcttacatggtaataatggtgattaatattaatttttaaaaggatataaaaggtatgattgtaaaatttcaaagtcttaagtcagatattttttatccataacttttttgaaattcaataaaattattttttttttgatttaaatcttccaaataaatatttctcaaaaatttttttttaatttttttactttattaattgcaatataattttagttgattgtcgcattttaaaaaattaaataatttttaaattattccagaaaattcaattgctcatcacataactcttttttaacttatcacattttaattggattaataagactttataaataataattaatttaaatgattattaaggtcttcaaatggttttttatgaattaataaattggaacaaaagaaattgaatgtctatggttttccacgtaaatatttagattataatgaaagtgcgaaaatcacgctaacgaattgataagaagaaataattagcttggaaattggctcaacaaatcgagaacgggtgaattaaaaaaatttttactgaaaattagcaaaaattataatcaaaatgaatacaaaaaacaaatacattttataataataatttaaattatttactaatattgtcgtttagcatgaaagtaaaaaaaaggaataaaatattgactctgagttaaaaaataaaccataaataatatgataaattattttatataattaaaaaataaactttcaaaatttagtaaatgcgattattaattttcttatttagcatttcaaagtaatatttattaattttaattgggtgaatattaattaatgttttaagttctatgattttaaatgtatattatataagaatctaatagggttcgagccccgctcccgcccccgtccccggggcgggacaggtttttggggctcacccccgtcgctgccctcgtgactctgaccccagcatcccccgcccccgcgacctttttttaaaatatttgtggtttagtggttagtgttctggttttggggtactaccttattttcatctaaaaaagggaaatttctaaaaaatttggctaatttctaacaaaattcaaataaagtcttaaaaattttccgcttgcggcgcaaatcggcaccaccggacctctcccctcgcacattcaccaagttttttggaaatgtgccgcaaaaaatgttaaaaatctgctttagtgatcccgaatgcactgaaatttatgaaaaatataataatagaatacattttggatcgaataaaatgtaaaaatatttgaagcaattttgcaaaatgttcttatttttgaccctaaaatcttattttttggcctttattcttattttgaaaattttgaaatagaaaccctggatttagacaaaaacacccataaaaattgactattctggcataatttataatccttaaatttggtcatttttagacaatatctgtgcaattataccaaaaaagaattgaatcgaagcgatacatcgataaaggaatgtggagccaaacaacacatcattcataaaaattaattttttgtgagattttttggagctaattaaaaacaatccccgcccttaattgaaaataataaatgaaagaaatcatttttaattataacaaaatgaaaataataaaaatatttttttgtttgaattattaaataattattttctaaaatttattttaatttatttgagattaaacaaatattcaaataataattaaaatttataattatttataaaaaattaaattgatttattgtttttacattttccgtcgtccaccttcaacttgatcagattgccctctctgttcacctccatcaaatgcattttgccatcatccacccgttcttgcgcatcaattgaataaatcttaaatntaagaaagaaaatttaattaaagttcattaaaacaaaaatttaaattcctatcacttaaaaaagaaatttgtgaatttaattttttatatctttaaaatttttaattcttgaaaaatttaactgactttgaaaaaaaattaagttagagacagtccttaaacagttctaaactgactagggacggtcccggggtggtacagacctccatcacccacattttccaaaaatttcgcttaatttttccaaaacgccagaaattaaacatttttttggtgaaaacctgtttaaaaaatgaaaaaacttcaaatttttccacttgaattacaaataaacatccaaaaagatactgtcaattatccacttcaaaaataagctacgatatttttattgaaaaagttgataaagtaaaaattaacaaataatataaattaatttttatcaaaaataaattctaaaaccatgaaaatgaaatcattaattaagtattaaaagtgaaggacacaaaacaattgcctcattaaataacgctgtttttgaagagtaaataaatttttttaattaaaaccaaaaatttctaataaaagctttttgaaaatttattaacagttttaaaagttcttaaatttttattcttttgatttaattaaaaattcaaaaataaataataaatagatgaaattgagctttgactaaataataattaaataataataataaatcacttttccatatttgctttttaattcacgccactttacaagagattcaaaatgatttacattatttaaatgtcaaatttttaagtttaattactctaaattaagctgtatgaaagtaattgtaaatttacaaataaccaatttataaattataattataaattttttttttaataaaaatgtaaagaaatgaaaaattaaactatattttatgggtgctaaaaggaatgatttaatctttgttctttccaaac

SEQ ID NO: 8491 - DNA, 1588 bp, Heterodera glycines
ctatggtcactgcgcattgatcgacccgatcaataaaccatgctataaggatgctgatcgatcgcttcccacagtgaatattgattggacctcctccaaatgcgtttgatggaggagcgcatttgtgcatttcgatcactgtgtccataagtgaggatgaaacccttctctgtctcccctgctccgttgtcaaatatttcggcccattgttgaccgggttgagatgagtccttcgatttgccgattgcatcgccgcagtcgctgccgattcggttcggtgtcgttgccgtgcctgattctccggatagtcggcacgtttgatgaacctgaacaaccatttccgatcgatgtttgggcaaagaattaaattatcaatcaattgatcaaaaatagctgtggatcaatcaatctgatcggtcctttttcggttgtaatcaccgcaaattgcccaacacttcgcttcgctcactttgtgttgtgctgcaaatttcgctgtgctgtaacacgtccagcagaagctgacgaggggctttcgttgacaaatctgaactgatcggaacacagactgatcagccgaccttaatttgctcgtactcaattggcctggtgctcagttggccaggggccaggccaagttggaattcgggcacaaacgcggaactcagcgcacacaaatggacgacgccggtgccatggtgcgggtggaagcaccaggccatggttatgccgccactcgccacgccagcggcaacttccgactcgtgatgatcattgccgcgaggggacgacttggcaccgatcagaggcttgaaaagcagcgaagcgatagagcggtggacgccgccgctgccggcggtggagcgacgccttccgctgccgccaccgctgctgcccatttcgtcggaggaaggagtcgcggctaacgaatgcgacgcgttcggtccatccgcggacggcgagtcgggctcatccacatagaaaatgctgtggccaagttcgccgcgctttgacttgtccagttcaccgcatgtggcacggcgcaactgaatggacgcggcacccccggaaagagcggcggagggcgacagagagtggtggtgaggaggagagacgcgccgattgagcaaggcggacagagagtcaacgccttaggggaggattatgacatgtcaggacgaatgccatcatcaacagcagcaaattgacgcttcaaaatacccagaaacgcccttcccatgggcgtggtgattcagtgttttcattatcgcaaatcttgccttcctttcttccccctctccaacagcagaggatataacgttactctctcactctctctcctttcccctctctctctctctctctctctctctctctcactcctttcccccctctctctctctctcactctctctcctttcctctctctctctctcactctctctcctttcctctctctctttctcctctcccattatctcttatttttatcatttgcccttgtagatgactcatccatccacaagactttcttaattcactttccgtgccatattaattccgctgattcggccccctcctccttttatct

SEQ ID NO: 8492 - DNA, 3415 bp, Heterodera glycines
gtgagtggagggaagagaacaaaaaacactcctcaatacaaaaaaaaacattccttaattacataaaaaactccttaattataattatatgtctaatgtctaaacaaaacacagattgaccattgccaccaaccgaaacaacaacaagaaaaagtggcaataatacaaagcactaattataaacaacaaaaaatgccgacaaaaggaagtaacgcaattagcaaggccaacccacctgttctgctgctgcttgtgcttttctcactgccattttcgcgtgccatcgccgcgccgtcgccctccgtcgccagcgatgccaattcctccataatggcaccgttgggtgttgtgacgtcggaggagcagtcggacgactccgtcgcgtccgcaaccattcgctggcgaactgcgttcgtgcgacgtgccgccttttgtgtgctgtgcggcaaattgacatactggcgctgcataatgccaatgaggtcgctatcgtcgcaaatcgcctcatccgtctcggtccagttcggttcagcgcggtctttgcgcagcggacagtccctctccggcccgacggatgagtaagtcgtgattggcggagtcggacgcttgagtttttggcatgcgttcatctgctgctgatggcctgaggggcaactgctcggcaacagcgacaagtaatcgtggggtcgactaatcggttgcggtgatcggtgccgaattttttgctgtttctaaagggacaaataaattttgccggaggggtggggggaatggaggtggaaactgtttggctaatgctttttgggattggtcaacagattggaagatgacttaccccgccggcgttttgtgcgccgctcattcccatgggaaacactttccctccgccgcttttcgtgcccaaaatgttcagttccgggttgcttttcgccgttttggttttcaccaatccgccgagttttttggcacagcacggatgggcacggcagcaggacgattttgggggcaaagcaggcggaagcaaattgtgagaaagaggtgactgaaaaagggaggtgagaagaatagaaggcatggcaaaaagtgatcagcagaaactggagctgatcagtgagtgccgatacttttttaaatgttggtgaatcatcactattcttttggacacggttaataactcctcccctctccataattattttattcttttcggtcaccttctgttgaggctgctgcactcggaatgtgcgtggcaatgtcgcgtatcccaccgccggcgccccgtttttgccgcctctgtcgccgccccgctccctgccgcactccaacagcgagtcgtgcgagcggtgcgactgttgccgttgcagcggtgccaactcggcatttgcatctgcgaaaagagacgagcaacaaatgatcaccaaccacagacgaaaagcagacaaaaggacgaagagggacaaaatgacgaaaagagagacggaggaacgaaaaggtatgctgtatagagagatgaaagtgacaaaaaaagagaaacggagggacaaacggcaaaactaatggccataaccattaagaaaaaatcaactcacaaagtttgaccgtcggttggtccccggaattatccgctcgctcgacctgtgccgacacaatgtgccgaaacccttaaaaggtaaaaaaaacggtttgaagttggcactgccctctccccctcccaccgcttggcgtgccaatgcttcgcttttccaacttcgccgttcgcttttgccgctttgggtccggcggttggaaccacgcggccaaaattcgctccatttttgtcggttttttgtaactttttttgtacaccctttccaagtacaactgcactttttgttccgaaatgctgaacatcttctgttgctgctgctgctgctgcatctgttccaaaacgacttcagccggcgcctccttttgctgcgtttccgtcgccaatttctgaagcggcgctttgtgaaggtaattaaaaaagatgaaataaaactcaaatttggcaagggaggaattggctaattgctttaggagaattaattaatggagggaggacattccctttgtcaattgcagagaaaatgaatgaccaacgatcagaaaaataccccgaattccgatcgatcccccgcttttttgtaaatctttcgcccgctttttcttttttctctttcaaatgcttgcccatttgtagcttctgtccacgctctgttccgccttgtccagctgcgttttcacctccacaatgctcggcctttcgtcctttttccattgccaacatccatcgaaaatctgtcgcagtgcgtccggcacatcgtcgggcaacggaagtggccgcccgacttttatgaaacacgcccagcgaatgaccgcctccaaatcgggcgctgaatggcaaggcaaataaaataatggcattataattgattttgcaattgataattactttgacgtgtcagaagctcccaaaagaacattcctgcggggaaagtgaatgatttgaaaaagtgatcagtgatcggacacaccaaaagaccaaacgtccattttggggtgcgaaatggcaccctgcatcatatcaggcgatttccaaggcatggagcccgaacagctgtcgcgcttctcaccagctggccgactgacgttaaaatctgaaaggggacggacaaatggtaaaacagggggagggagacaaaaggacgaaataaaaacgaagacaaatgaccaaaaatttaatggggtaaaaaccgcaccggccaatttgagtgtgagtctgtcgatgcgcatccctccgcagccgcggcaccgcccgtcggcccttcccccgtccgccagtgccttccacgtgccctccgccaatgcgcattcgcacggcttttgtttgattagcactgcactttttgatcaaatccaaccattccaaagatcaaaaaacgcaccattttctgcctaaattaaaaaagtggtgaaaattttgtgcatttaatgaaagaaatggccgtactttcatgtcggcgtagaccaatggttcattctgaacaatttgggcattattaagccattaattatgccctcggggaaagaaaattgaggaaaaacagaccattccatgtaaatgctcaagggcacatgcgacttgctgaagacaaacagaaaatagcaacggaagataataattagttaattaatcactttggcccaaaaaatgactgtgagaacgtcggaagattccattttgcggtagagagagtgtaaagtgccacctgaagagagaaacgaaaaaatgaattgggaaaaatgccaaaagtggaaaaagaggacaagacgaaagaagttgaattggccaaaaaaggagaaaccttcgcaaagctcgagcacaagaacaccg

SEQ ID NO: 8493 - DNA, 2788 bp, Heterodera glycines
aaaattttttggcaaaaaatttccgagttttctgatttcatggatgaaaatccaaaattagtcctataaagtgccaaaaaatgcatgaatttggtccccaaaaacctggacggacgggtccacgggccttcgctgtcgctgcaaatgcagccgaccggcgccgttcgccactccgttggtgaggccggcatgtgccgcagctgtcgttgtcgccgggttggccaacggcggcgggtcattccatccgggcgaaacgcttgccgactgattttgggccaaagtgtccgattccaacattttttaaaaatatttttacgatgatatacaaaaaatgctgaaaaatttgaagggtctaagtttaactcagaaatttgggatgggaaaaacgaagaaattatgggatttaattcccaggcgcttaaatcagtgatttttttgaaaattttcgagccttgtgaaaattgaaaaaactctgtcgttaattcccaaatagatttttttagaattttttttttggaattagaaattcgctggcttttctttttcattcacataatataaatttaaaataattatgattacgtaggactaaaattgcaatgacgaataatttttctacaaaaaatttaaaaatcaattaaaatttaatattaaattaaaaataatccatcatttttaatagtgaacgaatgattattgcctcgcctcgcgcgtacgcaatttcttccacgtcctccattttttacaatacaattagggcagagaacgcctttctcccgctgtctgtttgtacaatatttctctcatatttctcacttttctctgcattttcttcactccgttcacagggaaaataaataaaatttatttgattaaaaattaaattaattttaaattattattagggttcaattgagcctggatctctaggcctggatttttcctggacctaagtcaaggccatttttcttggattttcctgggcttttgtccaggaaatccaggccaattgtgacagatctttgatcccttaaaatttgttgtttttaagtgaccaatgtttatgtacctatttcaagatatcaaataatgcaacaaatactgaaaatattcagtttttgccgatcaattttggcaatgttaaatttttaaataacactgaaaagtttaattttcgtaaaaattctaaaccctcagtaaaatgccattgttcttttaagaggggaaccgttaattgtaaatcaatttaatggatgaatgtgttttggtttaaattaattaagtcttttaaagaaacagaagaatttgcgataaatataaacatttgttttatttatttaaaaatattttaattaccatccctaattttaattaccaacctaatgttaaatattactgattactatacctaattttattcggccagcctcgggatttccatctcgagtctaatcccataaaattttcaatcatttcttacacattgacttttaatcaggggatatacgaagcttaggcacaggcttagcctaagcatagcataggcttgtagttattaggcctattctacttatttttttcgaaaactaaaaagatattttgcttctaaagtctaatttttcaaaaaattaaagaaaaatattttttgttaatcttagtttttttcgaaaattaatgtaaaatattttttttttaaattaaattttcgaaattaaaaaaaaaatttttttgcctaaaatcataatttttttttacataattaaacaatattttgtgtaccttttccaagtacattttgtcatttaagtttttatcacttccgaatccgcattttacttcctttattttcgattccattaatggcgtcagccggcgggcggcaggcagccaattttcttttttttaatgaattctcctaactaagccccccccctcctcaatgtgtggcgcaatggattggcattggcattggcacaaatgcataatgtataaatacaataaataagggttgcggcgggggcgcaagaatacggacaaacatttccgtttccaaggcaatttgggcgacagcgatgacggcatggcgcgacctctctctccattttgctgggccacttgaattttatcagcgatttagtgggggctaaggggggggggggacaaaaagccgacgtgtaacagtgccataccaaatgtcgctgctgctgccaataaatacacatccaccggggcatatgcggcggcgacgatggcacaccaaaagggcgacgggggccaaggcattggcggcacacatttacccgtgcctgccgcgcctcgtcagcaattagtgaagtggttccattatcgcatcggccggccacggcggctgcgcatcttatgacgacggcaaatcaaaaaaaaattttttttgctcgtcagcagccggaggttattaaaagcggatttggcactttcacacggatttttgtccgttacgcacacacacagagaaggcttttgccgggttttatgtgcacatttcttgagattattcacagaattcaaatgcgtttgatcccacgctttcaataaaaggctcataaatagaaattaatcataaattttttgtgtcaatgctaatttcctcctccacattttctttgttgccacttccattttccatttttggcattttcattcccatttttgaaccgaatttttcaaaagcgtcaatcttttattttgtttaaaagctgattttgccacaaatgaacatttaaatgtttcaaagctaaaatttgtttgc

SEQ ID NO: 8494 - DNA, 1700 bp, Heterodera glycines
gcgcgatccgcaaccgcggcaatttcaatccgtgatcgcgggatttttgtgtccgcgcccagccctggctaatagagaaattatatcgtattttagttgtctgttatgacatgtcaaagtttgcggcaccaaatcccgcgccaaaagtgcgaccccaagactccgttagctctttcgtgtccattttttgtccgacggcaaaatctcaatgggccattaattatgtttgtatgtttgttgaaaagccgctaaattacattaaaaaaaatgaaaattatttgcaacaagtacatagcatcataaaatgaactaccggccggccgccacacattccttccaccgcttcttctctctcccttccatcataaatgtgttgggaacgggggaggagcaattgcattcatttttggagtaaacagccgaaaattcccatcaattttctccccgtcccccgaatttccccgttcccatcaattttctccccgtcccccgaattccccacttttccccgttcccatcaattttctccccgtcccccgaattccccacttttccccgttcccatcaattttctccccgtcccccgaattccccacttttccccgttcccatcaattttctccccgtcccccgaattccccacttttccccgttcccatcaattttctccccgtcccccgaattccccacttttccccgttcccatcaattttctccccgtcccccgaattccccacttttccccgttcccatcaattttctccccgtcccccgaattccccacttttccccgttcccatcaattttctccccgtcccccgaattccccacttttccccgttcccatcaattttctccccgtcccccgaattccccacttttccccgttcccatcaattttctccccgtcccccgaattccccacttttccccgttcccatcaattttctccccgtcccccgaattccccacttttccccgttcccatcaattttctccccgtcccccgaaacaacactcaaaattttctaccaaaaaatctcaatatgactatattgtgtatatatgttttatatttcttgtagcattttttgtgggctttataatgataccattcactatcccctgtcaaaatgttattattagttacaaaccattttaccaactgcactccctttttggggtggtcatatgtttaacaacactacccatatattttttcatcagcattaaaaaaatctaaaaaaattcaggtaagcataactttggatgctgatcaaaaaaggtagcaacaccaagttgatcagatcactccttcatggtgatctgatcagcccattttggctgggaacgaggggtaaatttcaaaaaaaatttctagggggttgggaaaatttttatggaaattttgagtaggcccattttatagagcacaaaattctctacaatattcaaaaaaccgcatgtctctatgacttataccggctgaggtatgggcacttcaattttgacgtagtgtaaaatgcactataaattttcccgtttcccccccccgtcccccgaacttccccgctttttccccgtctttcctccatcagcagagagaatagaaaaagagtgtgcccctttagcgtgaaaataaattttgtttttgcttttttctgctgtgtccgccccgcggccctcccaaatcgataaaa

SEQ ID NO: 8495 - DNA, 4113 bp, Heterodera glycines
  unsure (1)..(4113): unsure at all n locations
tgtaatgagtaaggctaataattttagttttttttaactttttttttcctgaactctctatggcctaaaacgcacgaaaaacatgctttttcggttgttgttaagctatttttagagttattagcaactaatttctagtttttttattattagcacctaaaaagttaaaaaattaaaaaaaactatttcaactattttggcgttttgcgcaaatttgttaacaaaaaagcaataaaagggaaaaatacacccctaagaaattcatctcaaaaattattcatttatttaacaaaaattttatattttaaatttcaatactgatttggtttagttttgttgcttttttgaataaaattttgtcattttacacccataaatttaaaagtttttagctattattttcccattttagcacctatttttgtgttttttttagaatctaaaaactaacaattttggcagtttttagcaactataaatataaaccctagtaatttgcaatttcttttttttctttttaaatttcccatcaaaaacatacaaatcaatttttggcgctggagcaggtggtggagctaaataaaaagtgatgttaaacaacaaatattaaattatcatttggtatgatgaggtaaagaatggtggaaaatgatcgaattactgtacccctacggtaattcttattctgaacacgaattcgggcaccccctccccaattcaccatcgggcccgtctttgccgggcggcccctgctgccccggggctccgtcgctgcccggcatccccggcagtcccggcacgccttgcgggctctgtccgcagccacagcacgtgctctgttgcgctgccgccgcggcagcggtcacataagcaccgtcggtcaccgcagcgccaattggcgatgacttaacgggatcatttgttcaacaaattggtgagtacgattatgcaagaaagcaaaaaatcgacagtgtttgaattcgacagtaaaactcaacatattttaccataaaaatagaatttaatttttaaacttgaacagcccccctcccccaatggcacttgccccataagctccctgctgcagttggcgcttgtgcctttgttgttgaatctgttgttggctttcagaaactgaaagagttcctgcaacaaactgaaaagttcaaaagaaaattttcaaaattttcccattttgttttagctgacctgtgccctggccacttccttccaaatgctggtagacctcagcttgcaaaaatctgcctgcataattttgggaatgttttatgcaacgaaaaatcactgatttataaatttaaaaatttaaactccccccccccccctaaatgtccaacttcgtcacgcatttgggagtgcatttgctgcacataattgtacatcatcggcactgacatcaccgccatcagcgtggcaaccactgctgtcgtctgttgccattttcattatttatttagtttggtcgatttaaaatttgaaatttcgagaaaatgattcgatttggaccagattcgggatttataaaccaaaaatcgggttcaattccttcgtcaataaactttggttgatttttaaaatattttttacaattccccctccccctctctccgaactttactaaccacgccgaagaaggcaacccttcggaaattttctgcttcacgcagcaatgctttcaggtccgtctcctccgacaatgcgcacatcggagacaaaaatattagaaaattttataagaaaacaatttgatcactgaatacagtggtcagtgcaaaaggctgactgttcgataatttatagttttaattttaagtgtcgaggatacggtagaaagtgcaaatattcatttggctttttaagagcggaatttttttttgaaaataagggtttttgaattgagcggagagtgaaatgcacgggtggcaaatgaggcgaaaaatgaatgaatgagttgcggatgtaagccgaggcgagagggggagagagatccacacaaagattggggaaaaaggaagagggtggcatttgtgacaatgggatgggacttttcgcattcataaaatgaaatttgtgagttgaaaaaaaactaatgatcggtcaagcaaaaatcgccaaaacggcccccatcagctgaattctgatcacattttacaaataacaaggaatgcatatttattcgtatgcgatcttatttcgaatatttaaatcaaaatgttcaaaaatctggattattttctacaaaacttacattagacctttgttggaatatgagcctatgaccgaacagatcgagatttatttaaaatttttaagccatatggccgctttaactccccctcttatagacttaacacaaaataaatcaggcaaaaaatatattccctttgcgggaagggcaactaaactgatttgtgaggaatcaattagataaagacttgcaaaaaattaattcattaaagcaattaaaacattactcaaaattctttagagtaaaattataaggccgaatgactgaaaaagtatataaatttttaataaatagtttcttaagtgactcgataattttgataaaattgagccgcattgacttatatttatttttaatttaaattttagctttatcgtgttgtttttcgtttaaataatttttataccaaatttcgccatttttgataattttttttatattttgcgaattgaaataattttgaggaattataccctcaatttagaaaaatttatgtcgatatttttgacattttatagccatatttcgcgattttatatccatataattctcttccatactaatgaactactaatgacaatttgtttaatttttttatgatttcctaaaaatgaaaattccattggaaaaaatacactcaatcactcacaattttaagtgctggtggtggcggaatggattcaaatggaggagaattggataatgggcattttcttgcacaaaaatggtcgaagttgatggaagaaaatgcaaatgaacattgtgacagaaggaggatggaagaataaatgattggatgagatgaacccaatttggggggggggaaagaagtacctttgggacagttttgtcattacgcatctgttaagtgtaccgacaatgggtggtcggtcatcaaagcaatgggaaaagcgcaaagaaaaagccggattttgtacaacgattgtatttagggagaaaaagcaaaaaacgaggcaccaaattcagaatgaagagttaaattaatttagagaaatgcaaaaaagatgaacttgtgtttacaataatttttgggaaggaatgaaagcaatttcatacaaaacattttttttataatttttaaattcaaaaaatcgaatttaaatttttattcaaaaaatggtagcgataggtggcatcaatttgtcatgccgttttcagggccgctgaacatataaaaagcgtgagggtgagggcagcaaggagagaggtgggcgaggatggcatccccatgctgccacccacccacgcccagcgctttgtttgctccaagcattgtctccccctcccccgtggatcgctttctcagcccttccctcaaccacccgaatcggacggacggagggaaaagaaaccggttaaattaaatgaggggatttgctctgttccggagatgaccggcgatcgggaaaaagatctaatcgaggcgagttggaagcggacaatggcggactaacagcagcagaaaagcatagctaaaatgggagcgcatgacaatgcttttgcttctgctgcttgtgacaacaatgaatgagagtcgcctctctcttcgccctctcggccttttgtgcgtctttgtgcccatgccctcgtcgtcttggcgtcgtgtctctcgggtgttttctctgttgtcgtcgtgtttgggcttttcggttggctcttcctgctgcctggtgtcgcctctctttcggtgttttctttctttgttggttgctttttgggcttcctcttctgttgttgcttgtcgaaagggctcccttctcttcttttctctgntttgctcctttatggaaaatttttgtcgagactattcaaaaagataaaat

SEQ ID NO: 8496 - DNA, 2667 bp, Heterodera glycines
cccccgccttccttcccccctccctcaataaataatgtgcgccacggggaagggggcaaatttatttgttcggctgatggcaccgaatgaatggtaatggacgagggttgatgaaagaagctgctgaaatgcttctccttcatatgatgccctccggaattgggcttcttaccaaaattatacataaactaaaaatgaacagataaaaaagagagagagaaaaagaaaacaattccaatggcatttggaattttatgcttatggccaaagggcggcttttcataatggcacagtgtttccattgggttctggctattatccaattttttttatgaaaattgaatgtttgataaaacaagtctgaaaaatgttagagttcgagttcagaattttttaaacacaatgacacaatttttttgtttgctgaaaaattcaatttcgaattcgttagtttgttacaattaactcaaattattttaaaaaaatatttttcaatattttttaaatgcgtctgctccattagttaattaaattttcaaaatgtgcaaaaaaaaagaaaaaaaatgattgtttccccagaacttattattgttgtggctaaagttttttacgaaagaacggcatcatttaagtcattttaattgtgttttttaatggccaaaaggcatacggcaggagaagggtgaaacaaaaatggaaaatgtcttgaaatacgccaataagaattatttaataaattctttaaaagctttgtttctcatacaactcaagccttaatttttaaaaaatttaaaaaatattcacaaaaaaattttttgaaatggcttcaaaatatataaaatttttgaataaaacgcatgatgcaccatatttaaatgggacattttcaattaaaagataattgtcattgaaaataatgaaaacatttaaaaatttatatttttggttgaattattataggcaaacggaaacgatgtgggaaaaaaacattttaagaaatttaaatatgtaattggttgctttttggtatttgacagctgatggcaaaattcattttaagtgttacggtatccgaggaatttccgcttaattggagatttgtaaaatatgcttttgggttgttttcggagtcactgattattttagataaaaaatgaaatcgaaaaaaaaattttaatatctacatagatgacacttcgtgattagtgttcataattctaaaaattcaagagagggcgaggccaggtttaagtatactgtaaactcgagaagtggtccccaacatggcagagactgaaaaacttcaggtagttgcccgactacagtttggatttatgcaatcatttttcaaaatacgaattcggaattttgctcagaatctcgagtttgttaaagcaatgaaaaaaggcggatgaacccaaccccagcagagggcatcattgacaatggaggacgaacaaagcgattcttctcttttattcccactttcaatctgccattcattgtcaatgccaacaatattcgacagcaccacggaaaagggcattcattcactgtcccataaatttgaataaataaataatccatcggagcggggggggggggaggacgacaaatcggcacgaacaaaaagcgccgaattcgccgccccaccaattcattcaaaatgccgagcagcaacttttttcacaaaggccaatatgtgcacataattgtggaagatagagatgatgaaacagccaccaaggacgagaaacaaagctgatgtttgaactttaaaatgtttgaatggcacagggcaccgaaaggtcaagagtcttgagaggaattatttgattggttgagaagaagtgttgggagtcaatcagttattaaaatgcataattatggatgctaatgagttgttaatgaataagtattttgaataaaattcaagatagatttaaaacttttgtcaatgtttttgaacctaatgaaataggctaattaaaaaggatgacgaatttcgagtgatgacaaaaaagcaaatggctgacagcaaaatatgtgttataatgtccataattatcagttgaagagacccaagcaaatgccgagatttttatacaaaatggcacaacgggtgcaaaaaacaaacaaaacaaaagatggatgagtgagtgagtgggaaagggacgcgcctcgggggaggcggcggacataatgggaattaacggtacaacgacatttgagacgcaaaaactccgctccgcgccgctttgtgcccaccccgtggcgtaggcgtgtcacggaaattcggaaaaagaggcgtaaattttgcaaataatgaatttttggagaaacaaagaataatgaaatgaaagcaaaaggaaaagcctaatttgtgagatatcatcaaatgagcttaaacagtggaggacagaaaacgtttggcgaaatgatgtcataatttttaaggggtggggccggagaaaaaagaatatttggtacaacctcgcgggggtcgttgagctgctcttcagaaaatgggacaaatgcttttgtgattgcttggcattctgtcacgcaataaattgcctgacgtgagggatttttagaatttccgtttccatgcgatcagattttctttccttaaatgcaaaaagtgaagaaaattaaaaaactatt

SEQ ID NO: 8497 - DNA, 1466 bp, Heterodera glycines
ctcattcaactctctcgctccctttcctctctctttatctctatctccttccacactctccttcccttttttctctctctatcttccctaattccactctctccctcccccttttttctctccccccccctctctctgtggtcttttgtttttacctttgtctttcctcccactgagaaagactggacaattggcattcctcgtcggctcagtcccaactcctccaaatcttcctccgattttggacagttcaccgttttgagtgcctaaaagaatacaaattaacaatttgtcaggagtttaattaaatgatttttgtttttagtggcatactgtacataaagaagaacactgtaaatgaccgtaatgccacgggactttcgctttgcttaccatagtcactttgcgaatgaaatagaggaacttccgactgtaaacgtgttggtccgggttgttgttttcatcactaaaatgcgggtcctattgattcctttccattttgagtgcccaccttagctccatctgttgcatttgctcctccaattctcgaattcgctcctccgtcaatgcttcgttgctttcatcctgcgacggagtcagccgatcggcgccggaggggtcgtcttcgccgttcagttcctaattataattggaatttcaaacaaacagcaaatgctgtcgcatcctcacaatatattagcaattaattactcttaattgccttattaattagttaattattccttttccttacattttgactgccttttcgacttccgcctcccattggctctgtcgtgccctcctcctcctcctcttctggtggtgccgtcggactgaccaccaccggcggcggcgctgcttcgtccggttgaaaaacggtggcgccgacaattttcggcaccgtttggtgcggcggttgttgctgctgctgagtgtgaatctgttgttgttgtatttgttgttgttcgattggctccatttgctgctgttgctgttgatgctcaatcactgctttttgtggattttcaaccttaaaaagggacaattaaaaatacaataagaaacaaaggaatttcatcctaattaaattaatggcagagttttacagccaaatttggaaaaatcccccccccccaaaaaaagcaaatacgataaggtcgagaaggggccggggttggattcgcgggacagggctaagccgttgctgctggacaatgtgaatttgctgctgcgtgggcggaggggacgggtgaagaatcaccggctgaacatcataaaaatgcgttcactaattaatcccattttgtctttggttcgtcccacctgttgctgttgttgctgctccacgctaatcgtcggactggcggacaaccgcgtttggtggtggacgggctgttggacgataatgttggccactgttccgctcacgtgctgcggcggaatttgctgctgctgaaagctgt

SEQ ID NO: 8498 - DNA, 5364 bp, Heterodera glycines
ttttgctttttttcgtcatcggttgaccgaatttccatgggttttaccagtttcggtctctccgtttctctttaccaaattgacaatgaacatgcccagctcaccttggccatattggcgttgagaaggcggcggcactttttgtgtccatctctccgccgttggcccatcgttttgtttcgtctgatcatcatttccttccctggcgatctgaaagaattatcacagttttgcactatgtttttggcattttatttcggcactttttcacccaccggcactgccggcggcggagtgatcgtcggcactgtgccgttcccttccgctttaaaatcgtcgctgtcagccccgtacttcagccgttctgcgattttcttttggaactccttcgcgtggttggatttgtccgtttcctccgcctctctgtcctttccgtccgttgttggcttcgtttttctcttcgaatcgttcgttattcccgtggacaaatccaattcctggaaaattggtcacttttttgtgtgtgccaacaaaaataagccaagggaaaagccatggcatttttttaatggctaaaaggcattctcttgcccaagaaatgacctctttagtctccgggtgagtgaacttcagtaactttttctcgcgctgcaattgctgctgcggcggaattggttggccaggaccagtggaagtgaccacgacatttgtctggagggaaaaaggaaggtgtaagtaattaagtgattaatgactgtggtacaggaaaacgtcaaaaaacaaaatgggggggggcaataaacgaaaatagcccaccgtttgcaaatgcgttgtcccttgcggcactatgccatgcgcaaccgaaacggcggccgactgttgggcagcggcggcgacagaaacggtgccggcaccgctcatcacagaaacgggcggcatttgcgccacactggtcaccgacggcattggcatgccggcggtaccatggtgggccggcatgggcatggagccctgagggtgggactgttgctgctgttgttgttgagcaacggcaatttgctgggcagcgagcaactacaaaatggaaatggacaataagaaaaccgaaaaatcaattgggaaatttcgaaattggaaatcgattaattattcggtccgctggccatcacctgctgatgttgctgttggtgatatgcttgatgttgttgctgcggagttatcagcaatgcctgtggcatgtaagcgcccggcacgttcgtcccgtaatattgacccgtggatgggctaaaatactttccatcggtgccatttgcaattttttgctttttcctccgtgtccccctaaggcaattgctaattattaattaaggtgcccacttgtaataatactgctgctgaatgctttgatagatcggcgccgccgcttgcccctgcgggtaaatactcgccgtctgctgataagcggtcggctgcggcattccgccgccggcacccgccgtcggcccgtacatttcctgctgcgttgacgaaatggtgtccgaacgcataatggtggtcgagggcgggacattgatgattgccctgacagaggaaggagaaaaaaggactcaaatgatcagaggaacgataggataaaaaaacattattgatgggaaaatcggggataatcccgaaaaatggtcaaaaacgtcgggatcgaggggaccaacccttgcttaaaatgtaaaaaaacatttttaggacaaaaaagtattccttgacactttgttgcgttataaccttggcattaacgagtcgccttcgcggtgcgtctgataacgctgctgcggttggtgttggtgcgaatgtgtctagaattggcttaaactcagagatggaaaacaaagaattaatccattttattaaaatatttttctattttataagggctctaaattcgtttagataataattaactgcgctaatttgccaatgaggccaattataatgtattaaacttagaaaaatttctttcagactaatgcccatttaattttgcccatttattgggcacttttccctccctttcccatattccttcccttctcccccctctttggcacctgttgtgccattggcatgtccccccggttggccccctcctcaaatcctccgcttaatccctcctgttggtgcggctgctgttgcagcggttgcgtcgcctggggcggcgttgcggtggccaccggcgactgtcggttgtggccattcatttgctgttggtaggggctgcttgttggggcgcgaattttggaagcttttattttgagaattttctaaatttacaatgcttttttaacaaaaaagaaaaatggtcagaatttatttaaaaattatattaaaaaaacgattgcgaaaagcccaaaaatttgtcgaatgatttgctgggaaggacgggcacaaacgacgcacagccgccgctatttaaagcaaattttaatcgggagaaagaaaaaggcaaaacggtggaaaatgctgaagctgcaacaggcgaagattacgcggcgatttcttttctccctttctttcttaattttaccattttttgtggtggcggcgccgtttgagagtgaacaaaagagtaccagcaaaaaatgaagcaaaaagcggtcaaatcaaacaaaggcacacatttggaaagcattcaaaataaattcaaaatattaatcatttatttatttcactttagaaaatttgtgttattttttcaaaaatatgtaactattgactaattgctttagtgcagagctcactttgccattgccattagtgtgactcggttcgaccaattggcctgaaaaagcatttcgtttcaatgttcggttcacatttctctttgccactttgtcggcattttcatagcacttgatttgcccgcctaattgctctttcctacctcaggcattgttttgccatttcaatcaatcgataaattttgtgtctttctttttgccactctttcccatcccactgaatacaaattgtaaatccccgttcgttatcaaagtcgttcgctgataaggccgtacgaccctcgcctcaagcggtgatttgggaaagtgaacggccattcgaaaaacggtggacggaccgaaaccaaaagacggacggacaaaacgaaggcaaagggagggacagacgggcgggggggggggggggcgctaatggccttttttgtttctttttctctcaaaatgggctgctatttatgcccattatatgtatgtctggcattgcctctcagttctgctgttttcctccttcactttgcctaattagactaattagtaattacaattttgttgccccaattgaaaaatgtcaattgtgcccctttttttgactgatagataatttagtgaatttttgagtagaaataaaaacaataaattaactaaatacataataaattgattagattcggccatttctttcggtttcctttcaccacacacattaattaattaattattattcattcatttgttaattcctccgttatttgtctttcggaatgcaaagtgttctctcctccagcaagtgatgagttcagcttcctgtgaacgttatcgccctcgtcgtgtccgtttgttgaacaacccaagtgcctatttgctgcacaattgcgagcccggcatgagcaaagagcggcgaaagtttttgataggtcaattaaactcatttaaatgtttttcatttaaattgcaattgaaaagaatgcccaaggcaaataggaaaaaaggaaataatgaattatgagtaaaaaataataatcgccactgaactaattaggcaataattgcatgttattagtaaagttaacctttaattgattggtttaaaattaaagtgaacgtgttcgactttgtcctctgcgctttgctttggcttctctccgcggtcaccaaaccgtaccagcacagttggttcgacgcctttctcgaggaggtcgacgtgttcagaccccgcttcctatataattcgttgttcgatttgggtttgttgcccgtgaaatttgcccaaattcgaacaattaaattttggcacagccatcgccgcttttctccgcatggccattctgctgattgcttatgcgctactcaaatgcgaccattggtacgaaattggcagaaaggaaatttagaaaacaatttctaagaattaattagacaaaagaatttttaattaggcgcaaaaataatttaatatttggcacttacctaaattgaatgctctctctcacagtgaaggttaccggtggcactgacaacggcaatcacaacaattttcgtggccatcaaaattttctttttcttcgacaaggacaaaagccaaatgcaacaggtcatttcgaaaggggaaaggaggaaaattggaaattcaaaattaaattaccatttcaaatggtgaaatttaattttatgaaaaatttgggaatggaattcgaactcacaatcagccaaatttgtcatgtaattgcaaattttaagaaagaataagccatgcagaattatgagacatataattaacataattattgttaaattcccgcactctttctttgtgtctttgtggctcagtggtaacgctttgcgttttgagtgtttcgaggaggcaatgatgataacataaaatgtttaggatgaaacaataatgacaactttattcgtactgtttgagccttcgaataataaatacttttattgttttttcttttatgtcctttttgttggcacatttcggccgcttttcaagttactaattgttttatgttgttaattttaaacgaatttccttttctatttaaattttgatcaaaaatataaattaaaaattttattttaagtgttaagaagcgaaaaaggaacaaaaaaatatttggggttcgttcgtccccccctccccctttctcctctgggatacacaggaattctggtaaattaagaacgtaacaaatggctcagttggtaacgctttgcgtttttgaatatttagggcaatgatgaaaaaagtgatttgtttaggagctaaacaatgacaacatcagctgtaatgatttgagcctttcaattgccattttcttatttttattgtttttcactttttgatcagaatttggtgatcattgcctcgctttgcgtcgcgtggttcgaactttggctgatgcccttcagagttttgcaacgcgaacagcagagagaagtgtaaacaaagaataaattaatgaatcgagaattgaataaataaaaggatcactcagataatgccaaaacgaactgccgggaagaagtgccaaattaatcactaattacataatttccgatc

SEQ ID NO: 8499 - DNA, 3107 bp, Heterodera glycines
aggtttttattttttgcagcattattcggtagtaatttttaggcgttttttgtcgtttcgctaatccttgaataaattttctcatttttttctatgaaaaaaagaataataaacaatcaacattgttttctcataaaatttgttttcattcaagaaatatctaatttatgtcaaatttaaatgcaactactcaattgtttctaccgattttatttaatttttttaaaaaagccttaaattttcaccacatttttgcatttttcgttatattgataaagtctagaataataattaaattattatacctgaattctttttatataattttaaaaatttatttacaagattttagcagtatttttaatttaaataattttaaatgatgtcttcgagttcttttgaggtttaatttattaccattttttaatttaagtaattattgcatttcagcaattatcgtgcgaaattgccgaattggagaagttacgccaacaatcacaactcccaaatgttcaaaaggctatcgatgagctaattggaagatggaaagtgaaaaaggaagaacagaaaatggttatcggattgctggactttatttaatcgacagaattgcatttttaattcaaaaattaatcagaaaacggacaaagggacagcggagacactttcagccccgacagaagcaccgaaactgatcagcggaagtgtccacgttcgtccgacaaagaaactgaccacttacggtatggaaccactgacttagcggaccgacgaccactttcagaccaaaccaaatcaaatattcttggtatatttcgataaccctaacataagtgttctctattagcatgccaaattaaaaaataatatttgttgagtttgagttcaagaaagcttgtttttttgggcccattggtcgcgaaatatccaattagctttgaaaaaggcagagaaatcgaaagataccaacaatatttaatttggctgactatgaaaaaagaaaatattttttggtccattaaaggcctttccgctaattacccattccgattttattctactaattggctcttgcttttgggcttttcctccttaaacccaaaaattttgggttttgaggcgaaagaggtttcccttcccgcttttccattgtcatcgtttagcgtttgatgagagtgacaagttcgtgaagctgtactattccctgcccggtatttccgactccgtccccggcacaatttcgaccgatttccgtgaaaagttaaaaaaatattatatgagaagaaaattaataaagcatatgctaattgcagctctttttccattgtttgctccgacgtcaaagggattgactacgaaattcgagtgcaaggactttgtcagggtgagttggcattttgtcaagaaatgttttatttaaataaatttcccattttttgagctgttgagccggaaaagtgtgtggtgaaggtgcttatttttatgctgcttttttgaagtaaatcgaaatttaagcaaaaaagcggtgaccaattgttaattatgctgaagaaggcgaaagaacgacaaaattggggatcccttctgaaattggaaaaggaagtgggcaaaagcaagtgagtggtggtaagacggggctcgaagtttttacaaaataagggcaaaaggcttcaaaaaaatgaggttttaaatatagattttgaggtattttttaattgataaaatattcaaaacaaagttttactcaaaaataaagacagtctctgaaataagggcacttgagttctaaaattctacctctccaaataaagaaaagtcttacaaataaagttaggtacttacaattaggagtaatgttctcagttggtctgtccattggtataaaataaaaggtctcatttgttagggcgaaaacgatggacaaagagagcgacccgcaagaaggtctgatgaatatgatgaagcaaatgtacgacgacggagatgacgagatgaagcggaccattcgcaaggcgtggcatgaggcacagagcaaaaagggaacaatgggcatggacatggagccttgaagcgagagagagaacggcaaaacattcaaatattggcgttttattgatcttttctttgttggaatcggatttaatccatttttcattttattttttaaaccgcctaattaaatcgtcacaatttttcaaagggttgtgattttggaattggattgatccctcctaaaaaaataagcaagaatgtcatttagtgcaagtgtggtggcgtggaatgatcggagtcaccgcagtgtcactttgacatttattcgtccgtttccgccattccccaatctctgccgattcgtccgtccactcactgtccgccgctttgctttctcttctcagcctctctcttcgctttggctttcgtcggtggcggatgagtgcacctgctgctgtccctccccctttctttttccctttttttccgtcttcctttttctcttctccctattttccttttctttctcttctttttgaatatccgattccaatcaacaaaaactgcgaacttacaattcgatctgaatgtagaacagtagccgcagcggagagcggacggacctgcttttgttcaattttcacagctaatccatcattggttttgtaaaagcattcaaaaaatgcgatcgtatgatatgcaactctttccgttttccgaactttaagcaaatcgttgatccaatgctttctcttcttccgttctttcccataaattttatttagtaattacggaatatatgtcatttaatacatttacatccttttcgttctgtttgaattgccatgccgtcgatggattttcattctgtgcatgacccctccccccattcggcggtcggcacaattttgcctccgcggcaacacctctcgacgtccgtctcttcttccctaccccatggcacttccatcgccaatggcggtgtccgccaataccaaattcccgacaacacgggaggggtgccccttggtccgatgatgtcctcctccctccaccatttctcgccccacaatccgacggacatcgcttcggttgccaccaatccgcacaatcag

SEQ ID NO: 8500 - DNA, 1880 bp, Heterodera glycines
  unsure (1)..(1880): unsure at all n locations
tgcaggtcnngcgttctggttgagcacanctttgctccncgcttgtccaacatttttagcaaatctgttttctttgtttcgaattggaattcctttgacttttgtcagatttcaactttggtgaccttccaaaaggagagcatcatcaccggttcgcgtccaaagtcggaacgcgcccttagagcagcgttaaaagtaatttgcaccaaatgacaattttgaatggcttttcgcagattggcaccgccgtcgaagcggcggtcgaacgttttgtggccgttggggagacaatcgcagatgaaaaccccgacattcagccggagctgtacgacgcgtgcaacgaggcgcgaatggcgggttagcgatgggatgtaaccccaaaatttcataaataactgaaatttgccatttttagcgatgcgatgggttttttgcataaaataaaacccaaaaaatttcataaatattctgatatttccaattctgaggttcttccattgccaatttgcacaattcgctgctggcggaggagcgcagcgccgaccatccgccggaatttccctctgcgccggctgtcgtcgtcgattccgcccaattggtccgtgccgctcgccaactcctctcatccgtcaccaggtttaaacccaacaaatgggcaaaatgtccacaacatgcaatgaatgcgtcaaaatatgtcatcgtttaattatgaattgtttttgaaattccccctttttttctcaaataattttccgtatttttatgctgtcaaattccttttcacagagttttgctattggccgacagagtgttggtgaagcatattttgagagcggaggacaaagttcgtcagcagcgattaattaattaattactattaattattagttttatactattcatttgcaattcctttaatctaattattaaattttctttaagattgcctattccttgacaaaattggaacacacggccaatttctcagaatttgttcaaattttcaccgaatttggcaaccaaatggtcgatttggcccatcggtcgggcgacagacaagaggatttgaagagtgagaagaggagggcacaaatgcaggtgatgggacttctctgctggtcactgtgtttatttgttgggctgtccccccagggaatttattttttttaattttcaattccggaatcaaggcccaaaaagctccgaaattcgaaaattacccaaaattttaaattttataaaaatgccacttttgaagaatggagaattagtcagcaccttaagaaattttttatttgttaaattttatttatgaagtacaataatatttcagaatattctcattttttgatttcgattaaaaataatcggattttcttttagataaagatttttggagccaagaaaattttttgttaaaaaaataaaggcggaaatcgttaaaattcattttttttaaattttaataaaccaaaaaacaatgccaattgttccctttgtggttggttcctcagaacacgcttccccctcctccccccccccgttcaattccaattcattgcctaattaattggacattctgcgcaggttgctcgtgctcaactcgaacggctgaccatgctgctgctgacctcctccaaaacgttgctgcgtcacccggcggacatggcctcgcggcagtgccgggacggcgtcttccaccaaattcgctctgcccttcaattggtcgcgatttgtgtgacggacggagtgatgccttttgacgcgagcgcggcctatccctccccactggacgaactgtcgcggacacgagtttggttcagaggcaaacttggcacatttgtgatggcacattcgttaaggatggcccacttgacatc

SEQ ID NO: 8501 - DNA, 2197 bp, Heterodera glycines
atattttagaataatatcgccggaggggacgaacaaaggcttcaaaatgggagcaatgagataactgtggaacggctgaaccgaaggctaaaagacttgcgaaaacaactccaagtcgtggcattggaacaggtccaaaagggactaaacgaactccactgggcggagcagtccgtccccacccctcattagaaatgaatttttaaatttgaaagggggtgggtatggacgtgcaccccatagagcgggaaatgcctcgtaaaatgcacacatctctttttttaatttggttagattgccactgttttccgtcaaaatgaagaccaggcgattctgtcctccctgaaaacgtgctcaatctccggggacatcgatggagtggaacgtttcctggaacaattccgtcttcatgccgaacatctccaagaagtaaactcactcactgtttttaaacaaataatacttcttcaaaggtttgccgtttgctccaccacatttcgctgaccgatgccctccacgtgttcaccggccatgccgaacggaatttgcgcgcactcgcaccactggtccgatttaaagcatttatttactattaatatttttcaaacttacaatttttattttccatttgaaagtaaaattccttggaaaatgccaatacaaaaaaggcatttgccgaactctgattttatgttccggtgattgttttatcactttccctgctcatgtcagactcttctcgcgggccgtgtcctttgcgtccatccatcgtcgcgcattgcccgcgagaatttggaagtgttctgcgacacttgggccataaatgttcgtctgatcagtgccccctccccctccccccaaattcaacccaattaggtcaacgacttggcccggatgagcaaggaattggacgcggcttgctccggccggttggctgccgagaagcaggcttacatgtctctaccgaggcccggcgtgagtttgcctttggtgtccccgtcgcccgtgtcgtcccgcagttccgcttgtgccgtgccaatgctgtcccataacccgagctcgtccttctcttcaattatgtccaaaagcgtgtttaactctgtcagtgattgtggggatgtggtggttgtgcatgatagttgcgccctgtcaaacacattgccaagccagcaatgtgccaaaaacatgcaaaaggcagtggaatcggccacgaacggcacgcggacgacgccggtccctttcatggcacagcccaaaaagcaatcggtgccaaattcggacagcggatattctcaaacgattgccaacgacgaaagagaaaggaacgacacatcattttcaatcagcaaaggaaaaggggaagaggaggaagagcgatcaaatgccaaagagacgacagttaatgaggggaaaagggaaaatgcgacaactaaggaaaagcatttggacgacaaagagaagaaaaggacgtcgaaacggtcaaaggaccaaaagaaatcgttttcaaaaagcttatcggttttgtggcgtcggatgagaggggaagaagcgaaaacggaggaaaatgaacggaaagagggactagaaaataaggaaaatgggagaaaaacgatgagaccaaattcagtggaaaacttaccgataaaaggacagatggatattggagaagaagcattcagcaaatcattgaaagttgaattggaaagggaaatgggaaagacgaagagcgaacggagccaaaattgtaagcggaaaaaagatgatccactttactcgaccatacaaaagtcaacggcaggggacacgactaaacaagtggaaaaggtggggggggggattaagcattcactaatcattgaccaataaaaagttacccgtccatttgcaggactcaacggagcacccaattagactaaattcagcatttactgcatacaacgaattcaattcaaaatgccaacagagaggacgcaacggcattttgccattcgctgtcacaccgccgagaccgaggagaatgaaagcaaaagaagctgacggaattggaaagacagcggaggacgaaagaggaatggtccttttcaatcggatttacgggagggaggaagaaccggtcatagttcgacagcaaaaacagaagaagagggtggactggccggagaagaggaagcccagcggggaagaagaagagcatgga

SEQ ID NO: 8502 - DNA, 5295 bp, Heterodera glycines
cccgttcagggaaaatttttcttctgggtgtcaattaattgaaaaacaaaaataaattctgtttttttttccggcaacgaatcgtttgaacttttaaaaattagatattaaaactgttaacaaaaatttgttgaattataaaaaaattttgtaaataaattttggtcacagaaaaattgattatgaaactatcccaagaaatattgtcaaatatttacgttgataaccttttgttatgttgtgatgacccattggttggtaaaaataagatttcgaatgttatttccctttttgaaactgtgtcattaccaataagggaatttgccagcaattcgtccgaagcaatttctgatctccctaatgaccgtatgctcagtggtacgatacataaatttcttggtgtatcatggaacactctaaatgacaatttgttgttaaccgtatcaccaccccctgaaaatttatgtactaaaaggtcaattttgtcttttattgcttctaattttgacccccttggactcatttcccccgtaattcttcccctaaaaatttttatgcaaactctttgcgtggaatctgtcgaatgggaccaaccaattacactaaattcacaaaataaatggaatcatctttttaaaaattgggtacccgctgagaaaattgaaatcccccgaaatcccctcactctcccccttcaaaatcgatcatatgaattacattgtttttccgatgcttcaaatctcgccatgtgtgccgctgttttcctatgtgtttccaatcccaattccgagttttctgattgttttttaattttttccaaaaaaaagttaaaaccaaacataaaggaacaaatttgactattcccaaaatggaactcattgctgcagaaatgggctccaaaatgcttaatttactaattcgcttttaacaaatatttcactaaatccatccttaacctctcagcaacaatttggaaatttcgtacacccgcagccccctggaagggtggccattatgaacgttttgtagccctcgttaaattccatatccgaaaagttttaattggtccccgtccacgtgtttagataatgaccaaataaatcactacattgctttgtgaagttgaaactactgtaaatactcgcccaataacattcgattccgctaatcctggtgacctcagaccccttcgtcccattgattttatacggccattgggctttaatgagcctctattttcttccattgttgagaataccaaaaaataccatatagaaaattttgacagtactaattcatctctaaaagacttatggcatacaattaccaaattatccgaagcctttaaatcaaaatggacaagagattatcttctttcgctaagggagcgccacaaaaaattgggatgccattcaaattgtgtaccaaaaattggggaactcgttctggtacataatgaaaatactccccgctcattatggcacctcgcaattatattggacatattcaaaacagaaacaaagttgcctaatacggcaaaaataaaaacaataacgggtcacattaccacccgttcagtcgcccatttatatccccttgaaacggaaaatgaattttgtaatcgaacatgtgaaccacaaaagcccccaatccaaaaaattaaatggacaccataccccccaaattataaagcaaattctaaaaccatcatccctcacacttccgttccaagggcgtttgtcgataaaaaatggacttgggcccttcagccaccgacagtaccccacataacaacataatcacatttccgtgcccgggagcgcgctgatcgcgttcaatgattcaatgaattttcccacagcccgctccttacgatcacatattaaaatttacacttttccatgtttatcaacttttgccccccccctttttttcctttctgccgctaacatccggcgggccagcgaatgggttttcgccttttcacacgttttcccttcccatcccgtattgtaaattaaaatttcattgaatctcggcactccatttccttataaaatggactttaattaaaaaatattcatattcttcactgtttctcactaatgggaaatattctctcgcttgagtttgcgttccatcacaacccagccccacagcaatcccaatccaacccaatcccacttttggccatcctaatccctatttttttgatttttgcagcggtaatttcatttgtctgcgtccgatttacaactcattccttgtccgttttggcctctgctcaaattcggcacatgtaaatcggcaaatctcaccgccaccgctccaacccactgaacttccgatcaccgccaccgctccaacccactgaacttccgactactcatccgctcccatcgtccctatccccctcaattattccgacggtcgtgttcctttttgtaatttttgtgctgcttccccccattcaagcgcatcccaaaattaaattatccccaaaaggaattgctaaaaataccctcccaatccttgcttcatccgccctgtatctttgccttgattccctagcctctgaacctgaaaataaaccccaatttcccatttcgcttgtgttggctatttttcctgtttggcaggaatcctccttcttatttttattaaaatcttttttattttgcgcaatcgtctttttggaaatattgccaattcccctaattccatttcctcccccgaatccatcgaacttggagaagttcgacatgccattcaagagttggttctgcgaaccaaccccccgctccgctaaataaatttgaatggaagcacgaaaggtgccaaaattgtccccaatttcgatccaaaatatccataaacacttaaagcttagtccttttaaccctcccaatttctctgacgccaatatgccgactgaaaccgatccatcccaaatcgacattacccagaattcactattgtccgttgtacccagccttgagtcatccctcccccctgaaattgccgacattgaattgaacccccgaactccggacactatctattcttcatgccctcccaacacgagaccaacttctccgacaaacatccccaccgaattcgttgttacaattccttcggatgaggtaagttcgactcgtgaacgaatccgaggaccatcaccgccgaccggccaatccatcacaaaatccaagtggtcacaggggtcacgggtccacaaaattcaaatttcattcaccccctttcattctcccacaattgctcgccgtgctcgtcctcgcatcatctctcgtaccagagtcggaccgcatggccaattgcagcactttccgatgagcactcagcgaataccagtccggtccggtccggcatttttgaaaattccgatctctaataaaaaatgcttttttatgcgttttactcaggagaaattaatttgaaacgcaatttaagtatttttggagatacatttttggtcaaaatatgccagattttttgaaaaaagtatttgttaacacttgttttttatgcagatttatgttttataagcagtattcggatttatatgtgctaaaaacgatatattttagcaaaaaaccaccaaaatatttgctaaaaactcgaaaaggctaaaatatgtgtctacaattgaaaacaaattgcaatttttcaaaaaatcgtatgccttatccattccactagcataatttaaaaatccaaattatattgaaacttttcaaggacgaagagcaacaacatttatgtggtcaacgtgggttgacgacaaattttacgaaggggtccttagttggtcgcaatgctcgaccctttccttgacttcgccgcttcctttgattttctaaaattttttcaagaaaaaattgtcaaaaattttttataagaaaatttctcgaatttgaccgggatggacggatgccagattatctgccgctgagtgaaattaatattatattcgtgatcagcaaccccgaaaaccccagaaaaaaacaaaaaaaaattttttttttgtgtggcgtaaagagaaacagtaccgatttgaaaactttttatttttttcggcggagttttgtcccgctccgaattctttaccattgacgaaaaaaatcattacgccatcccatggaaaagtttctaatgaaaattgccgatttctttctgttcagcttggtgctgatcaacgcgctgtacttcaaaggcacatgggtggacaaattcaactcaaaatgcctgggattgcttttagtttgtctgctactattaaatttctggacgagtgactgtactgttttctcaagtaagctttacctaagcccaaatacttttcgaaaaaaatgtttttttgttttctgaagtcgtgaaaaaatatttccgagggttttctgggtctctgatcacaaatccggcattcatttcgatcgattcttaaacctggacccaaatcgaacaaaaggtcggaaattcaatttttcgattttccattagtctaaaaatggtccaaatgattgaaaaccgaaaaatttgaattttcgactttttcttcgagtttgggtctgggtttaagaattgatcgaaattgtctgcgccatatttttatttagttattaagaaattaattatttttggttttttagggatttggcaacaccgctttttagtaagataaaaacttttgggggattaattttttgtcacttttccattttttctccaaacattgctaatctgggcccgtatactgtgctccgcccaccccgatggcgccgctatttaagaacgatgtgccaatgactcgcgtcttgcttttctcacttttgcttcgctgaacatccacgacgaattttctcacccaaattttgccgaattcatttaaaataaataaaacaaaaaaatctcatttgttcacattttcccttgtctgtcccttgctttaacaaatttgggcgttccgacatttggccctttgccttcccttttgtgtctttgcttacaattagaccaattttggcatttgccatttggccgcctttcgctttcctctttgcgttgaccaattttggcgttctgcgatttggccatccctttgcctttttctcgcctttgctttggccaaccctttgtcactctcgccttcggcatttgcctgctttttctcgccttcgcctcggccgactcctttggcttttcccttcggacgccattttcaatccccctttaccctggtcagcattcacatgcctcgggaaagggaaacgtttt

SEQ ID NO: 8503 - DNA, 992 bp, Heterodera glycines
ttttttccaactatgtccgccataattcgccaacaactccaccctttgttgttggatattttggcgtatgttgccctgggaccaccattcgaggctttgcccaatgagctttgctcattggacgccaacagctcaacgagagaaaatctcgctcgtactttggcggtgacaaaggatcttttgaaggagtggacatatgtctactttggaatggagtggcccccccctctcttttccccggccaactctgtgtggccaagcatctctccaattgcacattttctcggatgcgggccctaacactttttctgccgctgtttacctgtgcgccgaacaaaatgggtgcgcgaaaatcgctttaatttttgcaaaatcccacctaagacccaaaaaatttaaaaattatggcttaaccatccccgggttggaattgttgggactcataacggctattcgtgccaaaaatttcgtgatttccaattttgaccgacaattcgaaaaggttcatttttgggtcgattcacaaatagttttgtcttggttggccagtaacgcccatcagcccatttttattgccaattgaatttctgaaattaggcaggaaaaaggggccatcttcaggtacgtaaggtccgcagaaaatgccaaaatgccacaggccgagactgctgagctcatttggagagccaccctcctggtgcccaaatcagcggaattctcggcagttttttagcaactaaaaatatcatccctaattaaaatatggcctaggttaatatttcaccagcagagtgccactgcgtgtaaaatcaaaaatctttgactaaattttaaaatcaataaataattggtttctctttttacgcggaaacaaacggcgcacactgctaacgagactaatccaaccttctatatgtttgcaattaaattataattaacccattttaattaatggattttttctatacaaatctcatcgccgattttcatat

SEQ ID NO: 8504 - DNA, 5218 bp, Heterodera glycines
ttgtgccaattattgaccaattcagcggagaatgggaccgttcggaattaattgaaaaaatgaagaaatgtgttgatgtttttgtactttgactgctcgacagatcttcttcaccaaccaatctcaccaatttcttaatttattcatttctgtactgtttgtcaattttaaatttgaaaattaacatcttccattcattaaattaaagaaatatctgtaatttaatctgctgctggttatacccgtttcaatatgcaatggaaatatccccgttttttatatagtcatttaaatcggtaattactaggaccccgttacaatactgccgatgttatgcaggtttttcgagacaagagaaaaagttcgttctagagactttttaagggttggagaatccgagacgggctctcacttggcaaatttatctttttaaaaaatattttttggttttagtttcttattaaaatctgatttcggggttagaaatgggacgaaatggatgttggaattggattctcagacgccgaaaaccttaaaataattatctctatgaaacaaaaggtttccctcattggttttcgatcaaaactatggatttggcaataatttttaattttatggaaaaaaagaaattgggtaagaaacgagaaattgtgacaatttccattaaattcaaggtgtgtaattaaagtcaaaaggcgaaaatttgcattttgtttggacaagatttttaaaaaaaatattttttggtactttcctatatttgaggccacacccaaattttaaaaaatcaacaaaagggcccgcaaaataatcaaggcgcgcgtaatcctctctctagtgaggagacataaatgcaataatgcacataaaatttcgtcatgatcagctcctctgtgtttgcagtcttcacgccagagaaattcacataaataagaattgaatttttgggtgtggcctcataacaggaaggtacctatttttttataattttgaatttaaattttaaaaggcattaaaaaggtttatgcaaaatagaaattacaaaaaaaaaaaaaaaaattgcataaatgaaaaaactagagttgagcgggaccgggaatttttagcaaaaccgggacctaatcgggttgaaaaaccgggactttttgactgggaaaaccggaaaaaaaccgggactagtcccggtcaaaaccgggaccttggtactcagttgtccgctaccaggtcccggtcccgctcaactctagaaaaaacccatcaaattaaaaaaaaaacatacaactaattgttgtccaactgttacgccccccagtcccaaatgaatggacatacgatgaaaagatgaagcaaagaaagaaagacagattgtccaaaaaaaggattttttgaaatgatcggtgatcaacgggaaacattttcgctaaacattcgttgggttgggttgtttgttttctttcttccgttctctgtgctgtatgcagttccgctgctgatcacaagaaaatggttgtatctttttcaatgccatatctattcaatgtttctccgtccttaattacaccgtatgggacgcgtctaatttgtccgggcacaatgccaatcttttgtccgatcttttgcctcagtgttgccacagtgtccgtgcccttcacttcaacggtatatgatttgtaaccatatcttgcgaatatttgaaatacttcatcatcatcatcagcgatggatgaagagggcatcatcaaaagcattgccattattagccaagcagaagcgatgccaacggcggagagcagtgaaaagccaaaatgattgttcttcatttgggcaaatttggtgacaataagaatgttaattaatgagtgaatgaatgtgggatctgttgcttcgtgataggtatagggctgggaatttaagtcacgaaaaatctccaaaaagtggactaaaaaagccataaaaaatcgccaaaaagtcacaaaaaatgcatgttagaagcttcaaacaaagtgtggaacattttaaagtcatttttaggccatttaagatcagcaaaaaaaaagtcagttgacttaaattcccatctctagtgatcactttaatttggcaaaattatagtgaattggcaattgaatgatcactttaatttgacataattatagtgaattggcaattgaatgatcactttaatttgacataattatagtgaattggcaattgcaaaatatgtatgaaaaaatgcgaaaaagtcagaaatatgtataaaaataagtactatgtaatatatatgtagaaaaaccctgaaatatgtaaaaatatgtaaataaaagtcccagcttttgttcacaaacacaaaaaagaaagtgtttttcctactattcagagcatggagaagccaggaaaaaaaaaatgtatttacataaaattggtagccctagcaattatagtacatgctcatttttgttcaaaaattcaagtgattttcttaacaaattgcatttctaaaacctaaagtttcgcccagccttgttcccaagtgattatgatatttttttataaaataatttcattttctggtcaattattattattttcattttttgccatttattacttttattgatcaaattcaatttataattttagcatataagcatgccatttttctaataatattggaggcatttctttataattcatgcccatttacaggcacattaatgcgttggcttaatgccattaaataatgttagatttgagaagaagcaaaaaggcaaaaattggcataatgccaattccatggtctagattttgtgactgtcttttcacttatccaattaaatcttggtaatatttaatttttgtgtcaacggtgtcaacaggcgcggccggcaaatttcagaaattttgttacaattttaaacgattttgcacctaaaaggaaaacatttttaactttttagtctatattttagaatagaagataatatttaattgtttttaatttttaatggtaggtaattttcgtaaaataaaagaaagactggaggtttagtcacaaggttatatgtttctgtacaaaaggtggtcaaaatatgtacataaatatgtaagaataatcccgaaatatgtacaaaaaaaaaaaccaaaatatctaccaaatatgtaaataaaatttttaaaatggttttttttttgcaaaaaaattcttcttaatgggtgaaataggcacaaaatgcaataaaaataagctaaacagtcttagaatcacattttaatatttataaattaattttttatttttatgggtacatttcaaaaaataaagaaaatatttacgaaaaatttgccgaatttttggatttttgaggatttcgaaaaatttccgtagtaaatcctcaaaatatgtaaaaaaaaaaaatgaaaatatctaagaaaaaaagtccaaaatttgtaccaaatatgtataaaatccctaaatatgtaaattcccaacatttgttagcaaaacacaaaaaaaagcaagtgtttttcctactatttagagcatggagaagccaggaaaaaatatgtatttacataaaattcccagccctacaaatcagtaattaattaatggggcccggtatttttatggatttacaccaaagcgcgcatcgaaactttgctagttctgccgatggtagcttttccgagacaagataaaattgttgaagagattttcagagtctgggaatccaatccgcttctggtgctggataagtcggttccgccccactttatggcaaaatttgttttaaaaacaattaattttcgacttgttcgagtctagcttagggggttagaactgggtcgaaatgggtgcagattcggattctgcggcccttaaaaccctaaaacgatcactcgaaaaatcctattttgtcaaagttttgcttttatcattctttaattttataattaatttttaactcagtaaaagtgtgtaacacttacctctgtgaagaatatttttctttaaaagagacatcttttcgcagtgggacacttgcggacggacatttgcggacaatttcgggaaaaaataaaaaaatttcgtaaagaaatttttaaaaatttctgaaaatatggaatgggactgaaaactaaataaaactttgtttttgggcttttaggcctaatattttatttttacatttctaagaaattaatttcactactggtattttaagtgattaaaaaagtaaaattggtccccaagatcggggatgtgaaatttttccaccgacattttttaaatttctctagacatacagacaaatcttgttggggaatttgctactcgccccctgaattttcttttccttttgttcgggatggagaagaacccaagacacataagtcttgctctacttttcatcagcagggaaagcatttgaggccccaaaaattttcaaaaaaggaaatcggaaatctgatgcccaaaaatgtcgggaatcagattttagtacagctgcttagaatttattatttaaatccaaatctttttaatttaaatctagcaagacaatgctcttcatttttgtggctgtggcatttagtttcatcctttattattatcattcaagcagttaaaaattgtgctttaaatttaattaacaaagttttaattaagatttttcttatttcaatattagtattatttgtaataaaaacattcggaaaacaattttaataaagatttaaaattgaattaaaaaggatttaaagttgtttttgaaaaatatttttttctttttacatttaaataattatttgataatcaataaatcttttgtttattcaaattcttgattattttaattttaaaatttaattataaaaagattagttatagccttttcattttaactccaattgtcagtgttatcacttcttaaaataataaattttaatctgttttatgaaattaaaataatttttataaaaatattttattaattgttcaaacgaatttaactattccaataaaattaattattttttattacctgatatataattatcattttttaggataataaattttttaattaattatttattatttatactgacaaaatgtttatgttgtttctcatgttagttttttcaaaatataactttccttttaaaagaaatacataatgatttaattttttttcaagtttaaaacgactct

SEQ ID NO: 8505 - DNA, 1148 bp, Heterodera glycines
cgcaaatgtccgtaaggccatcttttgctcaaatgaaagaattggacagagggcaaaaacgcaggaaagactgggaaaattttaaaaccacatattgtgagcccacccatatttacaaaattgcttttcaattagacgatttaaaattacaattaaattattattattttttcttttctccaatttctattaataccaaatttggtaattttatggaattgggagtcgaaaaccaaagggcggaagagggactttttgatttgtaaaaatgatcggtgatcaacgcgaagcattttcgctaattattcgttgcggcattcttttgttttctcttcttccgttcttgctgatcacaaaaaaatggttgtttctttttcaatgccatatctattcaatgtttctccgtccttaattacaccgtatgggaagcgtctaatttgtccgggcacaatgccaatcttttgtccgatcttttgcctcagtgttgccacagtgtccgtgcccttcacttcaacggtatatgatttgtaaccatatcttgcgaatatttgaaatacttcatcatcatcatcagcgatggatgaagagggcatcatcaaaagcattgccattattagccaagcagcagcagcgatgccaacggcggagagcagtgaaaagccaaaatgattgttcttcatttgggcaaatttggtgacaataagaatgttaattaatgagtgaatgaatgtgggatctgttgcttcgtgataggtgtagggctgggaatttaagtcacgaaaaatctccaaaaagtggactaaaaaagccataaaaaatcgccaaaaagtcacaaaaaatgcatgttagaagcttcaaacaaagtgtggaacattttaaagtcatttttaggccatttaagatcagcaaaaaaaaagtcagttgacttaaattcccatctctagtgatcactttaatttggcaaaattatagtgaattggcaattgaatgatcactttaatttgacataattatagtgaattggcaattgaatgatcactttaatttgacataattatagtgaattggcaattgaatgatcactttaatttgacataattatagtgaattggcaattgaatgatcacttaatttgacataattatagt

SEQ ID NO: 8506 - DNA, 2898 bp, Heterodera glycines
cgattgtgtcgttccaatttttccctctcattttccattaaaaaatttctccaatgttctgttttgtttattcaacatcaaaacaattgccgacctccataaattgagtaaattttattcaattttattttacatattaatttgtcagtttggagttttgtgaaacattttggaatttctttggagggaatgactgtttcagtaaaatgaaaagagagtgggggcaaaagagacccgtctttttgtcggttcgaatgctttgtcttttttggccttccgtttttcactgtatcgttgtcctcattctctgcccagtcggcttctctgtcctttcactgcttttcctcgtctcaatgtacgcttcgtctttactgtctcgagtataatgcaccccgggcaaactcagcacagattcctacaattgccaaatggaagggggggggggtactgtactgagaaaatgagcaattgtttcatactgtgtctgggagggagaacaattgtgcgggaaaacagttcagcatcggatggcgcattgcatcgatggcagaaattctgtatttcccttcgtactgcaaaacgacggccaattaaatgactaatgaatcatcccctggggcaatactaataaaaatatccccaaaagttaaccttcaagagtttgctcaacaggtcggcacgttcgggcgaaattcggggagggttaagcaacggtttggcattgtgttgtcgaaattggccatttttgaaggcctggagggcgcaaatgtcggcatggaccgcgggagagggcgtgccgagcttttggaagatcagattcaattgttcatcagttgtgctgccggggaacattggctgaacaaatgggcaaatcgaattaacaaaaaaagaaaaagcgatggcgacggaaacggcactttgtggagaagcatttcgtagagaatgcatccgacgccccacaagtcaatgtgcgtggaatagtccgtggagcctgggaaatggcaaatgaaatgccaacgccgcgggggaaacccattggccaggcttaccgagcagcacatcgggcggtctgtaccacagagtgaccacttcgttagagtacgttttggtgggcaccgactgagcccgggctaagccaaagtcggccaatttgagttcgcccgtccgattgatcagcaaattctgcggcttcaagtcgcggtgcaaaatccgccggcaatggcaataggccaacccgcgcaaaagctgcacaaggaacagcttgacattggcgatgctgataatcccgtccaactcctccatgtactccctcaagtcgcgctccacaaattcgaagaccaacgtgagaatcctaacggatggacttttgggtgagggcaatgagagataagaagggattagttggtcattctgcgcctcaccccccccccccctttggccccattgcttttcgtgggtttaaatggcaaaatgccatcctaaaagtgtgccgtgtcacctgtccgtgtacacaatgtcgtgcagcgtcacaatgttcgcgtgtcgtaagtttctgagcagtgacacttcccttattctgaataatagggattcttttcattttcgtccatttcactaatctccccatcatttcccccatttatcccctccaattggcttttcctcctccccccccctttttcccctttcaacgtgtgccatcggcggtcccttacgctgtgcacggcgcgccctcttcgtgttccaatcgtatttccttcagtgccacgtttttgccagtcaacaaactcttgcccagataaaccgtcgcgtacgttccctcgcccaaatcgaatatttttttgtacgtctccaatttgccgaatccgatttcgttcagcgacgcccttttgctcttccgcgtcaacggattgtccagagttggcgttctattcaatttgtcgatcacattttggggcagacgaatgtccggcggaagtgacagtcgcttttggatgtcttgctaaaggggggaagtacagcttcacattcacggaaaggccacgatcagttgaaaggacgagactctcgagcactgtccaacacaaattgttggcattttacgaagtttcaaatgatgccattcttttcacttttcattttttcctcattttctttccttttttccttctttcaccaattattttctgatgatgataaacaagaatcgcattctctctcggagattattatgtaaaaaatattctttccacgtcccatttaattgagtggcactaaattaaatcgaaaatgttttaattggggggggggggaattggaaaaaaagggggataatggggaggaaactaatgggggggggggaaaaccccggaccaaaagtgtgtagaaatgacgtcattcattgcaacgcgaaattaattagtgacagatgaatttgttaataatcccccaaattggccaatgatttccaattcgctgctcacttcgctccagcgtcggttcggcttttggcgaagtttgaccttcggaatgtattccgtcttcgtcgtctgtcgcccctcccccaaatttccgtctccgccacccgccgactgatcgctcgtacacggcgacacttcgatgctttcgccgtccgagccgagcgcactgctctcgtggacaacggctaaacaaaggcttattcttccgctgttccgtccgtccgtttgccgtgccaatcattcgccatttgccgccccccccccggcgaaaagccttacagagagagacggacggtcggagcggtcctccgttgggcccggcgacccccgcgtagcaactttggtgcatttggtgcatcgtccgactccgattggcgcccgttgctgccgcaaagttaaaatagcattttgccggggg

SEQ ID NO: 8507 - DNA, 1045 bp, Heterodera glycines
ctcgctaaaaatgaacagttcggcaaaagagaagtgacctcatccctcttctttcttctcactcccgtgccttctcggtcccttttccccctcttccccttcttcctccctcttccttgcctcttctttttcatcagtcctttccccctcttttttcccctcttcccctactgtctcttcttcctcacctcctcctcctccccctgctgctcctcttcgtccatctcttcctcctcttcttcttcctcctcaattcgtcctctcgatgacagcttcagctggcccatctctcgctgagtcaactcacaaaaatcgtgaaatgtgatggattttgataattcgctgccgccggcacttccaccgaaaattcggctttgaggacccattgaaagtggcggcacaaaaggaaaggtcagcgaattgtgaattttgcgaatttggcaatttgatgtgtggcgatctctgatctttcatccaattggcccaaagaaataattacgctcctttcgccggcgtttttgccgttagcgttggcatttgccgttgcatttcttcaaattgaggggggagggcaatgaatgttttagctaattatcgcgacaaaatggcgccaatgtgtgcaataaaattaggagaaagggagggggaggggaaggctatttaagtatttatggagaagtgccatgaaaaaccgtttaagtgagagggagggggagaaagaacggaacaaatgcatatttagtgaattcctaatggaatgaatggacttaaaaaggggaaagtgcgtgtcgagagtgttttgttgtacaacaaataatggggaaatgttttgtcctcagacgcgacaaaacttgcccggtttgggaaataatgggcagaagagcaaaaagagagaaatgcacaaaattggggggggggggataatgaggggacggaatgattaagaaaaatgtgacaaaaggggggggcaatgggggaaaatgggagaaaataaaaatgaatgaatgaggcggggaaaaggcacggcaatgggtttggggggggg

SEQ ID NO: 8508 - DNA, 1884 bp, Heterodera glycines
  unsure (1)..(1884): unsure at all n locations
atgcagcgggtcagacgaaattggggagagtggaagaggaaaagggaggggaggggggagaggtggtcaaaacggatgaaattggggaagggtcggtcgagtcgaccgtacggacggacggacggacgaatgactaataaatggaaggatggagcaaaaaatagatgggatgaatgaagaatggaaacgaatgggcgaggaaaagtggcgttcagtttatgccaaatttgccccgtttaaatagcgacaagagaagaagctcgcagtcgcctcttcccccccncaaattggcggattgccgttcaatttgaagatcctccagtaatatgccatctgacaacggctaatacaaatttgaagtgatgcgggaagaggtgacgcagaagggaaggggcgaatgattttcttttctccggccaaacatttccggcccagcgcttggctgagtcggtgatggacggacggacagacgggcgaaggacgaggacgagattgaggagggacgggagggaggaggacgggaagcggcaaaattgtccgtgacaagcggcaaacactaatttggacttggtggagaccaacagacggataagggagagaaggaaaatgggaggagtgaagagaggaagcatggcatggaaagaaaaagaaaattatacaaaaagaggggaaattaaggggaagagaggagatgaatgggggagaaggaggaagcacggaatggtaagaaaataaaatgatacgagaaaagggaagggagggaggaggcacggtatgccaagaaggaaaggagggaagaatgggaaaaaggggaaagagagggaggcgggaagagaagagatgatgagagagaagggaggaggcacggaatggtaaaaacgaaaaataaggaagagttgaaatgaataaggaggggggggggcgatgtccgctcttcccgacattaggacagaggaaacacaaaaaaagcgaaggaggatggatgaataaaaaaggataggggagcacagggatataagggatttgtgggaagcaaaaatcgatgaacaaattttgagaggataaaagccgatttatgggaagagagaaaggaaaaagcaatgggaaaaaagaaaaggaaaagcggatgaatacagaaaaaagggacgaaaaggaaagaagaagggaaattcgaggagaaggcgcatttggaaaggggagagattttggacgaatttgggaaggatggaaaaggggagagaaagggcgaaagggcgggagtcccttgggatatccatcccatgccacacaaaagcaaaataacctttccaaagccactttggcacattgcgaccatcggcccgggggaggctttatttgccatgggcaaaaggtctcctggcaactcaatccatcatcagcagagggagggggaggaggagagggaggagagactgttgctcggatgcgagggacgaaaagcggcaaatcccttcggcgggggacagtcattcattgacaaatgagcggagagtctgtcaattttttggacgggggaagaaaggaaaattaagcgaaatgagaggcaaacggaaaccaattaataaattaggcacttggaaattcatgaaagagcctcggtggatgaatgttaaaagggcaagcgaagtgttgaaaagggcgacgggggaaacgccgagagagaggggggagggggaggggacgaagtgcgcaggttggcgaattcggagacggaatcccccgaggggcgcgagcggccgacgaaactgacaatgacggacgacggatgggatgagtaagtgcggcggagggaggatggaggatgatggggcaagggaagggtggtgggggggaggagagtgaattatatcggtgaatgagaat

SEQ ID NO: 8509 - DNA, 5011 bp, Heterodera glycines
tgaatttttgcaggctaatagaggcctcttggggctctcgaatgataccaagaatgtttaatttgcatgtttcttgaaaaagctatggagaattaaagttgtcaaaatattttatggttgtgtgaactacaatagagccattatttttggtccatcaaaatttggactaattaagcctcgaatttttttttgcaaaatatatttttacgtggaatttattccgcctgccaatgtacctgttggcattggtgatgctaccaaaccaatggtgctgtgacaacaaaaattcgctgcagtcgtcgagaaaagtcgtcttggggcgaaaaatgaaagatttaaagtcggcattcaataaaaaataatcgatttgcaacaaagtaaaaaaaaaaattaaattagtaagttaattataaaaaacatttgaaaaataagtaatttaaaaattttagtgaaattttccagttttttaaaaagtgactttttgcctagagaccggggcgggaccggatcccgcgtgggattttgcgggatccaagttcgtaataacacattttttggaaaatgcgtgatttgcggggttaatcccgctgaatcccgtcccgcaaaattttggagttccaatcccgcatcgagatctgcattttggtttttgtgcgaattacattttttgaaaatctaaagacataatgccacatatttttgaatggatttattaaattcaattaaagaaacgcatttttagcggtcagggtcgttttcgtaccgccgttttcgtacgggggacattttcgtacgagttcttgtacaagcgtcagattcaattagaaaaacttatgactaactaatcaaaccaaaattttatcattttttaatttcccatccataaaattttgtagaaaattcataactttaacaataacaaaatgggacaaattagggtcgcatctcatagtttcgggaaataccggcgagaaaattgttaatgttttcgggattcacattgggattggcataattgtgattagagaccggaaatttcaaatttgcggatcctgttgcaggattggaattcaaaattttttacaggacaggatccggcaggattaatcctgcaatcctgcatttaaaatctgcaggatcctgcgcaggattgcggattttaggaaatttcaaaaaattctgtattaataaaaaagtctttcaaagtataaaaaagtattcaatatatttttaaaccaaaaaatgatgaagatgaaaaattaataacgtttttttgcttacactccaagcaatcgactgattcttctttaatgcgtttaaaaagaccgatttgccaaattgggtggctcataataatagcttaaattaaagtaaaataatttttatttaaatttctttgcaaaaaagccataatccattatgtatagggatgggatttttaggcacaaaaaatcgcgaaataggcacttaaaaaggcagaaaaatcctaaaataggcacgaaaatagtaaaaaaaaatttttattaacgctttttaggtagcaaaacacataaaaaattcaattgtataaacttttttcgaataaggataagtttttaaacgaaaaatttttattagaaaaaaatttttgaaaaaagaaagtttctgaatatttggcattctttttttttaaattttcaaaaaatcaatgcaggatcctgctgaatcctgcataaaaatcaaatttgcgggtcctgttgcaggattggaattcaaaattttttacaggacaggatccggcaggattaatcctgcaaatcctgtattttccaaaatatgcaggattgcagactgggatcctgcaaaatcctgcgcaggatcctgtcctgcgccggtctctaattgtgatcattttgggggacaatattgacatcgttataacgttggacgagacgaagaatccgtgaatcggcatcgcgatacttccttttcttttggggtgcggcttctcccatcatgcaacgtgccatatcagcatcaagcgccttctgctcacatctgatcgtgtcaatgaatcgccaaattgttggatgagttcagctaaattgccgataaagtttccgatggaatgcctcggcgaagttgttcgtccgatcagcaccatccaaggtgcgctgatgaacattccattcgtgtgggtcaaacagaggtgcgtcattggaacattgaagcgcattctgcccgtgtagttgtctagaaacctagaaaaaaaaaaattcataaaattcgtcttcggacttaaccaattgaaaacgccattaagttgtggctagtgtaaatgaccattatttaatggtttaaacggtaaatgtcttaccgttggggtccattctgtccgtgaattttaaaaacgccagtgtccgccaacaggaattgctcctcgtcaatctcagtgcgcttataaacacgatatgtattcggaatctccaactgctccaaattgagaggttcggctcgcggtgcattttcatcacggcgcaaacgtttgatgacctgaataaaaagaaaacaaaattatttacaaaattgtttttgatagtaacccaccttttttgtggcatctttgctcggaaaagaggccagcacaggtgtgcatgtgttttgaagcacttgagcacgaatggtcgcaggtgcttttcaaaatatgtaaaaaatgaaaatatatatgaaaaaatccaaaatatgtacaaatatgtaagaaaatcccgaaatatgtaaatatgtataaaaaccccgaaatatgtaaaaatatgtaaataaaagtcccggtttttgttcgcaaacacaaaaaagaaagtgtttttcctgctatttagagcaagaagccaggaaaaaatatgtatttacataaaattggcagccctagtgctcagttttcagcacaaaaaatcaccgattaagcactataacagcataaaatttttccaaaataagcatgaaaaaagcacaaaaaaggcaaaatcagcacaaaaaattggaaaaaagcataaaaattaagagattaaaggcaccaaaaattgaaaaaagttgtcaaaaaacctttgtttgctccctgattataaaaaatctccaaaatatgtgctaaaaatggtaaagagtagagcacgactaaaaaggcaccaaaaatcgcgaaaaaggcactataataggcaccaaaaaaatttaaaaaaggcatgaaaatccctaaaaaggcatgaaaaaaagcatttgaaatttttctattaaggattttagggagcaaaactcgtaaaacttaatcaaaaaaatttaatttgggtcatttaaatgattattaaaaattttataatttttttcgaataagaaaaattttttaaccttaaatttttatcaagaaaaaaaagaaattttggcgatcaatttttgaaaaatttttcaattcttagtggtgtattttctaaattttttttttttggtcatttcttagggtgtatttttcttttttattgcgtctttgttaaggaattttcggaaaaagccaaaaaaggcatttaaggcacgaaaatcccaaaaaaggcataataaaagtctaagtagaagcctcaaaccaagtgaaaaatgtgttatttatgcttaatatatataaagtagtacggagaaaaaaaaggcatatgcctcaaaagtcgagctttaaaaaagcaaaatcttgtcaaaaaaataaaataaattttggtttcttagtggtgtatttttctgaaatttttcggatcgattcttagggggtgtatttttcgtttttattgcatttttgttaataaattttttgaaaatttctgaaaatattttaaaaagttgctcaaaatgacgaaactgcacaaaaaaagcaccaaaatgccaaatcagcacaaaaaatcgggaaatcagcaaaaatcagcatgaaaaaagtggacttagaagcctcaaaccaagttagaaatgcgtttttcatgcttattattagggctggtcgggaccgggaattttgacaaaaaccgggaccagaaaagtcgggatcgggaccggaaccaagtttttcgaccgggaccaggaccgcgagaaaagccgggaccgggaccaaccgggaattttcccaagagaaaattttttgaaaaaattttgaaaatttgagtgcactttgttacaaaaatttcctaaattcaaaaatgtgcccagaagaattttaaattttcttttgggggaggaattcgaggaattttctattattctctgtttcatttcggggggggggggatctggaatcttggaattttctgggtcccaaaattctggatttttaataaattaaaatttcttaaactttttcttttaatcgctgtaaatgaccaatatttggttaatttgttattttttagcctgtttgaaaattaaataaaaataaaattggaatattttattttttaattgaaatttcaattacaaaaatggtaaagaaaaactagaaaatattctgctcaagtggggaattgaacccaagcgaaaaataatgaaagacagaaggtttagccactagaccacagaaagatgtgaaaaaaaggcaataaataaaataaataatttatttttttttctcaaagatttctccttcttcaccaattcccttctattttctcacccagaccccattcttaccagtgcttgtttagtcccgccgggaccgggactggcaaaaccgggaccgggatttctgtttttccaaaaaccgggaccgggacctgaaaaacccgggatttcccgccccggtcccggtcccgaccagccctaattttattgcattttttaaacaaattttgggcaaaacgccaaaataggtgaaaataagtttttaaaaatttttttaggttttttagttgctaaaaataaaaacctagaaaataggtgctaataactagggttcagaccccgcccccgtccccggggacgggacaggtttttagggctcacccccgtccccgcc

SEQ ID NO: 8510 - DNA, 2421 bp, Heterodera glycines
gtggacgaaaaagacgaaaattttgaaaaaagaaaccatctgacaaacattgtcagtgttccgtttaattgaataattttcattttttgtaattttcattttttaacgatcaaacttaatgcgatacatataaacttaatccttcttgaacaacacagctttctttttttatgttatgtacaaaggtgtataaaacattttattgcaatattatttattttcaattttgatcattatttagagacagaagagactgtttgaattcaaaatgcaaaatcattgacggtgacgatggttttgcaccagggctggacgtaactgattttcaattacggaaatccgtaatccgtaattacggcaattttttcagttacggccatccgtaatccgtcattacagaggtccaaaaaggccgtaataatagggctggtcgggaccgggaattttgacaaaaaccgggaccgggacttgccgggaccagaaaagtcgggatcgggaccgggaccaagtttttcgaccgggaccgggaccgcgagaaaagccgggaccaaccgggaattttcccaagagaaaattttttgaaaaaattttgaaaatttgagtgcactttgttacgaaaatttcctaaattcaaaaatgtgcaaagaagatttttaaattttcttttgggggaggaattcgagtaattttctattattctctgtttcatttcgggggggggggatctggaatcttggaattttctgggtcccaaaattctggattttttaataaattaaatttcttaaactttttcttttaatcgctgtttttgtggcgctgttttccaaaaaaaaaacttttgggaacattggtgagggggcggcaggatccggaaaatttttgaaattttgagtgaaatatgttaacagaatttgtcaaaaaatgaccaatatatggttaatttgttattttttagcctgtttgaaaattaaataaaaataaacttggaatattttattttttaattaaaatttcaattacaaaaatggtaaagaaaactagaaaatattctgttcaagtggggaattgaacccaagcgacaaattatgaaggtcagaaggtttagccactagaccacagaacgatgtgaaaaaaaaggcaataaataaaataaataatttttttttttctcaaagatttctccttcaccaattcccttctattttctcacccagaccccattcttaccagtgcttgtttagtcccgccgggaccgggactggcaaaaccgggaccgggatttctgtttttccaaaaaccgggaccgggacctgaaaaaaccgggatttcccgccccggtcccggtcccgaccaaccctatttattatcacgctccaagttagcaaaaaaataacagcatatgctgcaaaatgagcactctactcattttccatcgcaaatttcatccaaaagacttttgcgcaatttcatgtataacttttttggtaattgtctaatcgcgaagcaatagcttagaaatagcttctaaacatgttatgctttcgaaggataccaacaatgttggatttggatgacaacaaaaaaagttatagtggaaaaactgctggggcccaaatatgacgacccaactgaggtagacctggaaaaaaggcggatttttaatttttggttttcgcacatctctgttctgctggtgcccatggtgttggcagacgccaccgttagataatttgaaaaattattactctatgtacagtattttaacatactttactccaaatggccaatttgttggtttttggtcaaattttgaaaatttttgtggaattttcgaggtcctgcggcgcataaatcctccggggaaaattaataaagcgacacctaactcatttctaaggatcattggatgaagcaaatccgccgagcctgctgaccctgataaacaacgaacacgacatttctcaaccccgacgatggtgggcttgacttcgttcgaatcaatttataaagttaaactctgacaaatcgtataaagcaaatattatacaattcattacaattatatttttacttatttgcatattctgtatgccttgccaactgtcaatagctacgcattaaaaccactctctgccaattctttcttcaatgttttaatgcatagcgtttatttcttatattttatttcagctatatttttgcgcttttccatattctgtatgccttggcaataataaaagtcattagccacgtaataaattcaatcctctgacataaattgtaatacgtcactaaatctgttaataaaataagcaatttattcgggtaaaagcaaggcaaaataaagggaaagaatacagcgcaaaattcatttttggcatctgcaggacccaggactttatttcatttgagaattaa

SEQ ID NO: 8511 - DNA, 2468 bp, Heterodera glycines
  unsure (1)..(2468): unsure at all n locations
attttcattcttttttcaatattcctaaaatatacctccttagattggaatcccacaaaagcctgctcagaattacaatcggtgcctgatattatttttaattttaatctttgttaaagatttcgctggcggctgttggcaaaataggcgctccgaatctgcacaggtgttcattaattttctgtcatagctctgccaatctatgaatggagtgagcaaggtttaatgaggaaaacgagatactcgagccttttaatccatgaaaatgtataatcatattaggtgtaatctaataaaatcattacattaaaatgaatttttggacaaaatttgcgattttaaagctttttgtttttacatgagtaatcaatatcttaatatcgtcccgatctttttcaatgccttaagcttggagattttaaaaggtctaagttgggaagtgttttcaattatctagacatattcaaaagctgtataccatcttatgtcacaaaaaaagcatttttaagggaagaaaattaatattataatttaaacattcaaaaatgtaaaacggttaaaatatatattcaaaagaaaaggttcgggaactcaaaaggattgccttttcatattaaattatttattgaaatatttcaaatttttaaatgcaaaaacaataataaattacgttaaagagttaaaagggaatcttttaccagagcattatttgtatataaattagctcagcgggaaaactttagatgaaaatcccctacaattgagtttgggaattcaattaaatttgaaatagaaagaataacaacgagaattacgtggcaaagacataagagtaattatttttaacttccctaaatccaaaatctaaaaataatgatgaataacagaaaaaaacaatttatggggaaggggtgaagggagcaaaaaattatcaagaaaaattattttttaaattgctacgaatgagtttaaacaacatacattcagaattttcaattttattatttttttatatgggatttgaattatctttgggtcattcagctgactgatgataattaattaattttgcttaaattttcaaaattttgggcagcctatattttgaactcgttttttaatgtaaattgcgcgcatattgtgtaataaatgagaaattcgaaataataaatccatcaatcaattttgcttggcagtttttcagaaattgttggtcaaatttgcgaaatagttttcgattttggaaagaaatatggtacacagcaccaacaattgaaaatttcaatttttttaatttatctttacgtttaatttttcgttttattttattatttttattttaaaatttttcgtcggaccataatttctttatctttatgttcagttaaagaacactttcgctctttttctaggatttggaattttaaacacgtattagtaaattttaatgaaaagcattcaaaaaacagcgacaaagtatttgggatatgatgtataagaacttgaattttggttgaaagtattttcacatgtcccatttgtggcaggggaatgattgattaactttccgcggcggtgcgcggcagggcgacttcatggcgcaccggtggagaggaagatggggacaaaaaaaaatacccgcacggttttggaaatcggatttgcgtgggcggcgactttaaagggttaaactaatacaatatctttgatttgtgaacctgttcataaatcatccaacggatttcaccccttcaatgggttaggggaaaatcccgcggcggtaacttcaaagggaaataccccttcaataggctcgggattttgcggggaagtatcacgtagcggcaatttcaaaagaaaataccgcccccgcaagcgggcggtaacttcaaaggaaaataccccttcaataggtttcggattttggaggggcccttccggtacccgctcggttttgggtctgtcacttgcacattgtgctggaaaaggataaaaactcattaatcatttcaaaaatgggtccatattgcgaaatcgtttcaaaaacggaaagcctatcaatcaaagatttttaaaaaattttttggcccatattgctaaaaatcattaatcatattttattgacagatgacctacttttggaaaagttttttttcatcatatttatttattcattttcgattttgtttttaaattggatttggataattaattttattgtccaattcattaatttatttatcggcattatttgctgcattaccaattaaaattgcacttctacaatttcattatcgatttaatttgcgtgacgcctgcattgtacctcatcgtcggggcggggaggaaatgcaaaaaaaaaccgcacggttttggcaaattttncaaatgagtttaatttcaggatcagaaaaagcatcacaaaaaaaatctcangattgcgaataatgtaatgtctaagtagtttg

SEQ ID NO: 8512 - DNA, 3788 bp, Heterodera glycines
  unsure (1)..(3788): unsure at all n locations
ggggtcaaatttttaaatttgcaaagaaaaaattggattttcttccccctgtcccttttggtggcaggtggaggattgagacctttccgcggcggtgcgcggcgcgggtgaaaaaaaacaacccgcaacaatttggggaaatccacaaaggcggcagagttcaaagaaaatcncataggctcaggatgtgagcgggcactttcaaggggatgcacncctcncataggtttgggattgtgcgggaaaatgtccgggcggcaccttcaaagggttgcacccctcccataggcaagggtttgtgcggtaaacacccgtgcgcaaccgtgcgcttttgacgccatatactactacaaattagggggcagcagcaactgacgccgtttgcaactatgcaaagaaaggatgggaaatggaatattgaaaaacagaagaaaggatgtggaagggtggaggggatggggccaaattttggggccggatattgggccttatactactcaaatcttttaccaatttgcaatcaaattttcaaaaatttttcttgcggcgccaatcggcaccgccggaccgcctcctccccttataaggaaattttcaaaaagtttaaaaaatgtttatgtttaaaaagttggaaaactttgagtttttaaatacgcgatccacgatacgcggaatttttttgcgcgatccgcgaccgcgggatttttctgtccgcgccccacccctggcacaaattcagaaaagaaatgtatttgttactgatcagaattgatgggttgcatgaaaatcaattattatcagagcattatgtgcctatccgcagttgttctactgtaattgatttcttcttcctgctatactgtcgtcgtcatacggtacctcgcacgaaattattttggagtgttgcaacttgtttgagttcgaatttcttttgaatatggttggaaatgccttatggtatgcttgccgatattccgtactaaataaaaatgggaacatttccatattgtattccatggttgccttaacattttgttatcattcgatagccctaaattttttctataattctgcataattaaaaagaaattcgttaagtttcaaaaaagttacgacctgagaaactcaaaaactaagttttttgaatatttttgttcataatttactttaaactatacgaaatttttgatgtcgggagtgaattttctttcaaattttctcggttataaattaaaaaattttattttttcttgcaattctttaattttagtgagatttcagaaaaataaataatttttgccgcatatgttttcacaaatctttaatgaacagaggggcccgtctgtgaagattagcttcgtctgagaaattttgatattctttttagaacagatttttgcactaaaaataaccattttttggagcatttattcgcattacaaatccaatgtaaatgtaaatcaatgaaataattccaaatgatcgtttacataaattaattgttaaagtaatgaagaattaatcaaaaatcccatcgtaattaacaaatcccattttatggtcttaaatcagcagtccttcccttctcatcaaattcctcttcaattttgccattctctgtcatcagttatttcttagcatttttgccttttttgactttgttggccaatgcgcgttttactggtcgcatttttttgaccaatttagcgacggcgttcacctgaaaaaaaaatccaaaattagggagaggtatacggtaccaaaatttacatactaatttataaaaaaataattgaccggaaaagtgacggcacgccaaaacagacgacggcatttgccacggccacgaacggcactgaccgaagcgcaaccgacagaagcaacgccaatggcatttgcattcggctgagactgaaccggcggcactgtttgatggacaatctgttggctgcactgagcacaaagtttggcacctgcagcagcagtgttctgcctctttaaaatgattatttagaaactattgaaaaatattttaaattcagtgcaaacttgatatcaatcgaaagctcttcacatactcacatactatgttaggcctacaaaaaaccaaaaattttcaaacctgtaaagaaatccttacgaaaaaactacaaaaatgtcgacttcttttttgcaaatttcatgttaaaatttttttgttaattgtctaatcgctatgcaatagctttgaaacaattactaaacatgttcagctttcgattgggaccaatttgttgcatttgattttggcaatgaaaagtgatagtccaaaaacttgggctggcgccgaaacgactcacaaaatttgtgtatttttaaatttaaagaatttgtcttccaatttgaaaattataaaatatatttttatttccagaactatttgcgatttacacatacgaatttcgttatgaatgcttgccgtagtgaaaggcgccgactgtcaaaccattcctaagtgatttaataaaaattattataattaaattatagatttttccttattaaaccctacttcaacttgtttctccgtaagcccagtttccatggccaattgtgcacattcagaagcatttgcgactttcgttatggcaaatttgttttccaatttgtccaattgatcggccgaaaagtttttgttgttgcgtcttcaaattaaaattaagccaataaattccgggcccaattttgactccaaatttattcaatttacaaaatcatcactagggctgggaaatttaggtaagaaaaaccgcgaaataggtattaaaaaactcaaaatagttattaaataatagggatgtgcgagagtctcgattcccgagtcgagaaatttctcgggttttttgggtctcggttctcgtatcgtttcccggggtcatttctcggttctcgtatcgtttctcggttcccggtaaaaatcacttctcgcacatccctattaaataagtacaaaaattctgaaataggtagaaaaataggtaaataaattttttataaaaaagcaaacaaaaaaagataaaattttgcttctattactgtgtaaacgaatattttaaatatttctcccaaaaccattttgtcctccatttctttgcaatagagttgagcggtaatcggtaattgtaaaaaaaccggtaccggtactgaccggtaatgcaaaaaccggtaccggtaccaactttttccaccggtaccggtaccggtaccggtaaaaaccggtaattttccaacgtaaaaatttttggacaaaatttttcaaatacaaaatttttattcagttttcgcgcgagtgcctgttttttagcattagaattgttcagaagtatatgtatattgagggtgaccaagttttttttcaaattcaggataaagaacactaaaattcagattattgcaaaacaagggatcagcggccaattttccaaaatggtaaagaaaatatgaagaatattctatcccagtggggaattgaacccaagccgagaaataataaaatcagaaggtttagccacttgaccacttatgcatatgaacaaatgctttaaatcaaaataaataatttaatttttttttctcaaaaaatttctccttcaccattccctactcttttctcacccagaccctcattcttaccagtgcaaattgcacaatcaacacaaacaaacaagtcaaacgacggaaaccccaaggtgtactgcttgacctccgtgtcagcagtacaaccacgcaagtgcagtaagtgcagcaag

SEQ ID NO: 8513 - DNA, 6160 bp, Heterodera glycines
aatttttggtgcaattttcggaatttcgaagccattttttcagatagcgaaggcaaatgtagccatataatagctgaaattagagccacagttctcttggatttattattatcacccgttgaaacgagctatcatcttatatttatggccttaatggtctcaaatgtctattttccgtgatgaagttatctccaattcaaatggctcaattggtgttgaattttccaagcccaaattcattttgtaactgagtgaagaagtggcacggagaaatgtctaagcaaatggaaacgcaaattatacgtaaatcaattagtcagtcgtttaacgaaatgtggtcacacctctttgaaattggtgatccattcgaggtttaggcaatgcaaactcttcggatggccatctttgctcggaacaaatgagcattattttgaaagcccaaatgatggacatttgtcgtcgtaaaaatgggccaaatttgacggacaaaaacatcccaaattggctggacattgattctggttgaacacaaaatcaaatacaaattggtgactttgtcacaaatttgccgattggagcggagaaattcgatgacggaatggccaatgtacctgaaaagggagtaacaaaataataaaaatagaaaattattttgtatgtattactacataagccgaatgaaatgaatgcgaattttgttcggcaactgacggtcaggaaatggaaaatccacatgattgcactcgatatacacagataattttgcttttggtcctgctttgtccttgtaaattgtgattggtttccaaagcgtaattccgtttttccatcgaaatgcgtgtccaccaaagcatcgaaacgtggcgaaatcagtgccaatttgagtccgagttgagcataattaaaaaagggcagaatatccaacaaaacgtcgccacaaatccaaatgaaatgcgtgcgtaaaaaattactgaaaatagaaattggcacttttcgtagtttaaggacccgatcaaatttttgagccaaagtttgaatttttttttaaatcgacagtgaattatgtatgttgagaattgcagatccattcgaagagatattaactcaaattgtggcagttaggtatgcctccgaaataattttggtgcgtagttttagtaattctacgcgccaaatgttgatttaaaaaaaaaaaaattttaaactttgaccccaaaatggaaaagtacccaagcaaacattccatgatttgatccgctttttctttttcttcttccgctggtggcgacaatggcataaaattaagtgcaatttgaattgagtatatcattttttacactcacccaatccaattattgtcataaagcacaaaatagactttgttcaaattggcatccaaattttcgcccttttcccatttaactgccccttttcaatgcaaaattcattctgtagctgactgaagcggtgcatggataaacttctaaacaaaaggaaacgcaaattaaaggcattaaatcagccagtcatttaggctctattgcatgcagtttacgcatcttaacgatttatgcatccaaaataaaaagtttacgcttctaaatcaatgcaagggcctcgctccctattctgggcaaaaataaattgtccaaaaacgaatcatccttttaccagaaaattttcggctcgaatcagaatggcaacaaaatgattttgtcccacaaaaatttttcacgctgatcacgaattccggcatccatttcgacccatttcaaactccgagcccgaattcgaacaaaaagtcaaagactcaatttccaactaaattcactttgttggacaaattagaattaccccaactaataaacggctccaaatcgtattaagatacacatgactaatttgtaacaaattgcgcaacggattaggcgtttgcgagaggcattttatgccgaattgcgccttgttgtgcttggcgcagataacagggcccggacctgtctccacggagccgggcacatcggcaaagcccacttcgacccggattttccggacgaattcatccctgtactatttgggcttaatacaattatgaaaaacacaattaagtccgagctcttggcagtggaggaaggagagaccatcttccacggacctccggaaggcatgttaactctggaggagttaataagccgtctcgaagagaaggttgccggctacgaagccgagaaacacttctgcgtcgggccactctatcggcaaacggaccaccgagaggccaaggagctggcgcagacagtatttgtgaagtttaaaaaaatgaacaacatgtgtttagattgcgcaaaagcaagcagtagctgttcacctgcagccgactgctgagcaacttgagcaaatggtgttccagttgatgtcggccgccgaggaaaccactcttcatttaattgaacagagggaagaggattttaaatgggtacggtgaaggcaaaaatcggaaaattttatttgttggaatttcaatcttttgtttttcagatcgccattgagctgttcgctcgcaataagcttaagccgaaggacctaaatgagttttgtcacagagccatgattggctaaattaatcttgacatttattttccagccaatttggaccaccggcgaagctcaaggcgatgaagaggaggacgcagaaatggaggaggtgcaggatgatgattgggaagattgagggggtttttttgtgggattgttaatggcggccacataggatggtttagcaactcccttttttcttttatgtttgggtggccgccaaccagggatgcaacaggcataagaagtttaaattttaaaagtttcgaatatttccgagaatagtgacgagattcaactgattaattaagaaacgttttggaattaattatctcaaattttttgggaaaaaattttctcaaaaatatagtcagccgaagcaaaaaaatgcggcttcttggctcagaatgttctgactacggcggaaaacttggcattttaaaaagtgaacacacaaggctttgttttggtttcacgaccaaaaatttttttacccgactaatgaaattttaaaactcaattaaaattcaaactttttttcattaaggagtaaagaatttttcaaataattttttaaggtcgagcaaatttttttgaggtcgtgaaaccgaaaccaagtctaatctcatccctaaaagctgttccaatttttcaagggttgcattcctggtctcaccatttgttcatttgctttttgttggataaatttttgttggaaacaaggaatccttctgtcttggttcaccccccccctcccgctcacaatcgcttttttccatgaaaaaaataaaaacaaaaaaaaatcgatggctgatcagcgatcacagcttggcgtgtctgtcgctgcttggtgcttttgctcatgtcgaccagcttggtgaacgcctcgtccaatgtccgcacgcgcaacaatgcaacaccgtcacacatttgcgaactggtccatgaaaggaaagggaagacaaaaacatgctgtctcaaaatttgtttttaattcctaatctaaattgtggtatccctccccgctcaaaaattgcaaaatctttagaccaaccgggaagtaaaattcgaacaaaatttacaattgttttgaacaaaatatttttaagtggtggcgatcacacgacccatttttaagccgggccaaaaatacaacgaaggatagggggtcaaaaaaagggagggcgggcgacgcttaatttgacattacataagggagtccatccagctgtgtcaatgggtgatttttttttgcttttcgaaaacaatttttgcggcactcttttttcggcaccgccggagataccttagttctggtttgagaccaataaatttcacgataaaagctgattcatttttggccaattctatttttatcaggatagggatcgcccaaactctctccccctgtacaggtttgtcaagtacataacgggagaaatttatgaaatccaagtacatatacgatttttatctaaatgtaattaaaaagttgaagtttctttaaattactatttttggtaatgctgtcgatggtaccctccttttttgaaaaagttttctttattttcaaaagaaatgaaagcatttttcctagtggtttcagctatttcgaccaattttgaaccccggacctgaattcgaacaaaagtttcaaaattttctaatttcatatttttaattaaaatggtttaaataattttttattgcagtattaatgagttactggttgattccgcgtatttagccggttttgaactaaaattcaaagtgaagattttgaattttcgggcttttgctcgaattcaggtccgtggttcgaaattgtgtcgaaatagatgccggattcgtgatcggcgaccccgaaaaccctaggaagtgcaatattttttttcactgatcattttcctcattttcacaccgcttttttggcgcccttaaaggaataaaggggtaggtgatgccgatacatttgatggcgtccggagggagcaatgcgttttttttttgttttttttattcacaaaacttcgaatgaaacaacaatttcaaagaggtggtgaaacgacggagaatgcatggaaattgatgcgatgtctattgtttgacgaagcaatgccaaattaaagagacggcggtccattaagaaaacttgtgaacatttattttttataaaaagaaattgggagaaaaaaaaattccaaattataagaaaacccataaaaggcagagaaatttacagataatgtcattttttgcaataataacttacgacaaaagtgtgctcagttaattgccacaaaatgaaccgacaattaaagaaaatgtgaggaatttttaaattgatgatttatcatttaataaatcttttcacacatttcagctacatttgtacggatgtttggatggacattctcccgttctttgaacgagttgaactcggcctcacattggcacttctctctccgcgtttcgatgttttggtggacgcgcatttcgacggaaaaagaaaattgacaatttggagacgtatcattgttcgaaaaggcaaaaatgccgaaaaagttcttgttggaatttattggtgcaaagaagagcattacacactcatggactgctgtccgttgccgaacaaaattcgcttcgattgccttcaaattgagtaattcttacaaaattttctgtgtgtattatgaacgcgttttttatgtcccctttttcagatacatcgatcattctgtgctcgcattttttcgctccaatcagcaaatttttgacaaaggcaccaatttgactatacatatacaatcatccaaaaccgaaagcaatgtgcagccaatttgggatgttttggtccgtcaaatttggcctatttttacggcgacaaatgtccatcatttgcgctttggcaatgctgatcatttggacactttgcttcgcctcacatcgccgacaattccctccgatctgaacattaattcaatccagtcttatcgtggtctgttccccgacgcgcttggtggtgatgatgggccaaatatttcaaagaggtgtgaccaaactttcgttaaaccactgactaattgattgcttttaatttgcgtttccctttgtttagacatttctccgtgccacttcttcagtcagttacgaaatgagttttggacgactgaacaatgcaacgccaattgagctttttgaattggagaacgaacggactaatgagaagctgacattgaagggagtgtcacgccatcctggcaattggctgttgaagcgatgcccaactaatggagaaacgacgacggttcagcagcagaaagatgaaaattcggatgtcaatttgcacaatgtccattttgtgcttgatattgacaaacaatgcattgggtgagcaataaaaaaaacatttgattttgtttaaataattcaaattgcacttaattatttaggccattgtcgccaccatcggaagaagaaaaagcgggtcaaagcaacgatgaaatgttctcaacgactcccgagcccagtaatcagcggaatgagtgattattttgaaaatgtc

SEQ ID NO: 8514 - DNA, 3782 bp, Heterodera glycines
tatatattttgcattagcactatttaaaattgttttctttctttatttttaaacattcaattatttgctaatttattctgtttgttaattaaattttacttttatgtaatttactcgatctgttgcgattcaatatgtacaattcatcatcgaatatatatatttcacgaaattattttttgaaatttataatattcccttattttataattgatttattctttttgatgtatcaaaaagtctatttttctgttaaattgttttttctatggtcatttcaatatcatttttgtgttaattcttttatttacaattttaattcttttttttcttttaattatgaaaaaatttagtttttttattatttttttcaaacattggatgttggcgaattaatgtcgagtgcgattttgaagctttggtttctatcattaaaaaaagaaaagttggtcctttttgccgtgctcttgaaaatatttatttaatgttttgttattttttaaattattttatattttacttagtttttttcagtgtttcgttatataaatatatgtatttttaattattatcttttcattaaatgttccattcgaccatatacgttcatttctattcttataatttttaccgaatttgttttcactcatcaaacatataaatattaattgtgataacttttttttacctcactagttaatttattatttatttttaaatttttatactaaatttaaatgtgtatatttactaatcgtgtttattatgttatttaattaccgtatgtttgttgtagcattttattagaatgaattattttactattatatatttttaatttaatgttattcgaaaatccagaaataaaaatttaaattcttttgctaatattttaatcattttgtgcattttattcgccttttctttaattatcatgttttattttttatttttcccctttttcgaatataaatgtgcagcgattcttatgtaacaaatatttttttcaaatatttttaatgttattaatttaatatttttatttatttttcaataatacttttcttaattaatgttaaatatttttaattattttctcgatgtctcggaaaaagttgtaccaatctatcgtagtgtgttttacgtgttgattgataagttgaaagtttaagtatgtaattatgcaatcatttattgaattaaattatatgaaattaataatttttctctctttggatataattttttgggcattattaattattttattaatcttttttgctgatgttttttatttatatgaaatggatttttttcttaaatttgattgtatatttgaatatttgtttataatttaataattaattttttattataatttccatcgttcttttcttattttcgtttaaggctttttctgacaatagccaataaatttaaaattaaataatttttttttgtctttggcatcaaatgaaaaggtaaattaaaataaattttaattatagcaattatattccgaattgaagtacttttaccagaagcaacttatttattccaaaaaatatttgatttaattcattttaaatcttagatatgaatttagttttcttgatttctttaatatattatcgttgaaaattttaatttatataatggttattctatttttaagagcgtataaaaatatgaaaaatataatatttttcaataatatacctaacacttaacatttttaataatttcaacttaatttttaatcggaaaaattaaacccaaacagaagttacaaaatattttgtaatacaacgtagaactacgtctatttttttaaactaaaaaaatatttggggtggcaaaaaattagttcgtattaaggccggccgaaacccgcttccctaacttttactaataatgcattttgcattctaatttatagccgggattcggtattttaatagctaaccaacagagaaatcaatttgattttctaatattgtttttaaaaccttaaaatgccaataagcgcagcgatgacagatgaaaagtctcaaaaagcctcaatgcctcattttaaaattagtctcttcagctcaaaaaaaccaacatattgagggaggacaaagccattcatctgccatccaagaataatcactacggaaaaaagttccgaggatttttgagacaattgctatgcatatgagtaggattaagccccgaccctcggtgagagaaaacgcgtggaaaggggaggaattccacgttcagccattttttaaatttattcatgaaaataaaattgtttgtttttccaaatagaaaaatcaaaaaacaaatttgcgatcttgatttcattgatatatttttatgaaattcatctttcatttaaataattgttattcattttttaagcgcgtgtaaaaaaaaagaaaaactaagcatttttgaataatataacgaacatataacatttttattagcatttcaattaattttttaaaatttctatagttagaattagtgttaattatgtgttgtttatcttttgcttttcaatttttagtaatcatttatcatttactttaatttattttgaattaggttttttgttcacaaaaagactgattggctacatcaaaaaaaaaaaaattaaggtagagaaatccatagttcaattcatattgggccgcatgatcccctcctaacctttattaataatgcatttttgaattttttttaaattattcgagtaaattatttctacaaaaaatatttactcaaaattctgtaaatctaaatgaaaaaagaaactgataaattgggaagagatttattagtttttatattttttttctccggctttgtttatttttgataatttaattctttatattttttcttaattttaaattcctttatctcttcatccatcacttaaagctttatttttcgttcttttttctcatttttgaatatattttttaaaattagtcatttgaaatggtgaataaaagtcaaaatgaatattgttctaattcgttaattcaattgtttaaagtattcaaaaactttacaaaaaaaaccaaaaaacaaattatggtaattggttattgtatgtgtgttcgttctcatggcaattcactcttaaatttcaaatgtcatattaccttatctccttgatttttgtgtaatttaatgtgggttgacttgttttcctaaacctgcaatcataaagaaaataaaagaaataatgggttaataattagttattccttccaaaatttgatagaatttttcaaactaatgccgtatattattaaagcaaaattaaaaaataatttgtttcgttattataattaagattatacatctaattggcacttggcaaaccattgccattgccatcgccatatattggcacaatgaatttagaattccaatccattagattacaatttaataactaatatttctccatgtttatctttttcttcttcctaatgacgggatttaggaaatgtccgagcaccaaattttagcggcgatatagtagagttgagcggtaatcggtaattgcaaaaaaaaccggtaccggtactgaccggtactgcaaaaaccggtaccggtaccggtaccaactttttcaaccggtaccggtaccaactttttcaaaccggtaccggtaccggtaaaaacctggtaattttagaacatagaaatttttggacaaaattttccaaatacaaaatttttattcagttttcgcgcgagtgcctgttttt

SEQ ID NO: 8515 - DNA, 3631 bp, Heterodera glycines
  unsure (1)..(3631): unsure at all n locations
taatttttcttcttcattttttcaactttcgattaaactnttattattttattttttggtactattaggtatattataaaaaattgttatcgtatttataaatttttattcccatttctatttgattttgaatgttaaagtaaatttccttttaaattatagtccattaattagttttctcttgacatttagtgttcgatatgatttacggatctcccctttattattttttataatattgttatatcatttaatacttattattaatttttaattatttttatcattgataaatttgctgttgttttttttatttttgtaattttattattaaattatgctttaatttcctgaaaatcggctatggcattgttaattaaaatttatttaatttatcacaattttttaatagggggaaattaatttttccatttaaatttatttattaatctttgtgattggtcatcaattatgattattatgtgctgccaattgtttcattttacattattttggttttgttttctgttataattagggtcgcgactttaatgacgaaaactctagaaatagttaactagaatagtgacgaaaaagtgcgtcaaaaaagtccgaaatagtgacgttatagtgatataattttcagcaaaaattgagcaaaaaattttgttattcactgaatgcagttgcaaatgaggtacatttcttttctaatattttcttaccaattatttaactttttaaatcaaaatttttgtcaagaaaaaaaatttggtagatgaatttttgagaaattttttaggtcgattattaggggtgtattttttggttttattgcatttttgttaaggaattttccacgttttttgggtgctgggacgttagtcaaaaaccatcaaaatgggcgttagtcaaaaaaccatcaaatgaataatttttgacagaaaattattcataattttgtctaaaatggatcaaattttataatatagatatttttcgatagccctaagtgttttctattatcctgcaaaatttttaaaaaattctttaagtttaaaaaaagttatgacctgagaagctcaaaaaaccaagtttttttgaacattttagtcataactttcttgatacttaacgaaactttttggaattttgtaggctaatagaaaacacttagtgctatttaatgatatcaagaattaaaaatttagatgcttttgaacaaagttatatcaaaaaatattttcatttgatggtttttgactaacgtcatagcaccgttttttgagttcctttcttcaaaacaattgagaacaaaaaaaaagttttttcactaaaaatcgcggccctaattataaatatgaataatatttcgttaaattaattatctttttaattctcatttacttttcctttttttccaattcacaaaaataaatcgccatttccatccatcattgggtgaatgaataatttatttatttgcgttaaatttatgtagttcttttctatttattaggttacattatttttatttattgtactcaagtatttaaaaaactatgcatttataattcattttacttttttcaaattcatgcattcagcgatcaacgctttcatttctggtgatatttcgaaaaatcaattatatgacttttctgtaataattctttatattatattttttatttattgtattctaatgttaaaaaacacatatatttatatagtacaatataaaaagattttatatttattaaatattttgatattatttttccctttttatttgttaataatttcaaaatttttatttttaattatgcaatatattctgttgatgataaatattgcaaaatattgtacattttaatatttatttatttatcattatttaacattaggaatttattttagtaaagaacaaaaattaattgatatcattcaaatctaatagtagtaaaaaaaattgtttattttttctttgataatttgatttttcatttattcaattatttttctttctttcttaaattatgcttaacttcttccaaattctaattattttaatggttatttcattaaatacatttttctataccatttctaattttgccagttcctttgctgatatttattattaaaaaatagatttttacagtcttttttcacttgtcagcaaattgttttccatttttggatctttatatgtctttttatgtaatcttcaactctttttgttaaaaattttaaaatgaaatatccatttcttcgaatttattttgattttgtaataatttggacggctcatatttttgataatttatttttattttttgtaaaattcattaattttttattgtctttctgtccattaattcgcattagaactgtttaattgttttggcttttatttttaaatgatcaattaattatttactaaaaataataaatattcattcatttttttgtaataaatctttggtatatttaaaaaattaattatacaattatcattttcttctatttgttactttcttattgttagcttggcaatgtgaaaatgtttttctttttattttctgtttaaatattgtcagttattttccatgttttggtctataatttatgtttttaaatttctaaaatttagttaccaaaaccatttcaattgacatcattttactattatttttttgtcattttatgcgttatttgcaatttattttaattttattttagtttggttcagttttcattatatctgcccaaaatttagcgtaaaaaattatagcgcatcctctacagttttttttctagaaaatacttaaaaatctgaaaaaggcttgaaaccgggaattttccagaaaaaattcttacggggctggaaatatttttcgtgaaatatgattatgacggacagaaagagaacaacattttccacaaaatgaaacaaaattactgaaaatatactattttttagattaatttgccaagaaaaatgttaatgttttggaatgttaattgtactgtatttttttagaaatattgtgggaagaattttttcaaattttacgttgtttctaagaaaacttgtagatagtgcgctataattttgttacgcaaatttggtgccctttcgaaaaattcataaaattttatttcatttttaacatcaaaatattttcaaaataaattatttaaagatttccaatttcaaattcatatgattttgttttatctgatttaccacaaagagttggttggaatcactgttagcctttcataaataataaattgttttcgtttttttgtaaattttttaaaaattatattttgaaatcgatgaacaaatatttttgtattggtcagagaaggacgacaaataaaatataaaaattcattttttaaatcattattcattcttacataaatttttttcgaataaatttgttgcattgggttatgaaatttaaattatgattanaataatatacatagctgtttaatattttctcctctcctttaaccgttttccctttgaaataataccatattttgataatctttctccatttattttgaatgatgagaataattcacatttaaaaaataaaaatgtcgttgc

SEQ ID NO: 8516 - DNA, 5192 bp, Heterodera glycines
  unsure (1)..(5192): unsure at all n locations
tggactaactatttgttgttctattttcgaattgaaatatggtaaaagtaataaacttacagaaatggataattcttcagaaaaaaaattattaccattttctaatcatcctaatattgatgaaaacacaccattgctcagcacaaggtgatttacagtactctacaaattttctatttgtattcttcggtaaatcaatcggttgataattttgtgctctttccaatgtgcctaataatttttccagtttacctaacctcaaagaattttttaaaaatattaaaatttactgaattttttaataaattttattgaatttttgaaatattttttcgtttatttcaataatgaatttttaaatttttcactaaattcgccttcagaaaaaaatcaaaaaatttttttaattaaaatttataagtaaataaattttattaaattctcaatttggcaaaaacccctaaaataatttttgaaaattgttttaatttttttgaaccaataaattttaatattctaatgtagtaaaacggactcgaacctccgccctttttccctttattatcttacaaaaaccactaatttaagccaattatgcatttaattttgaactgngagccccaaattgagtcaatgtataaagttaagcaaagcggtttttttgctgcagacggacagcccttccatcgattattatttgtagcataaaaaaggcagtggctcttcttttcttcgttgttttaaatgaatatgagagggttaaaaaatcaatttacgcccaccccctcccctcagccttcgtcggctgttcgtcatttttcattcacaccttccttttctcttccttttgcaacattcttttggcaatgaaaagatatagtagcaaaatttaatttttgaaatgcatcatccttctgccaaaaaccaacgccatttgtgctcttttgaatcaagttcattgccctccgtactaactgatccgttgccgtcctccgatgtacaagctgacgatgaaagaaattccttggttctcggcacggaggcacaattttccatgcaaatgggcaattcgcaatccgttgaaaatttggggcgccgaccacggcgaaggaatggccctcaagcgaagcactcgtcaagaaagcgaacaaaacgacggcgcacgcacagtgacacggacattcgtaaaatgcggttggtttaattattgactatttacaataaataaaattacttgttatccatttctatgcatattaaggccattcattttatctccgtttatgcctacaatagcaacacaagtttccattaacaacggtcagccggatagacatcgtgccacgacaaatccatcggttactctctcctcttcactgcctcaaccgccaattatgacaaaagcaaaagtgattgttccacggatcattggagggccttctgaacgtggcgatgttcgtgtggttggtcaggcaaaatatggtgcggtgcccaattcgacgacagataaaaatgttacggtcggaagcgtcgtgaaacatacaattgctgaaagtgaatcggagagtagtgatgaggatgaagaggaaaggtaaagcaacaaatattccgaaaagtcgctctttgttgttcaagtgagagtagcagcagcgtctcctcttcgtatacgcgtttctccgatctgacaaaaaagcaatgggtcactattgggatgttggcaattgcaaatctctgcagtactgtggcgttcagttgcattgctccgttttacccgggcgaagctgaaatgaaagggtgggccattggcgtgtcttcccagtgactggcaccattcagaatgactacctcagaggttggcttagtcttcggcatctttgagctggtgatgttcgttgctgcgccaatccttggcaaatatgttcgtttcatctttcaatcccatttttacaaaaataagtaaagatggattttattggctcaaaattgatgttcactgctgggcttctgattactggtttaactgcaattgcattcgggtatttgtttttgccttttgcacattttgggctgaaataggaattcgtttgagcgaattttgggcaaatttttgagcattacaatcatttttaatccgtttattttcttttgatgacagatttttaaatttgcttcctggtggaaatgtctttttcttcgcttctttgatcattcgttgtgctgaggctttgggcgacgcgtgttttgtcacctcctctttcgctataagtgcgaaatgttttcccggtcgaattgccaccattgttgtgcgtttcgcaatttttaagaaactacattgcttttcagggcattatggagacttttgcgggtcttggttacactgcgggccccgtcattggaggtgttctgtacgaatatggcgggttccaacttcctttctttgtcctcggctctgttcttataatggctacacttctgtcctattaccttattgaggaaattgaaggtttttatttcatttattgagtgcaatggcaattgtaattggcatttgaagatgaaccaaccgaagatgcagttggaatgttaaacatgctgagaataccggtcatttggctcatggtgtttgccgttgtgatttgtgccatttcactttcgtttttcgatccgactttgtccggccatctcgcatcggtcccttatttatgcattgtaatttatttttcaatttatttactttagtttaatctgtcaacgactatggttggccttatttttctgctctgtggtggtttctactgtttgactgctccgttgtggggccttatcctcgaccgttgccagtgctgtaacattctcatgcttttcggctcgttagccaccattttctcaatgctttttgtgggaccgtctcctctcattcccatagaaaagtgaggaaccacaaaaccattttgtaattattcgtaccattttaggaatctctttttcattggtctttccatggccgttcttggaattgcggcgggtgctctttacattccgacctttcagcgatgtttagacgcagtgaagtcatttttatttcaattttttcctcaaagtgactgattggtttaagagagaatggttacgacgactccttccaaacttacggctgtgtgtcgggggttttccagtcagccttcgcatttgggtgccctctttactaagcattaagatgttgctcatatttactaaattcagttcattcattggtccaacgcttggcggttggggcgttgaatcaatcgggtttcctctcaccacaacaatcattgctggcattaacataatttttgtaataattaaaatagtttaaacttcttattttaaattattgaaagacagttagctaaattatgtttttttttagatttttgccttattctgtttcatcatcacaaatcgttttatcggccggaattccgcctcggacaccggttcgacaacaaaagaagacccgccttcacttgaagaagcctaaaacaacaatgtttttgtttgaatctgtgcatttttaattcttactggtcattttttcgtgcactttgtcattttactcaaattccgttaagttgtcaacatttttcatttgtttttgccattaaaaactgattcttattacatattagtttattggttatttttacctaataatttaatattttaaaaagaatattgtaagttgcaagtgttggtccatcagtttcagtaaaagccgacattttgttcagtcccaatggattatttccaaaaaattcggtccactgttgccgcacaagttcattccgtcgctgcacaagtcagccaagcgcttcctggaaacccaattttccgtgaatacacaatcggagctcaaatcggaagtgctggccccgggctctgttggaaaatattcagtgggaccaaaaacacaaccaaaaaggtgaaacgaaatgcatgcagaagttggagtcaaatgcgactgttcaggaagtgaccatttggcttttcgagaagcgtcaaacagaaaattgggccccggccaaaagggaggaattcccggagattctgaagcgaggcgtcagtcagctgacccggctcagacacccgcgcattttgacggtggatcgggcgttggaggagtcgcgcgactgtttcgctttttgtacggaggtaaattcgatgactgacgcgaccttttgaatattcgttctgcttttgtcatggacagccactcttcgcgtgtttggccaactgttttggcgatttgaccaacgttttttcccctccggcccatttgaaagagtttcagctgttggacgtggagaggcgccatggcctttaccaggtgcacaacggtcaattgtccttccaattggcacttttctgtttctttattgtttgtagtccttttttgtccatagattgccgaagcgttggcatttttgcacaatgacacgaaaactgtccacggaaatgtttccccttcctccgttctgatcaattcgaagggcgcttggaaattgggcggattggacttttgcattttgggaaacacttcgattccgggaaaggtagtaaagcttcaagttaaaaacatgtttttcatgcgaatagaacacaatatgttagcagaaaaatgacaaatgcctctaaaatgtatctgttgtgtccccgggtttaaggctttcagccatttcaaattaccgttttaggagagaggaatttattataaggaaaagcattgacaaataattatgaattgaaaaccgggaatatgtttggctcaacaacaacctcagagcattttgggtgggtcagtgcaattggttatttgggaaaggattgccaaaggcaagaaatggcacagactgacccaccgcagacatctcgcagcccccgagggggaaattggatggacttatatactggtacaatggggatggactttggataggatgaggggtaatgacggaaaacacaaaagggaataagagaaatggatggcatatgcaacagaggtgaatgggatagaaatggcacggtaaataagagggacaggattggcttgggattggatgaacagacggacaagtttatgacgggattgggtcggggaatagggcaatgaacattatgcacaaaatatgaaattttgaatgctgcggata

SEQ ID NO: 8517 - DNA, 2532 bp, Heterodera glycines
tttttgtccataatagccgaagcgtggcattttgcacaatgacacgaaaactgtccacggaaatgtttctccttcctccgttctgatcaattcgaagggcgctggaaattgggcggattggacttttgcattttgggaaacacttcgattccgggaaaggtaagtaaagcttcaagttaaaaacatgtttttcatgcgaatagaacacaatatgttagcagaaaaatgataaatgcctctaaaatgtatccgatcatttgatcacaaatgaattttttgaaaaaataataaagttttcaaacaacagaattaatgttcctaataaactagaaggtaatgtgttttaaatttaatgctatttcggctatcagggcttgaaaaaattttacttcgaatccgattttggacataggtgcaaatgtcggggccgcaaatgtcgaggctccgtaaggtggcattctcactgagtctcggaatgggataatctcaaaagaggtgtagccaatccggccctataaatcaaatgcttttttaaccaataatcgatcataaacaggttaattttgccgttcccggatggagtcaaaatgaaatatcggcgctttgtcccgatttggactttgtctctcccgaacttgctgaaggccttcgctgtgacactttcgtcgatattttttcccttggcgttttgtcatttgcagctttcaataacggaaaacctcttttcgagtgtaacaattcgtttagacttcaccgggaaaatttgaaaaaggtaaaaaggcaaatgcagtttttgccctaattgggatgttcagcttaaacagtctctacaaacattgctttccattgtgcccgagccttttgacgacgacataaaaatgtgtttgaatgaaacgcccgaactgaggcccgatgccattcaattcaccaaagtcagtgcgcatttcccgtttttactttttcaactgattcatccgaattttcagttgtcctattttgagcatccgttgctgaagacactcaactgtttggagcagcgtttggccatggacaacacacagaaaatgcaactgttcaaagggctccccacaattttggcacaatttcccaaagtgtttttcgcctctgaaaatgatcccatatgcttccgttttagcgctctttgctcctaacggtttttccgcatttggccgccgaattcgccgcccctccgctcattcctttcattttgccaagtgtctttcttatcgtcgaactcacttcccccgaggagttcgtcctctccgtaatgccttctcttctgtccgtctttcccatccaaactccatatcaggtgcccaaatccatcccaatttgcttaatttcaccccatttatcccctcagattggtcttttgcttatgcaacgggttaatttacttttggaaaaaatgcccccggatgctgtaaaacagcatttgctccctttgatttacaattctctcaccggcgacaatgtcagagtccaggcaggttttcagttaatcaatttgaaaagaaacctaacattggttttttattcccacaaaattctaggagttgacccttatagaagtgccgaacattgtcaaatttgtcgaccgagagcaaatgcgaactcaattgatccccaaactcatccgtcttatgctcgagtcaaaggacctttccgtaaaatcgcaattactttttctaaaattcatttttcgtttttattttactttcaaaacttcgaaaaaatgctttgtaatattagctttttatttttaatcacttgtaaagagtttgacattacaagttgattgttttgcaataatgggggggggagagaagcagagaaatattattttcttattttagattcgtgtccaaacaatggtttgtctggccaaattgcttccccacatggagccttggatggtcactgatcagctgttgcccgctttaccgaaaataaccagcaaagacccgagtgttttgatggcagtgctgggcatttacaaaattgttcacgaaaacaccaaattcgggatcaacaaagagcaatgttagggaggaccaaattgggaaaatttaaaaaatttatttttcatcaacaaaaatataattactaattgatgagagctgattttgtgtccaaggtgctcggagtgtgctaccttatcttatttccaccgcagtcgagcccactctgaacctccaacagttcggccagtacatggaactggtccatcaactgatccgacgggtcgaaaccgagcaaaggcattgtttggagcagctgagtgccagtcaggaggaacaaaggtggacggagaggagccactcgcatttgttattgaagcgattgttttcatttaaggaaaatcactgactttgcggactttctgaatgcccaatcgaatgaaatgaacaaaaccaatcagagcgaagtcgatttgggcgacttggcacgagcattgagcggaacatcggcaaatgatggcatctgcaacagaacaacggacaaaaggga

SEQ ID NO: 8518 - DNA, 1494 bp, Heterodera glycines
aaagcccggggggggggggaacttcgcatcacaaagcgaccaaatgaccgcgtgtcgcacgtattcgagcacagtgtttacgtgcgacttctccaggtgaaacacttggccgaagctcgcggcggcgatgcgctcgaagactttgtagccgggggcggaccgattgccacaatcgccggtcatcacgaacaccacctgccgggggagggggcgagtgggagaacgaaggggggacagatgaggggacgagggaattgagacggcgaaaggcagacgaatggtccattgttgtgagacgggtgataataatgccattgaaggggacacgcgacttagagagagatgtcgcaggaagagaatggcattgagaaaagttggcaataattttggaaaggatggctctttcggtgattttaccatgtgaacgtaacccaaaacaactgtcatttgaacacaccgagctttgcttctcctggatcagattgagcacggtctcctccaagtgataatctttggaacgggcgtccgtaaaaacgtaaatgaatgagccgggaagagacacttccaaagcctggataaatggaaaaagtggacgaaaagcatgactggatgcctttttgatgccggaaagagtcatttcgggacagtcgccgcccccttggacggagacggatgcgagctgctgctggaacatctccggatcggtggtgatcaatggcgggtccacttctgaatatggccgatcagtccttctcgagattggcttttcttattcgagagagtcccttttcaaattcatttctgaccagggtcgtggaaaaggaccagcacatagttgaagatgaacttctgccgctgcttcatcaccgtctccaaaatgcccttcgcgccttgtcgcacttggttcagatcgtctgcaattgtcagaatcatttcgatcactttcaactcattcgttaccattcattgagccggtccgatcgaacacaaatgtcagcgaggacagtcccggggcgatttcctgctgatcagtggaattgcgaattaagccgggggattgatcagagacactaatcgaagaaacagaagatgaaaaggaaaaatggagcacaggaagagataagagaagaagcagcaggggatagacagacaaaacaatcatctaaaaaagaaagtgatcagtggattaatggcaaaggaaaggccaaagagagaagggaaagcaacgcttggccaaatcagaacaaacgaaacttcaaatcagtgatagggagcaacgaatgggaaagagcggaatactgatttatgcaaatggacaagggagagagatatggggagaaagtacggggcatagggaaaaaggggggggggggggtacaggggagaaagggggagagaaaggggcatggggacataggggtattggaagggaatgtggggcgggggaggggggaattccctctacatgcttctctcctccccctccccccacca

SEQ ID NO: 8519 - DNA, 2052 bp, Heterodera glycines
gagaggaagaataatgattagatgagacagataaaagaattcctttcaaatatggattgacggatggtgtggaacttcactactcatgctacggagaagtaattagcataatcgttatgttaattaacccattaattaatggattccgtcggatagggaaaagagaaaggcagcgaaaaggcaagaaaatggcaagaaacgatgggaaactaacgaaccaaatacggtcacttaaatgaccgatcattatttttaactgagatggcttttttagctaatttttgttaagttttaaacaaaagtttaaagcaaaagccaatcattaccattattagcaaatcagcagtgaataattatgagacaattaatcaatcaatcactcattttgtggcaaatcaatgtccattgaaacaaacaacagttaaaggggatgatcgatctgctgttataatttgaaagtgatggcattgattcattgatctgtcgtcccggcgaggcttaaaactcaccatcccccaccctccctcaagcaatcatttcaatcatttttagccaaaggcttttctatggccttaaaagctgacaatgcttacaatcagtcaaatataaataataataatatttaatatttgtaaaatatcacagaacaaaaagtgggaaagggcaaaacaaaaagtgagcagagatcgaaaaattattataaatggaggcgatttgctggtcatggccatttccaaggtttgaatctcttcggcctggtcatttggtcgcaatggaagcggcgaatgtccacagagtaagaaacccttaagcaatttcaaaagccaaatcagtgacccctttgaaagataaaagccgttgaaaacactcacgacgaatttttgctgttttttgtgccatcgccgttaattttcctcagattggtgatcagatcaaaagcgatcacttcctcgccgtatttgtccattatttcttccccctcgaaatattcgccaggtctaatgatcacattcgaatacaattccttcgaaagtgtggggagcatttcgaactcgcagcattggaggtacaaactgaggggaagggggggggggtaattagtgggtaattaattgatcaattaattaaacgatttaattgttaattgggatgatttgcaaattttttattttaatttttttggcatttccccacagatggccccgtttccctgtcgaaatgattacggttggaagtcgccgtaacccttgtcaaaaccgccgacccaagtcgttttcgagtcgcacgcctttcgggtggcgcgttcgtcgcaatccttcgcaaatcgaaaaaccattcgaaacactcaaaagggacggactcaccgcgtacattttgtcgaagcaattggggcgggagcagagcaaagacggcattccgttgtggtaaatttcaatgcctaaagcgaaaggaaatggcattttttggacgatgtgttttattagggaaatcggactttgggggacttttaactttactttccgtcatttatttaccgtatggaattcgattgttgccacaagtgtgcgcggaaacgaaagaagacaaaatgccaaaacaaagaaagaaaggcagaaaaaaataaagaaaatttgacggattcataggggaaaaaaagctccaaacggaggcgaaaacgcactgaaaaagcggaacttatgaagcgccagtgagtcgaagtcaaaaaactttcacttgcaacaaaaggcaaaaagaaaaaggaaaagcggataaaattggtggggggagggggaggagagaagcaaatagagggaattcaataaagggaagaggaggtcaaatgaaagtggaaaattgggggaggggagtgaaacgaatgggcggggcggggaacggaaagaaattcaatttaatggggggaagtctcgagccaaaagacgagagcattgaacccgttgatcaaacacaatgaatgctttttgtttattagcgatattggcttggattagggcgaggatgaaaaagggtgttaaatggtgagggggggggggg

SEQ ID NO: 8520 - DNA, 873 bp, Heterodera glycines
tttttcgccatccttccaattctcgtcgtccttcgcccatccattggaaacacaattaattgatttggttttgggaggtccaattgaatagattttggaagaaagggaaaaacaaagctaagacagtgataatgagcaaaataagttgtagaagtggaaataaaagtgattcacccgaaaataaatcgttaaatcgaaattaaatgtggaaagagaacgatagaatcaaatcccctttaaaggcgataaatttgttaagaaatgaaacaaaagatgtccatgataaggcatgttccaagttttttccattttgcctttggggagagggaatttaaaggccgccgacagaatgggccaaagactgagaaagggaaaacggagcaaacaacaaattaatttcgtacctattaaattttttatttgtattattaataaaactattctgctggaatgaattacaatacaaagagaggtgttcaaaaagaaaggaggaaaatgaagggaaaaaagaaagaaaaacggtgagaagtgacgacaccaaacaaaaccggagatgaacacatggaagaacatggacaattaattgtattagaaacaaatttataacggatgaggaatttgaaacgatcagttgactagaaaaaggaataaagaggagcaatgctactgattgtgaacggaattgtcaatgggctgaggaaatgttcgatatttggctgatccttttggttgtgtaacggcccatcctcggcccaaaagaaagagtccgttgaatcggcgattggtgccgtccgccagcgaagaatttctgctgttccgatggattgtgccattggtcccgtgccgacggcgaccccacgggattctcgacgc

SEQ ID NO: 8521 - DNA, 1672 bp, Heterodera glycines
cgttggtctttattgctggcggaaaaatttcgtagtactttaattttttgtcacaggaaaattttttgaaaatgaaaatccgatcaagattagataaattaaatttatcggaaaactaattctttgcattgtacgaatagccttaagagggagttcttcatttgcctgcaaattttcacaaacttaatacctgtgaatgaaaaaaaaacaactgattttcttatcttttgagattttataaaaaaaaaattattttttttgaaattttgcacattaataaaagaacattttgaactatcgaatggcaaaccaagaaaatgctcaatttttttagctgcttctgatagaattatatgattacttattacaaaaaaaaatgtattaatcaatatggtcgtcgtccgggtaaaatgtgtgtgcttgtttgatggaggaggtggaggaggaggagggagcaggaaaggaaacaaattatgcgagtgagcgaatgaatggaggcaaaaaagggggaattttttttttttttttgatgggaaggttagttttttttatcagaaagaatggaaaaaaacactttgtccttgtgagcgtattattgtaaagcctggggccagcgtgggccgccgcgttaaattcgcgaaatgcgaaaaatttgaaaaatttccattctcttgaacattcaaacagcatttatgtatgtacaataccataaatagaaattgaaaacaaaaaggaaattgtaaaattattccgggtgaatgaatgcggcgaaaaatggtaagatttgggcaaccctaactgggcctttccaagaagaaatttcatcggtttagacattttttgtcacattccttttgtacccaccgccctctaaaaaaaaaaaaatttttttttgtttttttttcgagggtaatttatgcggtgaacatttaggaatttatcatgaaaaattgtcaaaaaaatttttcaagcgaacataaaagaaccaaatttttaggttagttgccaaaatgttcaaaaatcaatacagggttagttaaaaataaaaattattatacatagaagaaacccaattttatttaggacccatttaaaaagggcaaaatttttttatgggccaaggcctcctcacaagcgcacacaaccattgagaaggggggaagataacatgaaaacatgcaaataattgggggagaaaaacgcatgacaagcaaattgaccgaccaaaaacgagaaaagcatatgacaagcagcagcagcagtgatatttccaaagatttgcccttaattgggcgtttcatcatcactctttttttgtataaaaataaataaataaataaaaaattctttttttaaaaaggaataaaaaaaatttcaggatgttttgccgaatttttattggaaagaaaatgcaatttttaggcattcaaatcacgtttaaaaaatttaaccattgaaattttttgctttttgaccattgattgataccgttattttcaaaatttctttgttttcactctccaaatattcttcgacctaaccaattaaatcataatgaagggattttgggatatatatatataaaatcagcaacagagggagggggaggaaggaaatctttaagaaaattcgtttgtttggattttagtgggtggaggaggggaaggggggg

SEQ ID NO: 8522 - DNA, 3600 bp, Heterodera glycines
cccccccccccctcgggggaaaggttcaccccccccccccattttcccagcccccagcagcagcagcaattcttgtcacccaacaacaaatgcacacacacacacaaaaatatattaaattgtgatacatatgtaatcacttatgattagtttctgatgaattattaatgatgatgatgaggttgggaattgcattttttgttgtttttgtgcggcggtgtgttgttaagtttgtgaaacggtgaaggaatggattaaagtgtgaaactgacttgactgatgtatttgtatagatagagagaagagagagagagtttcggtggatcaaagaacaacaacaaattgtgattggttgataatgatcggaagaagagtggtggaaatgaaatattatgccaatgatcagcaggccaaagattacgctgaccatgtgacccgttttcttcgagagtccaagtctcgaaaatgtaatgccgagagtactaaaaaaaattctcgctcccgagtatttggtagcttcagtctcaggttcgtacaaaatttctttgtaaaatcagcattcaaaaatgagtaaattttgtgaaaagccaaaaatttgattttttatatacataaacactaagcaaagagagacagctttttagcaatgttaattgacgatttaaaaaatttttagaaaaaaaggaaattatagttaaggaattttttaaaaaaggaaaaattgacgatttaatgaatttagaaaaatggaaaattgactgtgcaaagtttagcaaagaagaaaacgaaaatatttatcgtttaaggaattttgaggaaaaaaacggaaactttacagttcaaagaattttaggaaaaaaagagaaaaattgacgatttaatgaatttagaaaaaaaaaaccggaaattgagggttcaaagaatttttagcaaagaaaaaaaagaaaaattatgtttgacgaatttctagaaaaatttaaaaaattgacggttaagagaattttcagcaaagaaaaacaaattgaatacaaattgaatacctatgttacacaaagaatgcaaaattgaagaaattctctacgtctagaaaaatttcgattacaaatatgtatataattagctttttagcaaagggggggggcaaatgttatggataaaatacgtctgctccattcatcgatttgtcgttggcatttttttcaaatatgctaattaagaaatcaaaaatgcccaagtatgtacatataataatgaaacccattaaaatttgaaatgggaaagggggggggggggaattgcccctcgcccaaaatgaaaaaaaattttacccgaaaatggattttttttaaattttagtcaattttcttaatttatcaatttttcccggcggcggctaacacggacggcattgttggatcacaatttcccatatttttacaaaattggtggcacaagccaagcggaagaaaggtgaagtgaggtgaaagtgtggtgtggtgttgacaattagcatgagtgatgatgggatgggaccacagagagagaacaatcatcagaagagcattaacggggtggtacacacaaaaaaggaagggattttgtgcctggggcaattttctgggaaaaaagaatttccgggttgggagaggcatgacctgacgattttaattcattttcaaaaacagtccagaaaaaaatttcagcaggtggggtgtgaggggtaagggcgaaaattttcaaaattttcaacctcaatttttgagttcggtagggctgaataaatgaaaattctgtattatttttaaaaaccgtttaggttacgacgaccggatttttttttatagattttttgcaacaaaaattttcacagtgatttaattatttcttataaaaatatgtaaatgtaaaaaatagtattattaattacaaaacatttaatagtgcctccctttttaacgtaccaaaagacaaaaaaaaatatttctcatttaaaaaaatatgtataaagaaattgtagggattaaatttatagtcaggtgatttctaatttatttattttatcatttttaattaatccctcccccgtaaatttattttcttgaaaatatttttttctctaattgattgattctcgaatttgcttttctttaaacaaatgagagagagagagagagagaatggaataaacatggaaatgctgaggccatcattacaatataatgatgtatttgcctctttaattaattggcagcgagaaaaaaaatatggtaattagtgtttttggggtaatgagttcattagcagaaactatagggatataccatatttactaattagtggcccccgggggctctgtttttacctcccccccccccccccgaaaggggggctttatttcatagggaggctataattcaggggggggggggctctaatgaagtaaatgcggtaattttgtattgcacggctttgtacagtatgcaacaaacatacagaagtatttacaaattcattgtaaatattattattatttggctgtgcctttttattgccattgcagtagacgcctttccgatactgtacttactacctaccgtacaccatcgtactcccacaaaaaaattatttgaagcgggcaatttaaatttttataggggacattagtcatatcgcgaaaagaattgaaaaataagaaaaatgtttttttatgattttaagagatttaatttatatatattttttaaatggatatgtggaatctttttttccaaaaatcaatgcgccaaaagagatcaatgctttcaaatgaataaatttagctaattttaattgggcttttttattgggaaacaatcatcctcaaatcaatcaaatattccttcttctaagctcgtcgaatactatatgtttttggactcgggccaagaaatggcaactgtcatcgatcatcgaagagagcacactcctaattagcccaattagtaattcattaattacccatcattgaatgacactttaatttttgttatttaaaaattacattaattgaaaaattaaaaattagatcaaaaaagaaaatttacattataagtaattttttaaatcaaaaaaatcgctataatttttatgataggaattaaaggcactctttcgggattatttacgtaaatttacgtaacaatcggctgactaataaaatggatttgtgaattaattgttgcataatttacataatgtatgtagtcagtgggactattacatataaatatgttgccatttttgtgcatatgtacagaaaaatatatcatataaaatggggggagcctaaagtttgttaatctgcattaaactaattagcccaatcattaattgggttgtttacaatctacttttttgaattgttttaacaacttaattagcacctcgttaattggtttatgcattgttatgtatgtatgtaagatctatggccccatgaaagagaagcaataaagcgtaagataagtgaattttaaggaaagggatagtcccctcgaagattaagcaatatttgcatttaatttttttaaaagcgaaaataaaaattttccatttttaaat

SEQ ID NO: 8523 - DNA, 6130 bp, Heterodera glycines
attctcaccgcattccgtagaatgtagccgaacagcccaaatatttgtattacaattggaccttgcataaaaacattgccagccacaaccttaatgagcacatacgtaattcgtgccatttcaaacttaaaataaaaatttaaaaaattatttaatttttttttttggcataccatcacaatgccagcactttggcccaacaaaatgcgcttcaaattggcatggaaaaccgatgttttgatgattaatacgacaaaaaagaatgtgctcagcagtgaaattgggtgaactgccaattcaatgtaggtcaacacaatgccagaacaaaaaatcagctcagatggcgatgaattggtggtattgtttggcattgcaatggtcgaattgttagacattttatttaatctaaaaatataaattttatttaatttaaaaatagataataatggaatattcgcaatttatatgttcattttatgcaattttaatgacattcaaaccagggatgggccaaatcgaaaaataaaatgcgaaacgagaaaacgcaaaagcgaaagtaccgaaaaaatctaaatttgcgaaagtaaaacgcgaaagcgaaagcccatccctgattcaaagtaatattaaatggcagttttgctgctgaattaaggtaaaaccttaattaaaattttattgaggtggtaagactaataaatttgattaataattttcattacaaattttttttaaggaaactctttatattccagttatatttagggtaaaaattacagattatatgaaagaaaaaaatttaacgaattttcaaagaaatgccacgaaatgccatgccagaaatagtataaaaatgtattctttttgcaagtaattagcgttacaccaattattttcaacaaaaccatttaaatgtgcaagcatatcaacatacaaaatattttaatgagatgagataaaacgtcagtatttaaaaaattaatgataaaagaaaaaaacttttaaaaaactatttaaaaacaatttttttaaattaattagttttttgagtaattttttttattgaatttaattatatgtatattaaagtgatttggtacaacttaacaaaatttgaataaaaaaaaatgaattcaaaaaataatcccagaaaataattttaaattttttttttactatttaaattattttgttttatgaaaaattaacagaaagatcgcattgtgtcattttaaaattaaaaaagagaatgacatttaatgaaaagacacaaatgataatgcgcacgagcattaaaaggtattcattataatgagatggaaatttcttatggaatgccaattaatttctacaaaattatttttatgaatttgaaagaaattttaatattcaaatctctcttctcgctcaattttcggagttacgagtcaaaaactctaaaaattggtttatgagaaattttggtttttccttttttttgtttgtaaattttgtgaaaatttttggtaaggtaataaattttatttattggcactgttatattccattttattaatataaaatataataattaaacaaattaaacaaaaatggattttttttaatttgtaaggctttaaaatttcactaagttttcaatttttattgaaaagcgtaaataaaaaatagcagcttattactaaataataattttttccaatgataattcaaaatatttggatggtcattattagggactccatttttaggcaccaaaaatcgcgaaataggcacctaaaaaggcagaaaaaatcgcaaaataagcactaataggcacaaaaataggcaaacaaatttttttattaacactttttagatagcaaaacacataaaaacataaaaatttcatttgatgaaattaataaatattttaaagttttttcgaataaggtcaaatttttaaaccaaaaatttttattaagaaaaaaaaaaattaaattttgaggataaatttttaggaaaattctttcatttcttaggagtgtatatttttcgtttttattgcatttttgttaaggattttttcgaaaagcctaaaaaaggcgtcaaaaatggcgaaataagcacaaaaataggcatttagtcaaaattccaaaataggcaaaaatcggcattataagtcttcgtatacacccaaaaaccaaacggaaaacgcgtgtttttcgtgcttatctgtgcgtattaagtgcgcagaaattttaggcatttgcctaaaaatggagtccctagtaattataagtagagtccggaaaagagggtcggtcgaacggtttcggttaaaaactgaaaaaaaccgaaaccgaaaaaaaccgaaaaactcaaaaatttatcggtaggttttttcggtcaaaccgaaaccgaaaatcgaaaaataccgaaaaaaaccgaccggtccgataattataagtaataaggcagattaaaacattccaaaaggactgagcactaaaaatagatattatttagatttgctatttgctgctaatgcattttaattcccacggaaatttgagaatggcccaaattatttaaaatcgaagaaattatttttgcaatgaaataaatgtacatacctattttaatatttagaaaataattatgaattcaaagaatcacacaaataaaatattctcaattaattttatatattttgtatttaccgaaaaaaaaatcagaaaaagaggcttaaatccatccaaatttagctacacataattgcttaccagaattggatagttttttattcatttataaataattttgttaagcccaaaaacacgcaatcagaaaacgagtttagcatgttaagcggaccaaaaatataactgaatttttacggcagaatcttatgattttgaagaaaaaaaatgttgttatgttttgtgatgattttatttttttagaataaatgtattgtattaaaattaaattaattcgaataaatgtgttttccggttgggttataaaattttttattatttcaattctgtaaattcttttataaaatagtattagaaagaaaaagttgaaattttttcatataaatttgatcaaatatatattactcattaaagaaaatcaatgagaaaattctaaggtcaactgtccttttatatattaaaaaaccagcagcaggacagctttttgtcccctcattttggaatggtttcaatttcaatgaaagcacgcattagtaagaggcgcttcatctacgataaacatgcaaaacaaacaaaaataacaaaaatgtatatgaggaatagactataaattaataatgaatgttaattatatttaattaaatacttttcaaatttccaatttggtcatgagatgttggattatttgaaaaaataatgtttttttttattttataaaaaatgaaaacaaaataacttgtattcaataattgaaaaaaagcatgacagacaaaattttaaaatgacttttatcactctcaacaaaattattatttttatattgttttgaaacaattgttttttccgtttaaaatgtcttttgagaaatgcccaattccttcacaatttttttctgttttgtgttggccatataaatttttaagttcataaattcgttcaatgaaatttcgcgtttttcttcataaaaatgattttttaaatttttttatttaaattcatttcttttttccatttatattttttgcgatttatgctgaataaattaccaatttcctctcaatttttatgtcattttttcagttggtattttcctttttctctcattttttctttaatttgtttcaaattttgaatgatttcatttttctgttgatcatttgattttgttcaatttctatcgctttttcttctcttttatttttgtcccatccctcgccaaatttattttgtcaaaattttgttcggattttgccggatttaatttcataaaataacaaaataataaatattaaaagccatgaattgattttttacaatttatacacgtcataaatcaccactatttaatttagggttcggaccccgcccccgtcacccccgcccccgccgggggcgggacaggttttttggcctcacccccgtccccgcccccgtgactctgacccccgccatcccccgcccccgcgaccttcacccccgcgggggcgcgggggtgaaaatacacccctaagaatgacatattcatggataaaaggcaaaaaatttatacaattttgattttttttaaccattttgacaaattttttatgaattaaagttaattttattattggtcattgatgtgtagtgtggtgtagtggttagtgaatcaatcttgacattactttctgtcgtgagttcgattcaagttgacggtttcttttttaatttatttttttaattttaaaattcgcctggcgctgcctatcggcatcgcagggcccaaaaattcgtaaatcttattaaaaaaattctctaaaaattgcaaaaacctatcattttttggacaaaatctattaacagatccatcagttttcaaaaaaattttcccggcggcgcctatcggcaccgccggacccactccctcgcacattcaccaagttttttttttttgggaaaatgtgcctcaagaaaatatgttacaaatctgagttccaattttgcttgagtaaatcatgataatttaatatattaaaaaacaaaaatttatcgtaaaaatcttatattttttttgtaaacatctgttagaaatcgagcttaaatttcaaaattcgccaggcggcctatcggcaccgccggccccccaaaaacctattttttcttaaaaaattagccaaaaatctctaaaatttggtaattctttagacaaaatctgtgtaatttatgccaaaaggaattgaattgaggcgatacattgactaaaggaatgtggagccatcacatcattcataaaaaattaattttttgtaaaattttttggagttaattcaaatcaaacccccgcccccgcccccgcgggggcggaattatcgtgcccccgtccccgcccccgcgactctgacccccgccatcccccgcccccgtgaaaagccacccccgcccacggggtccgaaccctagtcaaaaaccatcaaatgaaaatatttttttgatataactttgctcaaaagcaaccaaatttttaattacttatatcatacaatagactttgttgttttctattagcctaaaaagtttcaaaaagtttcgttaagtttcgagaaagttatgacaaaaaaagttgtaaaaaaacttggtttttctgagcttctcaagtcataactttttttaaactttaagaaattttttcatattttgtaggctaatagaaaacacttgggcctatcgactgacatcaagattataaaatttagttcattttgggcgaagttatgcataattttctgtcaaaaattttccatttgatggtcttttgactaacgcctattttcaatatgcattaagtttatgcaaattctataaaatataaggacatagatacgtttatttcggcattcagtaacatacatatgtataactttaaatagagtttatcattatgggcatagatttatattcatttgtagcgactctacacttaactttatatagagtttatcattgaaaaattaaaaataaatccaaacatcctttttactgaacttttctataacaacaaagaagaaaaaataataagaaaaaaatattaagattctttaaaagaagagttaaaaaaaaataagaatttgacttgatttatattttgaaaattatgttttatattcaaaaaatgatgtaaacaaatataaaagtggaaattcattctctattttgtattttatatatctttttttgtacaatgtttcattaattctggagtttcaacaatgaagcgttttttttctaatccggattttttgacatcaaaaaacaaaaattaagattaaaaacgtttaaaatactattttgtgttctaataggaaaatgtctgtttaatatttttttattttttttttattttttctttcattgcgcgctataaaatgatgtcattttataagcatattaattga

SEQ ID NO: 8524 - DNA, 3959 bp, Heterodera glycines
cgaggctatggaaggggaagaggacgatgatgccgttgacgaggacgccgagaacaactggatgctgggatacgaagaagccggggagaagccggagtcggtgacgacctacgcatatgcacatgccggtaaattcaattatttaaaaaaattttgaaatataaaattaaaaaaaattaaggctctcggtatgatcacgtgttgatatacggggaaatgctgcgcatgggcgtgcggcctgaactcatccgccaaggcaaccatctcctagagatgaaggcgcgcaaaacgggagtctacacacccaccgtgtttcgggacaggtaaaaattcaaactgaataattttttattttgtcctttcagctacaagctgattccgatcaaattggcaaattttgtcaagacgtttggcctggaaattgagggcgtggaaaacaagaaatattttccacacaaattcaataaggtaaagataatttattgaaaaaaatgataaaaaattaataaaattttaggcggaaaattatggcactatgttggacacactgccaccgatggaggactattacccaggtggactcttcccggtagagcgcgaaaagttcgagcaatggtacgacgagaaccaagaaactggttttgagctgagcgaggtcatcgcggactactgcaagacgggtaaaaaattataaaaataagaaaaattttttaacaatattttgaagatgttcaaatcctggcacatggtatggtaaagatgcggcagctgttcttgtccgagactcggcatgacatcacggattcggttaccatcccatccggctgcatgaagtattgggtacagctggcgcaccacgacaaagagcgcgtcgccatcatcccacacttgggatacgagaagcgcggcaagcagagcacaattgcccggaaatatttgaaggtgcctaaaaatgattataaatttacattttgccatttctaagtggcgtgccgaagaagagttgcgagagaatggccgagtcctccgccatgtcgaaagccctggaggggagttcaaattcggcaactacagcttggatgggatgatggagcgtccagatgaggacaaaaatttggccattgaggtcaatgggtaaggaaagaattccgaaaaggtgccaatttccccattgaaaaaggtgctattggcatggatgcccaagctgcttccccgacgatgcggcaattgtgggcggaggagaaacagccggtgccctcagggcccgtgatgccaagcgaacccgggacattgcgcgggagttcgaggtggaaatcatctgggagtgccacctgaacgcaatgctggaggacaacccagccatgaaggcgtacttcgacaactgcccggactccggaccaatttggccgagtcctgcgccatgtcgaaagcgctggaggggagttcaaattcggcaactacagcttggacgggatgatggagcgccctgatgaggacaaaaatgtggccattgaggtcaacgggtaatgaaaaaaattccaaaaatgtgccaattttcccattgaaaagatgctattggtatggatgcccgagctgcttccccgacgatgcggcaattgtgggcggaggagaaacggccggggccctcagggcccgggacgcaaaacgaacccggtacattgcgcgggagtttgaggtcgaagtcgtttgggagtgccacttgaacgcaatgctggaggacaacccagccatgaaggcgtatttcgacaactgtccggattctggaccaattgacttccacgatgcattctttggcggtaccttttccatttaatttttaactaattttccggcacaggtcgaactgggcccgaatacttgggcgcatcggtgatcaaccctgagacgggcgactggaaaagccgaacgatcaaagtgaaagactttaacagtctttacccatcgcggtatgaaaatgcgaaaaaaataattaaaaaatctttgaaaattaaagaaacatgttcaccaattacccggttggccacccgaccgtggtgcagtttgacaaggacgtggaatggaggagtccagcggacattgtcggcgacgacggcatccgcctcgagggcatcatcaagtgctacgccgtgccgccccgccactgtcactacgacatcccggtccttccctaacggctcaacaaccggacgttgttccccctgtgccggacgtgttcggaaatgtacccgcgcggcttgatcgaccccgagtacaactgcagacattttgaggactctgaaaggggtgggtttagaaacttttattaagcaaatatttttcttgataggattttcgacaactgtgacgcacattgagctggaggccaccctccgctctgggtacaaggtgacgcacgtgtaccgtgcctacatttggcggcttgcgtgcgattggagcaatgggctgttccactcgtacctgctcaaatttctcaaaatgaaatttgagggtaaaatttgaaaaacttaataaaaaaaaattaaacaaacaaaattttaagcaagcggatatccagcgtcttgtacgtaggcgggcatcagtgaggaggagtcggcacggagaaagcaggaacacatcgacaaggccaaagaaaaggcccaagtccatcttgaggcggaccgaatcaaacacaaccccggactccgctacctgtccaagctgtgtttgaattcgctgtggggccggttcgcacttcggtaaaactttttagaaaaatttataaaaaattaaaaaatcaatagaaatcggctcaccaaaaccgaaatcgtcgagtgccatgcggagctggccaaactgctgaacgactcgaagattgaggtcagcagcatcgatcagctgacggaaaagttttggatggtctgctacaaggccaaggatgagcatgtggtggaacacagcacgagcaacgtaagaaaaaatttttaaattttgaaatttatttgcctttctcaggtggccattgccctatggaccacctctgctgcgcgaatccacttgctggaatcgctgaaaaaggtgtatggccctgcaccaggtgtagagcgctacgacacccgcattctctacatggtaaaaaatttggaaataaatgaaaatatgaagtaatttttataatcaggacacggacagcatcttctacgactacctgacgcggctgggggacccacttccgggtggtgagcagctcggggagctcgccgacgagtacccgaaccacacgattatggaattcatttgtggtaagactcattaaaaattaaacaaaataaatggaatgtttgtttagctgggcccaaggcgtacggattgtggctgcgcaacaacgcaacgggggaggacgagtacaagctgaaggtgcgcggcatcacgctcgactcggatgcctgcgagcgcatcaccttcgagaagatgaaggacatggtgcagaacaagctgggacagccggacaacaacgtccgcttcaactacccaacgaagaacttccggatcaccaagaagggagagattttcactgtgcctctggtgaagcagttcaacccgaccgtcaataagggggtgatcagggatcacggcttgaaggtggtgccctttgggtacagcgacgaagagtggtgtaagtggaactgccctggcgcttgcacctgtctgttcaactcagacctcaatgtgaacatgttcacagaagaggagctgaacgaccccgacattatgccataattgtttttattttttaattttcattaaatttgtaatatttttattcatttatttcatcatttttcacccaatatttttccggaaacccaatgaatttcaccaatatttctctttttccatctctcactcgttctttgtatttctttttcattcgatacattgtggtttcatccacttgtact

SEQ ID NO: 8525 - DNA, 2599 bp, Heterodera glycines
tggaatcgttgaaaaaggtgtatggccctgctcctggtgtagagcgctacgacacccgcattctctacatggtaaaactctggaaataaaatgaaaataggaaataattttttataattaggacacggacagcatcttttacgactacctgacgcggctgggggacccacttccgggtggtgagcagctcggggaactcgcggacgagtacccgaatcatacgatcatggagtttatttgtggtaagattagttaaaatttgaccaaaataaatggaaactttttgtttagccggacccaaggcgtatggattgtggctgcgcaacaacgcaacgggggaggacgagtacaagctcaaggtgcgcggcatcacgctcgactcggatgcctgcgagcgcataactttcgagaagatgaaggacatggtgcagaacaagctgggacagccggacaacaacgtccgcttcaactacccaacgaagaactttcggatcaccaagaagggagagattttcaccgtccccttggtcaagcagttcaacccgaccgtgaataagggggtggtcagggatcacgggttgaaggtggtgccctttgggtacagcgacgaagagtggtgtaagtggaactgccctggcgcttgcacctgtctgttcaacccagacctcaatgtgaacatgttcacagaagaggagctgaatgaccccgacattatgccataattgtttttattttttaattttcattaaatttgtaatatttttattcatttatttcatcatttttcacccaatatttttccggaaacccaatgaatttcaccaatatttctctttttccatctctcactcgttctttgtatttcttttcaattcgatacattgtgttttcatccacttgtacttttgttaattcgggcaaataaaattttctcttcaactttgtgccataatagtctttgagcaaatagtgctgggggttggttgagcgggcctcgtctactgtgtaaacgtgatcagagtaattgggtatataacctaaaattaaaataaattgaccgaaaaaatgtgtgaaatactgtacccttctcgaaaatgtgcttaggctcgggaattctgaccgtttcccctgctctgatttttggtgtcttgtccaattgtgcgagcccttcgccgtacaccctcttccagacctccctcgcattggcgtcgctgatttcgttgggtctaagtccggtcgcgcggcacaccgagttgttgatggcactcaaaaactttggaagcacatccacccacaccgacgtattgttggcggaaaaatatttgtacagccgagtctttagggtgcgtatggcacgctccgcaacggcggccttcttctttgaactggtctcaaacttttgaatgcccttctccgcgtaaaactccttcaacggttttgccacaaactccagccctcgatcggtgtacagtgtgtccggcacccttggcatttgctcgaaaagctcctcaaaagcccttttcatgtccgctggtcgcttactctttacgggcgcgccgaacattcgcctcgatagaacatccaccgccaacagcaagtaccggtagccgctgttcttgcgcgaaagtgcctggaaatctgccaagtccgcctgaacatctgaaccctgaattgtgcacaataagccccagtacaacttaccggtcatgaaacccgtaggcacagtgcgtaggcgtcggaacttgtctctctttggcttgaacagcgtgtaggtggtgttcctttgcaaaaagtcttcaaactcggtacgcttcaacttcgggtgcttctccttcaccgccgcgtacagagcactcgcccccgcatacccgcccggattggccgggtcggtgtatattttgtttattttcttgtccattttgagggaataaaacgcccgctttgtttgacttgtccgacgaacccagacccaacaaacagtcgattgagtaggctactggcgagcggattctgtgcgagtttcctcttcaactctttggttccgcgtggcgaaggggcattctccgggcgagggtccaccaggcgttcaattgaccaggccaggtccgagtcgataaactctcggcccgtctttgggttaatgattttcccacggtcagttgcgccgaatctctgcggatcagacataatgatggccaacaggtggtccttcttctcgatcaatttttgctgttttgctgctttcttattggtcctgggtgatcggctgcttccctgcgtcgggcttgttggggttaaaaactttggcacttcaatctcttcctcttcatcttcgtcggtaaccatcacggacttgtccttcggttcgtccggaccaggccgtacctgcacacccgtctccactgttttatttagcagttgagcaccgttgctgagctgtacccggacgggccgctccttatgttccttgcgcatcttcaggtaccggcgcagctgctggttgtacattgcgttccgctcgctgacgtttcccttccgcttctgtactgcagcggtcacttgtcgtttgacaaagcccaagtttgtccgctcagcaatg

SEQ ID NO: 8526 - DNA, 3432 bp, Heterodera glycines
  unsure (1)..(3432): unsure at all n locations
ttcaaattattaattcattttataatntcggtattttaatacactgacatttaaatattttattcaattaaaatttcgataaaacactatttattattccacaggcgacgaacggattgtacaatcacatggtggcccagtgaattgtttggtgttttgcagtaagaatgaaccgtgtgacaaatgctttatctgttgttgttcaattcatttaaaaagctttgttctcagtgaccataaaaatattcacataatttttttactaaaaagaccaattaaaaaaattgaatacacaatatttctaacatgcgctatcagcttataattttttttcgaatttataaaatattctatgaatactaaacaagaaaattttcagttgaaatttctagtccaatgacttttgaccatttttccaatgccctcaactttttcatcaattagaaaaaacattggccctaagacacttccctgagcactccctaaaatattcagtaactcaccaattttaactttggattttcaaaaaattagataaaaagtcaaccttcgattgaaatgttattgattctatgtaatattaaatcgattgaaacaaacagattaaatgcctagataaatcaatattagactcggtgttggacgggatcacgcgtgggattttgcgggatcccattccgcaatacagtattttttgcagaatgcggaattataccctacaggatccggtcccgcaaaattttgcgggatcccattccgcaatacagcattttttgcagaatgcggaattataccctacgggatccggtcccgcaaaattttgcgggatcccattccgcaatacagcattttttgcagaatgcggaattataccctacgggatccggtcccgcaaaatgtagacaaaaaatttgaaaattcatgctagtataacttttcgatgctgatcaaaagagtcaattgcgtgatcagactacgccnttcttgtatgtgatcggtagtgatcaaaatttaagaaccccagaggnccttgagttgcagctcgattggccgacgggaaatagaaattaaaagaaattggataaaattttcaatttctaaattatttcacaaaatttgcttttgtcaatctcgggttgtggtccaggcgttagtctcactcagtcttggtcccagtttttctcataaatccagatcccgtgaaaacattttttgagaaaattttaggaaattgtcaaaatattagtaaaaaaacactaaaatagttcaaggtgaacacgcacaacttcacttctgctgttgatcattagggctggtaattgtattgagaagtctaaaaacaaaagacgaattaaaaatttataaaatagaactgtaaatccatctgagtacggaccactcttccagaaaattttcagaattccgttttttggaacccttccgtttttgggcattgctggttaattaaaaatatatttactgacccatcatccaaattttcctcgttgacatcaatttcaattaggtttcgattccgctggttcatattgtcctcccattcctctgcttccttctcccatttggcccatttgttctcatcgcggcacatcggagaacggaccatcacaaatttcgtaacgtattcaggtacagtaatcgtcccgtactgcccgtactcgagtactgtctttgtcaataccattcgctctcccgtcaaatcattcgtcaaatcgaatggcaaaatcgaagtgtgagcaagcgaaacgagacaaatgttaatgatgaaatttgcaggggaagaagcatacaaaaaggcctgaaattcgatcatgcccatttaaagggtgattgatatccttgattttatccataataacaaaagaaatatgtcgtgatgtcttaaaaatccctgaaaaacaaatttcaagttttcgacgtcctaaacacataaaaaccatgtagttaattaattaactaccgctttaaattcgtctatttttggtgccagttggtactcctgctcagtggattcgagttcgcaatgaaacattcgcggcgaaccgtccggacgagggggcgagcacagtaaccatttggccaacgcttggcaatctgtcgccgtggcactgtcgtcggccggaaaggcgggaaactgtccataggaaaacactgagtgaagggtttggcaatcgcgcagaatggacgaggaagattgacgaaaatggtgcaaattgttgtggtgagtaaattcaatggcgcgaatttcgctgcgtaacattggccaaatgttgcgcacaacgaacgccaaaacgcggtcactttccgtttgaatggcaaaatttgtgccataggaagcaaaaatgggaagaaaacggcacagaaaaacgacgacattgtggtcaatgtaactgaaaaataattgagaactgatgtataatctgataaattttgtcattttttggacgggtcgttgaaaatttcttagaatttttcaatataaatgggagttaaatttaagaaaaccttcaaaaaataaagaatttttcgggcagagtgaaatttgtcacaaattgtttccaaaagacaaattgggccaattaaactgactgtttaatataaattgggctaattttgaaaattcacctattttatgtttaaaccaataaaaatttaaaagctaaactgtccattcccatttcagtgagccttagaatatcggcctcaacccagaaaagtctcgagttttttgaatactcaaacccctgggttgagtctcggtgtcgaggccatgaaatttccggtctcgaccaacactcattgttttcattactttatttggatgcgtggaaatccgatgacgttgttaggcaatggcttctgcggaattggcaacattttccaaccccaattagggatttttccatctttttaatttccatttccttggccccattctcgccaattttgcagcaaatttccatatagtagagcgtccatttgcgtgttttgaagtgttcgtccactcgtccgtcaaatcgacggctgactaacgcaatgccaaggccgagttgagaaggcggcagcaaattgaacaccgcgtgccaatcagcaggacaaatggaacagaaattgaaatttattaaataaatatgttaaattattatttaaataatttttaaattaaataaaatcgtaaattattatttttattaaattacatttctttgtccatttgtttctcctcttctttcggattgtccgacattttcagtatcaaaaatagtttaagacccatttttaaatgctaaaaaataaattgaacaggtttcaaaccaatattcgggtatttaatagcttaaaaattaagcaattttcaggtccaattcatttttcttaaaaaaaatggaacaaaaatgccaaaagcagttgaaa

SEQ ID NO: 8527 - DNA, 3649 bp, Heterodera glycines
ttttaactgcttttggatttttgttccatttttttaataaaaatgaattggacccgaaaattgcttaatttttaagctattaaatagccgaatattggtttgaaacctgttcaatttattttttagcatttaaaaaatctattaaccggccaattttcaaaaatttttattaatgaacaaaaaatgagggcaaaaaaggttcaaaatactaggttttggagttcctcctgtccataatttttcttacatttctgaaaactgaagaaattatctgaaaattttcaagctaataaagcaattcaaaagcaatcgtatgatacaaagattatttaacttagaagtgattaagaaaaaaaattgttgccgacgaaaaatggcctggacctggcggaatagatgagtttattgatcaaagcatcagatcgtaatttctgttcattgaaggtattctggtcgactgcctgaaacatttgacaacgatcatgcccaggagctaatcgaaattgcggagaagtacggactggagccgatgaagatcatttgccaggacaaacttagctctcggtaagctttttttaatggacggacacctttccacacaaatttcccaataaattttataaaatttatcagccacgacggggctaaattaacaatttaaactgtttgtagaaaattggaaaacgaattggatatgttgaaggagctgagcttgactgatgttgagaattgtgccaatgaagaaatggaccgtaccgaaaaacaagtcaaaataagtgttgtgtccaaagaacaaaaatatttatcgacaataataaataataaaagtctgaggagagagagtgaatgaagagaagagaaggcaaaaagcgaatgaatggggagagaacgaaatgtgtaaggaacagtcactatttatgcacttcgacgggcagagagaaaggaaaagacattgagggaaaatagcgaagggaaaagatagagacaataaattaatgcatgtctattttgtcttatcccaacatctccctttttaaatattttgcccgggattgacaagatcgtattttgttttcgtcgtgtccatgtcaaatatttgtgtttgttttctttgacgtgttgaccgtcttggctcaatgatttggacatgttcaagcggttcattctcctcgtcggcaatcgcacatgacgtggtgactgaggtgcttcttgttgctgttcattctgatcttgttgctcgtttggttctgaactgtctctgtacgggatgggaaaagatttcctgatctgattggaatggcgagtaaccactgcgtttaactgtggggaatatattcgccaaacaacaccatttccggaaacaattcttcctgacaaccacatttttgagccgttcctgtagttggcaaattgcactggattgtcggtgcaaaacgtgcgttctttcgtcccataatggcggttgaattgttgtgccattttgtgccggtattgcttatcggttgtgtccgaatgctttttcttttcgtttggcctaactaatgacagaattgtgcggactggacggcctagaaagaattcagctggcgtcttgccgtttagacttgcgtttggcgtgctgcgatacgccaacaacgagttttggacccaatgcgaatcggtttccccacacttcttcaactgacgcttcagcgtgtccacaaagcgctcagcgcgaccgttgctcatgggatggtacggtggtgcaaaagtgtgccgaattccgtgttctctgcaaaatttggaaatttcaaatgatttaaatggctgtccgttatcggtaacaatctcttttggatagccatatcgagagaataaccagataaacttatcgaccaaaattcgagcagtcgtcgtcttcattttgaaaatttctggccacttactgtacgagtccacaacaaccaaatatttatttccatccgcacacgggccggcgaaatccatgtgcaatcgttcgtacacttcgcttggagagggccatggactcaacggcactttcggtggcattttggcagcggacagacactcctgacaatttcgcacccaccggtcaatgtccaaatccattcttggccaataaacgaattgtttggccaaacttttcattctgacaattcctgggtgtgtaaaatgcaatgccgtgagaatgcggttgcgcaatgaactcggaataacaacacggtcgcccatgagcagacaaccatcaacttctgtgagacgtgcgcgctgtgtgtaaaatgcagaaagaggggaagaatgtgccgtttttggccaatgattacgacaattttgcaaaacttctagcaactcttcgtcctgatttgttttctctgcaacttctgttgctgtcaccggtaattggtccaatgttgcatgcaaaacatactcaacagcagccgtgccatgttcaattgaatcttctgaacttgaattgaaatcggaatttgtttgtgccgttgcgatgacatagtcgtcgtcctgctgtgcctcgcggtgctgcatgatcaatcgagagagaacatcgacctgtccaaaatctttggtggaaatgtacttaattttgaaatcgtaattggacagtgtcaaagcccatctttgaagcctggatgctgtataaattgggatgccatttttagacccaaaaatgctaattaacggtttgtgatccgttaatagtgtaaatttcctcccatacaacatgcggtggaatttttgcacggcgaaaatgatggccaatgcttctttctctatctgcgagtagtttctttcggccggagacagagatcgtgaagcatgttcaactactttttcttttccatcggcgaaaacatgactgatcgttgctccgatccctttgctgctcgcgtcagctgcgactacgattggtttggacgggtcgtagtgagtgagcaaaaggtcagacgtgatgatttgtttcgcgttttcaaatgcttgctgctgttccggtccccaattccattctttatcctttttcaacagttcgtccagtggagctctgatgtctctcatttggctaacaaatcgggaataatagttaattgcccccaaaaatgatctgagcgttcgttgatcagacggtgctggcatttccttgattgaccgtgagcgatcagggtcaggacgaataccatccgctgaaatgacatggccaagaaatttgagctcggtgcacaggaactggcatttgttgattttgacacgaagaccccagtcctgtaaacgtttgaaaaatttggacaagatttgaaaatgcttttcggtcgtggttgaggcaacaatgaaatcgtccaagtagacgaaaacaccttccaaccccgacgtgagttcatccattaatttctgaaaaatggacggggctgacttaaccccgaatggtaatcgctggtattgaaacaacccacgatgggtgttcagaccaacaagttgttttgactcctcgtcaagttcgacttgaagataagcgtctttaaaatcaatttgactaaagactgtcgcgccacggagagcattgaagatgtcgtccggccgtggcaatgggtgcctgtaaagttccaaacaatcatttaagcctgtggagaaatcaata

SEQ ID NO: 8528 - DNA, 2708 bp, Heterodera glycines
taaaaatttaaaacacataatatttttatttcattttttatagttttcattttctcaacccaaaaaattgtggtaaaattttgagcgttgggacttttccctttctctcctttttatatttttttatcgcacattgaatcgcaaaatttgtttgctgctcattagtttaaacttttatcccgccaaaaacccatcgtattagcttttattaattagtttaatcgatggcatcccaccattttgatcattttttaattttcaataatttaataaaattaatcaaaaaacataataatttgcttattttccaattaaatttaaataaaaatgactttataatttgtttatttctcctttagtgttgccttcattgttttgtgaatttgccatgtcttcttctccgccaaaaagtgcccattcgccgcttttggcccaacaactgtcgtcgacggctttgtcctccactgcttcctcggcaacaatggcagcactggaaggcacgagtggcacatcgacggacaaaacgacaaaacggacaaagcgaaattccatggaatcgaaggaacgcgaaaatggcatctcgtgagatatttaaaggcttttataaaatttgttgaatatttttttttattgttatttatttttcgtacaaaaatttaggggcggattttttgaaagttcaccccagaaagatcaaattaacctttattttatattttttaattttaaaaatttaaatgagagagagagagagagggtagcgcaaaaagggattataataccgaaaaacaaacatttttcttaaaatataatatttatcaagatgtttttagcacccatctgaccctggtcaacttcatgaagggaatgatcggctccggcattgtaaaatgcttattccgtccattcatttgcaacgccttttctgttctttgaagctgactttgcccatcgcctttaaacaagccggcctttggacggcgtttgggcttgtctttgtgttcggcgcattgaacacaattaccatgcatatgctggtggtggggggtggggagttcaattaataattttgtgatgttaattactataattattgctataattgcggcgcagttaatttttacaaattttttcaattgtccgatcgcttagctttggattgattttttaggtgcgttcggcacatcacttggcaaaaacaaagtgggcaccctcgcaatcatttttttttgcttttttttgtcattacttttccagaaaaggagcgggaaacggtgggggcccattgagttacggtgaggtgatgcacgagtcgttgacggacagcttcgaatgggcacggccatatgccaaaacagccaagtaaaatgccgtgttttggttaggggccgtcccagagggagagggactggcacgaagaaaatgaaaaaatacgaaaacatttggttgtcacccaaaccccgaaaatcatcttaagaccgcggactgttccggtattttggttgcaccagtttaagcttaaaggcaattttcttatggggaatgggcatccctgaagaattttatcaaaatgacggtgttcccaatgattgcagagttttcgttaatgccacaattgttgtgctacaaatgggcatcggtgtactcaaatatgacttcatcgttgcgcaccttcgtgaggtgtttagcgcaaaaatttgaaatttattaaatttatatttttgttaattctatatttatatggagcaaatattaatgaaaacaaacacaaaaaggaggaatgtaaaaaaataattaaaatgagaatatttgtgtggattttggtctttgcaataaaaaattgaaataatagaattcataaatttgatcgctcattctctccccccccccccacaaattgaagctgttcaatgagttcacctccttccacgtgtccaccttcgtttgggctttgataatttttcctccgatggttttgctcaatttcattcggacacttcaacgaattgccctgctcagttccatcggcaatttgtttatgttcggcgcttacggcgccattttttatgttcgcttttttaaaaatttatttccggtcaatttatgtatatttaatatttgaattgtcagaatttgcttctgccgccctatcgaattgccgaattgccgtggtggaacactcccgcaggcattttggtgttttaaaaataattattaatatttttataaatttaaaatgtttttcccgttatgctttagtccgcctgcggttccattctctactgttttgagggccaagcaatggttctgccgatggagaacaaaatgcgctttcctggcgagatggtcagccgcgttggcgttctgtccactggcatggcactgactgcgattttcgacgcggcggtaaaaatcccaataaaaaatgccattctaaacccaacaataaatgttcaggtcggctttctcggctatgccaaatttggcgaacacatccagggatcggtaacgctgaatttggcacccactccgctgcttgtgctcgtccgtttgattttcaccgccatttcttttctcgattttcttcttcagcaatatgtaagtttgtgtgatgcacaaggaaaagtgtattgtagaaagtgggataaaagatttggcgaactttttgaaggggacgaaatgacttataaaacattttttgaatataa

SEQ ID NO: 8529 - DNA, 1886 bp, Heterodera glycines
gcgcgatccgcggccgcggcaatttgaatgcgcggtgcgcgcccgcggttttttcttttttgcgcggtgcgctgcgcattttttggttgtaaaatttttatgtttaaaaatttttcggttttttcgtttcgtttcgtacgaaaatggttattttttcgttttcatgtttcgttttcgtccgtcaaaattttttcgtttcgtgtttcgttttcggttttcaaaatttcttttttcgtttcgttttcgtgtcgaatgctccttttcgtttcgttttcgtatacgaaaaattttttttgtgattttcgcacatcccaatttgggagtttttatataattgggttaggaaatcggaattccgaggctcaaaaaacgaaatttgaacccattaaattcaaaattgcagaaaaacaaaatataattgaaaaaactatttttgctattttagcccctggtcggcttcagcggcggtgtctttttggccttcgtttttccgcccctcatcgacacgttcaccttcgtcccctcattaatgggcgagcagcaaaatgcaaaagtgtaccgacggttggcccggaatttctgctttttggcattcgggttgttcggcagttttgcgggccttaaaacgacgcttgaggacatttttcggccaacggcagcaacgaataatttaattaattaatcgggagaagattttcacattattttgaacacttaataaattccgattgttcggctgctcgaaattctcgggtcaataagtttcgggttctttgggtctcgagtttccgactctcgagcagcccttttgttttgatttttattttattatatattgtaattttgatagtatttatttgtatgtactgatgaagcaattttgttctatttttcgaatcatttcatcttttgctttatgcctaaacgatggcattgtcatactttttgttttgatcagatttgatttgtgagtgggaaccgcaaagtcaaaattttggaaaataaggacaaaagagttcaaatttaataacaccaaaaaagtgataaccatcttctttaaattccttttgacaacttttgttttttcggtgcaattaaattttagcccctctaaaaatttacagcagtatcaattcgcctaataacttaaatacagtaaattcgttaagcattttttttgtttggaaacacatattgtgaggagattatcaaaatttgtaagattctgatttaatagaaaataaaattaaagaggcggaaaagggaattgtaattcatcaaattcatcagaagaaaaaggtacatattagagtgcagcgggaccgggaattttgggcttaaccaggaccgggaccttttcgggttgaaaatccgggaatttttggctgggaaaaccgggaaaaaaccgggactagtcccggtcaaaaccgggacttcggtactcagttgaccgtgtttaggtcccggtcccgttgcactctagtacatatctatgctctctatttttccgttcttttttccataaattttgaattagtgggttaacagagaaaaacaaatagggatgagatcaattacttagttttgaataatttttgttaaaattacatttttgacgctctttcgaatcatgcccattttattgtttttggaagctaattgaagagaaaaaaatcattggtttttctgcgtcaatgataaatctgagtgttcgcttttcgtgaccggcgcaattttcgacccttccattatttgttgaaactttttgaagggtcataattcggcagcattattactagagaccggcgcgggacgggatcacgcgcgggattttgcgggatccccatctgcaatcccgcatttttggggaaatgcgagatttatac

SEQ ID NO: 8530 - DNA, 2137 bp, Heterodera glycines
  unsure (1)..(2137): unsure at all n locations
tttttttgtcatgataaatattatttttactttacaacaaaagaacaatttgaaaaacaaaatatttttccatcaaattaagaaataaaaaattcttttcgggtattatttaacaaatggatggagagaattagcaatgtaaaataataaaaataattccttaaaaagcaactaacataattaacaacaataatattttaatgttttaaaaagtcgagctctctgcaagaataatcaactgctgattagagaaattgtggttttcggctttatgaattgcccttttaattaaattgatcgaaaacataaaatacttacagatttttgtttaatattaataatgcaattaatggctcatcatcatttgttgttcattttcggctttgtttttggtacgaacaaagaaatgaatgaatttaaatttttaaatttaatttcctctcaacgaaagaataaattacaaaggtttttttgtgttcgatatggcggcacagcttagccaaaatgagcagaattattgcgtcgctttcaacaacaatctccgccgcgtggtggccactggcaatcagcagaacaaaagcggcggcaaattgccaccggccacgaatatgttggagatggcatataacgagacaattggccaaactgcgcaagtgagtggacggacgaattgtacaaattggaccggtggtgtactgtaacaattagagtaacggttgaaaaattaatatggtgcatcttcgggattcccgcctctttgctgttctcgctaacctcgtagatttaacaggaattccgccggaaatatgaagcacataattgagatattctttaatcaaaaacatttcttttacaacgcaggcgtgggccgacaaatgccaattttcgcattccaaagtgaacggactgggcgagaacatttactggtccacgaaggaggggatcagcaacagtaattctgggcaattcaaaaactataaaataaaagaaataatgtttctagccgaggcgttaaataaagcattcggtttttggtggaacgaagcggtgacaattggcatcccggaaaatttggtggtcggcgcaaacaattttgagccgattgggcactttactcaggtgctttcttacgcttagactgaatgtttaaaatccatggccattgttttttcagatggcatggcacagtacgacagacattggctgtggcgtggccaaatgccaagatgcgcaatggaaactgtttgtggtctgcaattattggccgccgtaatttcaatttttttctttggaatttttacttaaacaaaccaattaattttgttttcggcttttcgggattggctttgtgagaaaagaaaaacactcagcctaattgactcattaatgccggtacaatttcaggggtaacgttttgggccaaaccatttacggctcgggtgacacgtgcagtgtgtgtgagtcggggtgggcgtgcgacttcggcagaaggggcctttgtgttcggcaaaatcagtgacaaaatgccaaacaaaaaatttgaagaaacaaagcaaaaaaaaggcggaaaaggatgatgctttaatgatgtgatgaacaattttaaataataaaaatatataattttatcaatttaattgtatagaaataaaccttaaaattacacaaaattacaattacacctataatattcttaaagtttatacacataaatttaaaattgttccccgaatcacttaccatgacgaaaaaataaagtaattgtcataattgcagcattaacgagtggatattgagtgattaatttggaaaaagtctttataggtattttgttttaatccaatatttatatagcaataatacgaccatatatcacgaggtttattttcaatatccaattagattattttgtttgaaaaatccaaaaaagggatgaaatgaaaatgcataaggaattttatttattagttaaaaaanagaagaattgaaaaaaataattatnaaaaagtaataataaaattngattgagtgagtaaaaattaaaaatgatttgtatgntaaaatttgttagaaaatattaataattaaatggatgatttgttcgggtcggtaattgacganatcactaaacagtgcc

SEQ ID NO: 8531 - DNA, 657 bp, Heterodera glycines
gttttaatttatttttaattaagtgaatttgataaatttattaagacttttaaaattattacaatatgaaccagcagcaaaaattaaaacaaaaagaaacaaagttaagttagaacatgacggcgcactctatgttttcgaccaatttagcgcagatgggcttaagatattttggcgatgtgagatgccgacgcacggattctccgactcgtccaccgttataacgatattaataacaacattctcccccaaaatgatcacaattatgcaaatgtcatgtgaatcccgaaaacattaagaatttcctcattggtatttcccgaaactatgaaatgcgtccttagtttgttcccgattttgttatttttgttaaatttttgaatttttataaaattttattttttttcgttcatcgctgacaaattattaaagaaggtaccagcctcaggaaataaaaaaacaaacaaagtaaagaaaattttcgaattcgggttcgggattcgaaaaatggatgtttggaacatatccgaccaatttcattcgtaaacaggtacttacgcgaaaacgtaccccacgcgaaaacggccacgcgaaaacgtatcccagccactcgaaaacgtccccacgcgaaaacggccacgcgaaaacgaccccgac

SEQ ID NO: 8532 - DNA, 3347 bp, Heterodera glycines
agcgcatcggctacgccttcaagaccaccaaaccggagcgcaagaagcaactcgtcatcgagtacaacatctgatggaaggacgcttcgtcacctcaacatggacatgataggaccccatcccaccgcaccaaaattcttcattttgtcccccatcatgtaaattgttgtatctgtatgtaaatttttgtgattgaatgcatatttaatttttgcctatgatgggaggaggagtgatcagtggaagatggggaggggagggatggttaatggttgaccgaccgagcagggctcccagcgagattccgattttagaaaaagcaagttaatacattaaggcatctttgaaatattcgtaaaacggtcaccactactctctttgtttatacatcggaaattttgaaaagaaacacgtattttaaaatgaccgttatttattactgcactgggttccggtattagtgcagttggtacgccacaaaaaaaaaaattgtttcaaactcgaataaaaaaatatttccaggtcgaaaaagttgattattagcagttttcagcacaaaaaatcaccgattaaacactgtaaacagcaccaaattttccaaaataagcatgaaaaagcacaaaaaagtcaaaatcagcacgaaaaattggaaaaaagcataaaaattaggagattaaaggcaccaaaaatatgcaaaaattctgagtttttggtagtattcatttgcaacttttttataagttcttcaatcgcttagaaatataccttatcaacagcttctaaacatgtagggctttcgaatgatgccaaatttataaaatttggccgatgttcgaattgaccaagtattttcaacctttcccccttcgtttcgaactcaaaatcaaaattaatttttcaacaaaattcaatgtatttccctgagttttgacgttttgttgaaaattcaattttcgattttagttcgaatcagaactcatttgtcagggttataattcaaatcaatggagacaattactaattgaacatataataaatttccatttattcctcctctttaatacatatacaaaaatgaaaatattttgactgttttatacaatacaattgggcatggcatttatttgaattcaatatcacactttcggcacttcattctttaactactgggctgattattattctcggccgcctcctccgtcgtttggcggtgtgtccacgccgctgtcattggccactttgcgctcctcctccgcggacaccgcctgctgttgttccgcttccacaaggggggccacctcgtccaatttgacctgaattagggcacagtgtttagacggggaaaaattgcaatttcttaaaattttcggcgaaaataaaaaaacattaataaaaggtggggataagaaaaaatattttttattttttgaaaacatgtgttgcccacgaccccaattcacctgcggaatgtccgtcccttccaccacaaaagctgcgtatttctccgccaccaaacgacgcaaacggtccaacgcggaggcattgctgtaaatttggggaaaatttgacaaaatgcatggatttcccatattattggtcaaattgtatcaaaaattgttagttttggattcaaactacccctccaccttacaaattagggagagcagagctcgtttcacgcccgaaaatttttttctaataaaattttaaaaaaacgaaaatttttcagtgattttttttacttttatgatgcattactaaatttattcaagaaatcgctggaaatttttttttggttttttccgaaaaattctcttaagtttgaaaatttgttgatttttcggggggtggggaggaaacataatgaactccaaattaaaggtaatgccctgtttttcaccttctcgccacttcgtcctgctccccttgctcagtccgcacattgctttgccctcctcctcctctctcttttgactccttctctccttcctcttccttttcttcctcttccaactcgtcttcttctccttcttaatcttccgtgtcctcctcgtcctccttctgttgttgctggtgcagaaattgcgactccatgaactgcagaaacatctcgaatacggctgtgccggtcaacagcgggtccaagtcgccctgaacgccgatgtaacgggcgacacggccaggcaccaggaaaccaaagtcgctgaatgatggatgtagtatgtccctgaaaagcaaaaaaataaccgaattttttttgtttctaaacaagaaaatatgtataccgtatttcctcgattataagccccggggcttctattgttcaacccccctccaaagggggcttatattcgagggggggggggcttccaatcgagggggggcttttattgttcaacccctttccctatataaattcttaaaattttttgctttctgcataatggtacaatttaaatcttaatctgaaatttttgaattgaaaagatttttcattttttggcccttggaaatttaggcgaatgtttgaaaattcataattcacttctaaatgaatcaattaaagtgcaaaaaagcattaaaaatagagaaaaatctggagcattttatacttttttagaattttctatcttcaaaatgaagaagttattacataaatttaggaaaaattcgttttttgagaaaaaaaaattaatagcgctgttctgaaaaggttttttgaaaaacatgaaattcttcctctataagcttctgtttattctatatttttataagacttttgaaaaaagtacaaaaataaactgattttggaattcgggatcataggtgggagcaaatggtttttttggaccatgggttcagatccacttgcctgtaaaaatgtttttttagggtttttgggaccactaatcaagaacttggcatccattttgcccaattccaaagctttgatccaaactcgaaaccccaaaaataatttttaaaaaatgttgcaggcatgtggatttgaacccatggccaaaaacccatttttaacaaaacaaaaaatatatttggtataatatttctatatttgcttgaaaattttttagtgattttcatcaaaatcttttccagtgcaatttattaacagaaattttttctaagctattgcttcgctattagacaatttccaaaaaagttatacataaaattgcgaaaagtcgaaatttttgaagttttttcttttccaggcttgaaaatcttttcgcttttggtaaggctaatagagcatatgttaagagctttcaaatgataccaacaatgttaggttggatgtcaaagaaaaaagctatcgggaaaaacga

SEQ ID NO: 8533 - DNA, 1932 bp, Heterodera glycines
tgaacccaggactcaaaaacccatttttaacaaaacaaaaaatatattgggtataatatttctatatttgcttgaaaattttttagtgattttcatcaaaatcttttccagtgcaatttattaacagaaattttttctaagctattgcttcgctattagacaatttccaaaaaagttatacatgaaaattgcgaaaagtcgaaatttttgaagttttttcgtaataaatttttttccaggcttgaaaatcttttcgcttttggtaaggctaatagagcatgttaagagctttcgagtgataccaacaatgttgtatttggatgtcaaagaaaaaagctatcgtagaaaaagagctggcgccgaaacgcgagcgccgaaacgcgtgggtcccgtttgtacatttagtctttctaaaatattttatgaattttaaaaaaatactattttttcagaaaatttttgtgttttaaaagtatttaaaattaaaaataacagaaaattttttgtttataaacacgaaaatatgtatatttttgcttttcccaccgcttctcccaccactcactttatcgtgaacatcattcggctgtccgtgttggtgacactcggctgtgcagttgctgctgtcgttgcggcgccgtcctgcgactgttgctgcggtgccgtcgttgttgtcgctccgttgctgttttgtcgtcattggtggcagtggtcgctttcgttaacagtcgctgcattcgtcgcacactgtgtggccattgccatttgctggcgttgagcatcagcacgggctacaaaagtggggaaaaattttaaaatttccagtggcgcctatcggcacccttccgccggtcctcaaaatttttttccaaaaaatcgcatttcacacacctgcacagcatacgtgtacaaggggtggtcacttccaagggtcatacgacgtacgatcgggccaggggggggtggtcatatgcgattttccttatgacggggtccaaaatttttgacgacctttttttttttttgctttttaaaatctcttttttttgcggcgcggtcttctcaaaaaaatttcgcgaacgcgggagccggcggtgccgataggcgccgccggggaaaattttgtatttttagtgccatttgctagcagattttgactaaaaaatgcccaaattttgagattttgggctaattttgttaagaaaaaatagggttttttttgagtccggcggtgccgataggcgccgccggaagaaaacatgcggacagcgacgaggcgccgccaaaactgtggcccatgcacacgcagcgatccaacgcgagacgattctgaaaaaggggggagggaattttccattttttacaaactttttcactttgaattgtgcccaatcgaatgtttggccgagaagaatttgctgttgtccaatttggcgttcgttgttgttgtccgtcgtcacatttttcagcaaattggcgtccatttcggctaagatccgtcgcatgtgcaccgtctcggcaacacgtcgtttcacctgagtttaggggaatttgaaaattccaattataaaatattaaaaaggcatgaaactcacggaaatagttgaacgtgaaaagacgtcttgcgtctcctccaaagcgcccactgggatcatttgcatcggctttcgcacatgcaggggatccattttttttggcgagggcggcggtgttggtgatagcacctgctcaagcgtatacgtccaacagcaggagccgtccctggaaagcgagagggggaggaggtatagtttgaattttcaaaagcgccatgccatgcccgactcactcaccggtgttccaacgctgccactacgtagccatgagaagccaacgatgcgcacacatccgtataaacgaggcgacagccgccgatgccatgcgagaagatga

SEQ ID NO: 8534 - DNA, 644 bp, Heterodera glycines
tctttgatcgcaacgacacggtcatttacatatgcgcatttttacacaaaattttcgagtttgttgtccgagttttgccaattttttaagagttacatatgcttcgctcccatccatgcttgagcaatggtaatgtactaggtatttagtaaacaatccaatgcatgaattagtccactaactgtaagtcatattttggctgctcgagagtagaatttcaagactcgagacccaaaaatccgaaaaacccggcccgagaagcgaggatcttgagcagctccagtcatatgttttttaatgacacaaaaaagattaattgtaagacgagaagcgaggaggaaaacaaaaaaatttgaccagcatcagaattgaattgaatttacagaagaactcagacaacaaacccaaatatattttttaaataattaaattttaaaattgtgttttttgaaaattaacggaggaaacgaaaccaagaaatggaagaaaaaaaggaagaagtagaggatggctgacaactgtttgatcacaggaggggtgagaaaatgtgtgtggaagcaattggctgtaaaaaaacgcatgaaaaacagtcaccaaaccaataaaaaaaaacacatcatcatctcattaataaaaaaaataat

SEQ ID NO: 8535 - DNA, 1845 bp, Heterodera glycines
  unsure (1)..(1845): unsure at all n locations
gaaattttgaaaaagcgatctttggaaaattttttaatttcttgaaaataagttcttttatcaatcaatttttttttcttcataaatttagcatattcgaaagctctgcaagtttattgttaaagaagctacttctaacaataagtgattgaagaatttataaaaaaaattgcaaattgcaaaaaaaaatcaaattttttgtccaatgtttatttatttatttttgcttatctgcaagtgtttgggcattaattcgggcaattataaaaggagttatacccccgccaaaaaaaaaccggctatcgcccaattatcccttttcggcagtttggactcccacccaaacccacgaatgaaatttacatcatggaaaatttgacacccatcatacataccatggttgacgggactgatttggccgccgaggcccgagtcttcgcccaccgagctgaccaaacttgacggactgtttgaccgcttgacgacattttcgttgcgcgctggtggcggtgggtgtggcggcgctgcggcgtttgttgagacagcggcggcggcggcggccggagccacagttttgttggacgacgcttcaccacaacgtttgttgttgttgttgttgatgttgtggttgtccccattttgagtgatgactgctgccggcgtcggcgttggctcgacagcgcttacggcgggcactgcaaaaaatgtgtgtgtgaaaaattgaattggtcagcttgtaggcattcgaaccacggcatttgcatattgtttttttgagtttgtttcctttctttgttttaaagaccatagtagtaaaccaggaaattctgatcaattcaaaaaaaaaatgatagaattctgtgacataatcttcaaagttgtacataaatgacaccaaaatggatgatggcccaaaaaagttttttgatatttgagggggaaacaaccacccaacttgcaatttataatttccgaatatgttggtttaaataaaatcattttacgatagaatttgaaaacccatctcaattatgtgtcgaaatcggacaaatcgattaatggacaaattgaaacaggacaaattaatcgaaactggatgtcccttgattaaaatgtgaaaaaaccaaccagtgccaagttggctgatggccacactgatggccgatgatgcgttgttgtcgcacagaaaacgggcggtcagcgccacctccaaatcgtccgtctttttggcgttgaacttctccatacggctcacaaacgatgcctttgcgctgctcttcgccttcccactgtccgcaatcagtgcatgaagagtggcaaaacgtgcgtcaaaatagcgttggccatcggtccggcactgcgacagttcgcccaccagtcgctgctcacgggcagccaacacatcacgaagttcctgaggaaaaaaaattttttttttcaaaatttccatcttgaatttatatctgatttttttccctaaaattttcaagtttaaaaattgaaaaaaatttcggggaggggggtggggagaaacgtaatgcaccctccttccgaggaagtttgaaattttagtttacggagcaaaatcctctaacaatttcatccaaattctcaaaattttcatatccacatctaataggacacaattaagcgctttcaaatttgtatttgtaatttgaagaatatggtctactttttcaagaccattggcccaaatgggcaaaaaaatagttcatgttatagcaatttttcaccaaaaaaaaaccaaatgcataatttttgagttgntttgttaaaactttgcccaatcttaactanatttgctatgaaaaatgacacaattca

SEQ ID NO: 8536 - DNA, 3051 bp, Heterodera glycines
  unsure (1)..(3051): unsure at all n locations
ccaattgcttaaacggacacaaatttcgcccgcgcctgtttttccatttttcttgcctggatggacaaactggtgcttctgcggctgttgttggtgattgtggtgatgattttgtgttgttgaaaatgatttctcctcacaatccgcaacaccatcattgccccgctcattcaacaacaacgatggttgttgttgttggagttgttgatgggtgacgacgccgacggaggcgttcgttggcaacgccgtggcggcggggccgcttccgttcgtcaacaacaatttgtccgccaaattggtggccgacgacacgttggagcagttcaccaacgaggaggcaacgctcggcgttgttgtacccgaattgttggattggtgggacagtgacgacgcatttgcaatggctgcaccacccttggacgacgacttctttttctggttccgctttttggcaccgccggtccgttcccagtcaccgagtgccacctcagaaccacctaaaatttgtaataataaatatatttttaatataattgggaccacgattccggttttagacaaaaattcggcaattcaatattcagcagattcacagttatgctaaaaccggaaaatcatttagccctgctggtcacataaaaatggattaagtagtttttatgcgattttgagatctattctgaggttttcgaaaacccttatcatgaaaaaaatcaatgatatataaatccatccaagctcagatttgaaatcagcgcattttcctaccctagaagtgtgtttcataaatttttaaatctttttttttatttccattgcacaaaaatccattgtttaaaatcgaaaaaatgaaagcatacacattaagatatagaccagataaacacaggacaaatttgatgcaattcatgatcagcgagcgccccttgaaaacctcagaggacatcccaaaatcgcataaaaaccactgatcaatctcctactccgatggaaacaatatttcagttttaaaaccatacaaataccttcacaaaatgcgtggatggtccgcgcgacgtccaattcaaagttgtgcaaggccaaaacaatgtctgtaaatatgaatggtgttgaaaatggtaataagaaatgaaaaaacactctttttgcggcgctacttgcaaagaggaaacttttgaattttatcaaaaacaaaaggggggacccttttgttttgcaaaatttttttgagataaaaatccatgaaaatttttgttatccgggggttttagaggtcgctgatcacgaatctgacatctaattcgaggtcttggaccccaagaaccccagggaataaattttcatgacaaaatattaaaaaattttgcaaacaaaagggtcactcaccccttttgtttttactttttgatagaattcaaaagtttccttctttgcaaggtacgccccctccttttgattgagtttaatggacccggtgaatgaccatcttcagtttccaaggcaataacttgccaatatttgctcctttttgtatttataaagcattgattaacaataagcaagaaaaacaaagttatggcctaaaaaactgagggtagttcactgattgaaagccaaaaggtaacaacagagccaaaatcggtttaggtctatgagataagtcactgaaccctaaaaaaatgtaaaatacggacatttttatagactagggaccgacacagaatcagagttgggggtcgaaaatcaaagggagggcttttgatttttttgtcgaccccattctataaaaatgccaaatcacaataaaaagtgactccttttccttgggcccactaaactgcaaaagtgccactctctgccgtccgttcttaccatttgtgctgatgttcttgacaacctcgcgaactttggcaattttctcgtccataattttcttctcgactttcggttgagcagcgacggcggccattttcgttcgcacaacttgggatgaattaatgttgcgtaaaatcaaacaaaaactaaaaatgaaaggaatgaaattcaaaatgaaatagcaaatagcattaaaaaacatattaaacacaaagcaatcagaaaagcgcattaaaaaaattgtcaaattaaaaatcgaagtggaaaaaatgaatgagaatgagtggtggcaatggtgttggctggcactgaatggtcgtgtaatgtaagcaaagcaatgaatcgaaaaaaatgattttttcacttaaaaagacaagcattgctaatacattgggagtgatggaaaagggggagcagacagggagcaaagaaaaggggagaaaaggggagggaaaaggaggggtcggtcgaatggtggtcgagaaagacaaatgatgcaagcagtcagtcagtcacaatcaaagtgaagaaaattttctaaatgtgtgttatttttttgcctcctcctccctatccacaccactccaccacaccacaacctaactctacacacatacatatatgtacaaaacaatccaacaactatctttttgttttatcatcatcatcccattggtgatgagggaatggaatggaagggaggagaaagcacagggagagaagagggaggggagggaggggaagggagggacccagcagcagagccctaagcgattaatgattttgaatggcggacagggaggaaagggaaggaagaggagagggaaggacagtcaatgggggaagacgggagaaggnggactaccccaaccgcccccaaccccattccatcacatccacaccatgttcagagcagcacagcagcagagcccgtcagtcaagtcacagtcaaccctctccccccccccccccccctccccctagcccccgacaggggaagtaagaaaggaaggtggaatttggtgatgatgatgatggtggtaaaggaagtgaagagaagaggagaggaaaggaagagaaatcggtcgcgcttgcactgcacacctccaccaccaccattaccaccacccactgtgagaatggatgaatgaatggcgaatatgtgtgcatgattct

SEQ ID NO: 8537 - DNA, 6488 bp, Heterodera glycines
ttaacgaccttttgctcgggtttaacgccaaatttacgtcgaaaaggtttttccatgtcgcgaaattgcccaataaaatcaattaaagaattattgaaattatgtttcttagcattgaattttcataaatttatttagggttttttgcgattcaatgtccaaacaacagaaagttaatggcagcaacagttcaagcggagatgccggaaggacaaaggggccgaaggaagagaaacaacggccagagacatcgctctaacaaaaaaaagaaaagccgaaaatttaaaaaacgaatttaaaagacaaaatatgacaaattcaacatttaaatcccattttttgggatagcgaagctaataaatccgatttatgaaaagccaattggtgttgaaacattgtatgttaaatgttttagatacaatgatcaaattatgcaatttataaattctttcggtctgtcgaattgagtgcaaatgaaaaacaaattccaaccaaacaataaaatttaaagcgctgtgctaaaagaaaaaattgtgttggtttcgaccatcgcgccccaattcagtcagccgaaaaatcgaccatgtcccactttttggcgcacaattaaaattgcaaaatattaaaaggacggaaggaaggaaggacgaaattcatccgaattaccaaatgaatgtttaatcatttttaaatttaaacaatttttaatcattgcaattaaaattcaaaaattcgctttgctcgtcccccgtccgatgactgattgtgagcatcactccgtgcccccgtccgcccctcccgtcgacttttgtccgtcttcgccccctccgagttatgcttcctctcccacggcaccgcgcaacaatgccaacgacagacagcagcaaaacactgcaaaaggctgctttttaccctcgtgtaaaaatgccaaaagagcgacaaaagagaatgacgcgggcggcactgaaccatcccagccgacttcggccactgtggtcgttccaatggccaaagacaaagtgaccattctatgccttggccataacagccaatgtgagtgccgcggtgagagtccgggagcaaaaataaacatgttgaaaacatagaaccggttaagggaatggccaaattcggaatttctttgtccgatgtcaattacatttttgctgagtcccattttgccaaaggttgccaatccgccgatcgtttcgccatttttcaatccgtttccgggcgacgttcaaagaacaaattgcgcaaattgttggcattcggctgctgtgccttttccgttatcattttcggctttttcgctttcgccgtcggatttatttttgttgttttggtcgactcacaaatgacggaaaatgatgcctttgaccaatatcagatgagaatgtttggacatcacttcgggtgaaagtgcttcccaccatttacaattactgtaaaataaaatttggttttaaattaaaaaataaaagggcattagtcacttttgaccaatttggccgatgtttttgttttaaaaaattggcaatgtcaaaaattcgattaatcaatcattgtttttagagaaaagttgtcctttttgtgtttgtaatgggttattttgatattttattttaaattttattcttttatttgacatggcccccattctttccgtccctcccccctttttttcgctttcgcatggaattttagtgcattttcgaacgttggccgcgtttgttcccatttttccattttgaatttaatttttgatttccattttagtctttctttgctgctttggccgtttggcattttgtcccacttgaaaattgcctttggcgtgccctttcattgttggcacaatatccgaaaaattgatggccaaacattgaattaattcttattttctattaatttttaaatggatcattttatcaaaaaataaataaataaaaaataaataaactaattgtaagcaaattattgctgtgagtaaaaatttttcgacttttaggttaatttaataaaataaaaattaattgactttgagatctttcctttgataattatgaaaccaggatttacaaagatattcgagaaagataaaaaccaccagcagcagcagcaaaggagaaacattctttgttatgaagctgcaattcctttttaattttttaacaaattctgagactaaaaggcactgaaaattgactttaatctgtcaaaaataaattaaaatattttttttgttctaaatgttaacgtataacaaaattaaaaattgtaatggtttaatcaaaaatgcttacaaatcagcaacaaaataaatgaaagaatccaaagtgattgtgaccttttcggcaatttgctgcactttgactatcttctcttacactgtgatcattccccaattgtattttaacatccatcagattgacgatgaggtaaaagcacaacagttgccgcgattgttcaattaaaaccccaagaaattttaaaaggtccgcaacagcgtacaacacttccgagtggagacgaattcggcgtggactgtgctgatgcaggtgggtggaaacacttaaattgaatttcggggggagggggtgtggtcctcattagctaatttagggggagtgcgtagcatcattagttagtttggggggagtacttagcatccatcattagctaatttggccaggggaccccagagattattgcaaaaaattttttgtgcgcttagttccaaggctctgctgctgcgccgtcgtctcccactatagaacccttctccagcattgtcaaccgtttgcgtcgacaaaagagtggcgaatatgccgcacttccttcgtggtttgtcattgacatttttaacagattttacaataccatgctcattaggtgtcagtgtgaaccaataaagccccagtgccctccgggaccgcccggaccaccgggtgagcatggcatcgacggacaacccggacagcacgggatgccgggaaaggactacacattagtctatatgccatccgcggtctgtcctgtcatggactacagccaatgcatgccatgtccgtccggacctcccggcccaccggggccacccgggtctcaaggccgtcccggctgcgagggagagccgggagaaggaggacgactgggcaaacacggagcacccggtaaagaagaatttgggaaagtttttaatcgggttttaggccagcggggcatggctggtgaagcgggacttccgggactaccaggtctgcccggacttcccggagcagcgggggaagacgcggaattcgccccaacgctggtaagagcatcgaaaaacaaaacgcaatagtcacccatgcctttaccatgtaattagcagaatttgcttggtttttagcccggtccaaaaggattgccgggtcagccgggccttcccggcttaccgggcgaggcgggcctcccgggcacacccgggacgccaggccccgagggcccacccggcccagctggacagcttggcctccccggcgcgcgtggatcagcgggcatccgcggcacaattggacttcccggcacagatgccggtggggggaatcaaacattttatttcgggtttcattttaagcatattgcccatgtccgaaccgatcgcccgtttatcgtcgacagaaataatggcagaatatataatattttacatattattatatactataaaattattcggaaaaaaataaaattttatttatcaaatcgcactaaaaattaattgggttttccattatattatatattttgttcattggatttcaataattttatatttttcgaggaaatcgagcttgatcaatggcattctattgaatttccgtatttttcgcaaaatctcaccggaattttctaaataaaaaaagttccggatccgtaaagaaattctcgtcactattttaaatttgaaatttaattcttatggcgaaatgttattatttttttgcatcgatttgctttccattccattcaccattcatttctcctaaaaccagccaaaagccaaataaatattccttgaaatttttttattgcaattatggagttggagccgatcatcaaacagaaacacaaattgccacgagaaaaggtattgtatttgtttagaatttttaaatttggtgtttttaatgttcaaaagagaaatccttacctcaatgtcaccagggactaagattttagcctcagaactattctttagggtatcttgaaaatctttttttacaaataaaagattgtttgattggtcagtttcccaacgacgtgtggcacagagagcgttatgcccgtgacagtctgataatgctcacctttggcagtgccacagttatcggtgtcatttacaccaccagaccgacctggtccaagtggcttttgaagctttctcgcaacagagttgggaccaaaggagcaggttctccaatttttacttcttttacacattttagcaactgacttcccaacctttgtattttttaattatttgttcgaattcgacctgaaaagaaagaaagacccgggtttgggttttggtctgcgaaatacagactggccaatgtgaagccctgactttcaaaatcttttttttcttgtctttcattttgttttttcctttaggttcgtttcgccccaaatgtgccgcccttcttgtgccattcgtcccgatgttgtccaaccgtgccaatcactccactttcccgcacaatttggtctccccaacagtgcatcgccgttttgtggttatttttttttacctaaattagatgccccccccaccccctaaaataaagacgacacatttttcactttcggtcatattaaaaaaagagcccgacgggcttttgatggcccgtttcaaaaaaacaccgggcccgtgccgcccggttagacgggctttttttgctgggcctgacaattctaaaagtccggtactttcctaaattccggctctattaaaaagcaaaacaaatagttgatacattattttatatttcagattgtcggccgggtcattgctctctccacctttttattcgccatgtatatttttcggatggatgagcgttttattaggctttgcgagaacattatgaaagagattgacgatgacgatcattgaatgattgatttggaagggatgaccaatgttaggctttgtttgtgctatcgagataaaaataattcataaacggacgaattattcaacaaaaaattggttcgaatgatgtgaaatttgggacggagctttggttggccgggcttttaaactttaaaaacaccgtcctcttctggtccccattttttggaaaaaatcctaaccgatttgccggcgaaattaggctttaaaagcagaatctgagcttcgagctttgggcaatcaaaaaaaaatttacctttaaagatttgtgggtttgggaaaaatttatttcacttgaaagtttgatcaattttttaaaatcacttctcacaaaaaagcattaaattaaaggatttaaaacccttttaatacgaaataaaggttgggcaaaattgtagacctgtgagggaaccgaaccctcgacgggggtgcagccagcgatcagcttctcacccaacccgtgctcttaccgtctgagcggatccggacatttggacagaagcggacaattggacacatatattatgacagtgaatggaattttttaattattttaaattgtttttacattgaattaaaatttttagattataggtatattgaattttcttaaatacgaacatgtaataaaatagctaaatgattgagtgtttcgtgactttaaaagtgctttttgcattttgctatttgatgtggctttattaatcaaaaaatgtttgcgcatccaccagcagcagaattattttcattcagcgttaagcgatccgactactgtagagactctcgggactgtagtcagtactacggtaagacgcgcgaaagaaggcactgtagaaacggtcgttttgcaaatggtaatgattcgggaatgaataagtgccggtgcgagtgaaatatggcgaggaataattggggccaaattcgggaaaagggccaaaaagacacttttctggattttttagaaaataaaaattcatataggtaactaaaaattttgcagttttgacaacagattctaggttaggccctaaaattaagaaaaaggtttggtttgtcggaagggaccatgacatttttagggggttcggcaaagcagaagagtaccagttttaatttctcttttcaaggacagataaagctaaaacatatttccgtttcaaaatttcacaaaatgacgcatttgtcaaactgaacaaattggtggattatacgtgaaaaagaaatgaaaatttaatttgtttagctgtgatttgaatgggaaataaaagcacataaaaggagcgaatgaatcagtgaaattattcaa

SEQ ID NO: 8538 - DNA, 1435 bp, Heterodera glycines
ctagtgtttgacctttgcatttgctgctgctgacttttctgctgaaatggttgaattatctgttggtgctgctgttgttgaacctgagacaccggaatttggcccgtcaaaaaattttgaagcatttttaaagatagaaaaataaaaatatttttgcccgtctaagtcacaaagtttagagagtgtaagtaagtgtaaggcaattggatgaattaaaaaggaacggggaaaatggaaaataaaaaatatatattaaaaagagggattgattgaaaagcgaatacgtaaaaagtggggatgaatgaggaaaagaagggccaaagaatagtgagtacaaagaagaaaggataaacactcggatggtcaatgcgataatcgggcgtggccaaatgagcagtcatcaagaaataaaaatctatgaagcaagtggaacatatgttgtaaaagtgaaagagaaaaagcaactcaagaaaaagatggaaagggtagagatttattttattcaataaaacgaaatgaaaaaaacaatgaaattattgttgatgtaggaagggaggtgatgagtcgctaaattaggataaaaaattttaagggaaaagtacagaaaatcacaacacgacaaattaattaacgaaccggcgaatgcttaaatcgtaaatgatgccaaaatttacaatgtctgactacagctgtgtaaaaagtacagtgaaattggttccactattgttaggttcgcgttttcacttcctttgcttcttcccccgcagagccttttgccccttcgagtccttcaatttgcttgccaagatattcccaattgtgcaccattaacttttggattgctgaaaaagatgtttaattatctggccacacgcatagttctcttattatccctactcacctaacaaagcgtggtaccgaacgtttgggtcctctgcactcaacaacttcatcactgcttgtttgccttggtattgttcgacaattctaaataaaatgaaattgttttgttcttctgaaattttgcggtaggataaacgtttttccgcgatggtaatgccggacgtattcgccaatgtcatgagcagcaacactgagcggcaatgggtcgctgctggtctcgagaattttgatgagtattctgagaatttgtttttgttatttataagctttataaaaaaaagtaataatccactttatcaattcaaagttcttttcattgaagcgttgtgcattttcgcgccagaatttctccaatttatgcaccggactccactggagtctgcccgatcggacctcggcacagtattcgtcaaacgaactcaaatcctgcaccgaggcgtgaagacgttcagacagaaattcaatgtcgtccacctgaatttgatttaatttcccatacaaaattgccaaaagatatgcagtctctccccaa

SEQ ID NO: 8539 - DNA, 3303 bp, Heterodera glycines
  unsure (1)..(3303): unsure at all n locations
gtgaaggaaattgaaataagctgcagtttcttgtccatccataagcacagagccatagcaagccaattntgagaatattgcagacatcttcagaatggaaaaaggttaatgatacagatttataagcacgacactattaaggaaattttcatgattaaacattgagacaaaaaatgaaatgaacgagtcccttttaaaatttctaaaaccaatttaggaaaactaaactcacttggttgacaatgaaactgtcatttcgcgttaaaatcccttggaaccacgaccaaatagttcgtttttgccgtcttgcataatcatggaaaatctctacccgggatttgtcctcctgaaaacaaccaagaattaaattaaatatatttaaaaataaattaaattcaataaaaaacgattttaattaaagtttaaatggaaatgaaagacctgcaaaaggtcgtcgaaaagggtgagaacgtaacggatcagctgatccttcgcaacttcggtgatcaaattgataatactccgtgccgaattcgtcttgtccttggctaacgcttcgtccctctcctgcttgtttttggccttttccaattcaataatgaaattgtactcattttgaggcaccaattgagagcgcaaatacgatgaccaattcggtttattcgccggatttcgcacttcggcagccgaaaattaagttttcattgaataaaatttaagtaaaaatgtaattggaatcaatgaacacacctcaagctgaagtttgctggtagctgttgtcatgtccacaggcgtaacgtgatgcccagccgcaatttcctcaacgtcaacagcaaaagtagcgccattctgttccgtaaccatttctaaaattgaagtgaaagaaaaacaatatttttgaaatatgaattgcataataataaaaaaaatgaattttgccgatcaacattaagaattttgctaaccgaaaaatggataatcagagaccaaaagttacttttaaaaaggcattcgtttcggaaatttaataattttaattcaaataaattaatatggattcactaagcttttatatttcttcggttaaatactgttagttttaaataccacttagaacattaaattgtttttttttcagaaattaacatccgtttccaattcgcgcaaaacaaaattttaccaatatgacaaaaatattgatctactaacaaaggaaatacgaaaacttgcgatttcaaatgaatacaaaatatctcgtttgaataggtatcagaaacaagtttatgtcagactttgtctgtattttgctgtctcaatttgttttctcccgcacatcggacaaatgcctttctgatacgagcagtctgaaaacatagaaacaataaaaagattaatgtaataaattatctaaagctattgtttagccaatcaagccatattggatgtttttgctaggtaagagaaaaacaaaatttcagttaaaaatcccaaaccttgacaataatacgctgaaatatgatgtgtcatcttattgcagattctgcatttcttaaattcctcacttgcaggtttgaatctaaaaaaaaacgttcaacattagaaatgaacctaactgggcctctcactttttaaataataaaaacaccctttaaaaaaaaattaactacatgagcaaatcgaataaaatctgttcccacatgaatactaaagcttttgcgcttacaattagtttttgtaaaaataaccaaaaaggaatcatgtcaaatttagcaatataagccattttttcaattttctatgtccgtaagactcacttttgtttcgaactcaacaatttgttttcatttgtcactcgtttcgcagtttggtcacttttctccacatggacagtagctaactttgatagtttcttagtgcctatgaatagaaatatttaaaaaacaaggcagccccattaacttacatttctcacataccataacggacaatggtcttaaaatggcgtgaaattagttcttcccttttactaatttttaaggtatttgtgcaataaatagcattcgaatgaatatttattttgatttcaaacatttgttattgatcgttgcaaaaactataaagcataatggaagcaaacaaaacattcgcagcggagatttaagcgccataaattccaacaacggcgtaaaacaatgagctgatgaccaaaggccaaaacaggtcaccaaatcccttcatcattcacattcgtcttcgtcgtgcggtttcttttcgattttgtccagtttgatcaagtcatcaatgcgcaagattgtgattgccgcctccgttgcgaacttgagacttttcactttgctgataagcggttcaaaaacaccggcgtcacgattctgtgccacagcgccttcctccaaatcaagtccagacctcaaaatcgaataacatagataaaaattaattaaaagcaaaaatgaccatttcatatgctcgaactttttgtcggtttgactgcgattatggaaggcacgcagtttggcaagcagagaaatggcatcctgtgccgcatttgtggccagagttttcgggatgaccagcaatgaatcggcaaaagcggccacggcgagttgttcacggctagtctgaacaacaattgtgtaatacagtatgttgcagggaaatgcactattttcactgaccaaattcaatgcaaaattctccaaataaacgttcaatgctgtctcgacagcaccaccgccaacaacaagtttcttgccttcgagaactcgtttgacaacagaaagtacatcatgaacactgcgctccatctcttccaacatcatgtcattggccccactaaatagggattaaattattaaaacaaatgaatacctaatctaccgcagaatgatggaagcagccgatttcaacttcgttcctttgatcaaaattaattcgtcgtctgaaatgcgagtctgtacgacttcgtcagcactgccgagcagtgacgcatcaaattgctcatcaccctccaaagtggccaatgaggcggtcaatgtcgctaaacgggcaattcttccgtttttattgatcaaagatacctccggttgctttcgctatgcgcttcaagtccgcctttttacagcgacgcactccgatcgcaccagcctcaacaaattctttcaaacaaaggtcgtcgatgccgccggtagtcagaacaacgttggcacccgatttaattattttttcaacgcggcgttttgtgatgtccaattcccttaacggattaatgcgcaaaatcatcta

SEQ ID NO: 8540 - DNA, 6107 bp, Heterodera glycines
  unsure (1)..(6107): unsure at all n locations
aattntcgatcactcaatttgatgatcacgtacattcaatttcttctgcccaaattctcatttatttttattattaattatgctttaattttaaatgctttttcaatcatttgaattgttaaattctattttcattttctctcttgttatctccgacacatatctctcgcaaattgacggcggtctcatccgccatatttaagccattcattttttcccatctcgctctcacattattcacttaaaaaattgtttttaatcgacaattccgctcttttgcaattctcatcacatttttgaaattaaatttcttcattggaatttcattgaaatttgtgttttgcaaacagcaaaccggaggttttctgagcaagttttccgccacacaaaactaaactgctcgatttcaaattttggcggaaaaccggttccagcctaaattattgttttttcaattaattttgtctcatcaaaatttcataattgttttccccttttacaagtgaaaagtatctgacattggacaaattgcaaattggacgaaccgaacaaattggaaattggacgagccgaacaaattggaaattggacgagccgaacaaattggaaattggacgagccgaacaaattggaaattggacgagccgaacgaattgcaaattggacgagccgaacaaattggaaattggacgcccggaacaaattggacattggacgcatcgaattggacattggacgcatcggacaattgacgcatcgaggaccaattgagtgcactgtcttggtgcacgtctcagcgcgccggccaaccccatctaccaagacgtgccccggacaactggcgaccttttgtgcacaggcgggttcaatttttttcccaaggggaggtctgattaatctggtctcatccagaattaatcagtgctttaatttctgttcccacctcctcccaaaaaaggcaatcaagttcagtctggactgaaattttcgaagtctcatcttcgaacagtcaaacatttaaagtgcccaatttgaatttgcccgaaaaatctcggcatttcatttccatttcacattttttttgtttttgtccaattacatttattcaaaaaatctcgaaatctcattttcgagttcaaagttttgtccaatcctatcatttcatttctatttcacattttttttttttgtttttgtcccaatctcgaaatctcattttcgagttcaaatttttgtccaaacccatactgtccaatttttcgaaattttattttttgagtttaaattttttgtccaatcccatttagtccaaaatttcggaatctcatttccgagggtctaaaattttttttttttttttgtttttgttttgtgttttgttgtgttgtttttgtttttttttgttttgtttttaacccaaattgtccaaactatccgctcttgataaaatcagagtcttagctctgacagtgcgtggtaaaaagggctcacaaatcgtgaatcgtgtacccttccccttttctgggtttttgttcccctctttctgggtttttaattactgattctcaactcagaacgcagttcggttattgattaaattggagtctcagttccaaagttttaaattgttcggtcacagttcggttattgattattgaattggagtcttatctccgaattttcgaatttggtcagtgatttgagcaatgacagcccccatccaggcattaatcagggggtgtgccagcaaattgggagcattattgggtaccgaaattccacctgacctgggaataaatgccctaccgaatcaatgccaaagaaggctgtacaaattcagaaaccttctgaatgacttagaaagggtggtacaaaagattgaagataatttgggtttggctaatgagtatattggtaaactgagtcgagacaatgcaatccgtaaggaaacggaaatgcaggaattaatgcaggagttacaaattaatgagaaacaaaaggcagctgatgttctcattccaattttgagggacaaaattgaggcattagaagagaggttagacataactcacaacacggatggtgacactacttccggcattggccctctcaaggagcgtgccaatgcgtaaaaatttgccaaaacctgagcttaagagatttgatggtagtccatctcagtggataccattttgggattactttcgtacaataattcatgaggactctcatgtcccaaaaattgataagttcagttatttagactcatgcattgaaggcaaagccagtgcaatcattcagggtattccaattagtgagagtgggtatgatgatgcaatagatttacttttaaagacctacggggagaccaaacgtctaattcgaacgttaaaccgggaatttatgtcgcttccaattagtgagtcattggaagacgacgagtccttgtatttgaagtctgaaaagatttttcgacaactgatttcaatgaatcagaatgtcgaagacggtatgtattacagtaacctggagggcaaaatgtctccagcagaggtgttagataagtactgtgttatcaaggatgccgaagaaaatgatgattgggatacgtcaaagtttcggaatgcattctcacgtgcattggaccaaataaagcataggcaggaattaaggaaaaatgtgattgagcccaaaagggacaaacatgaactgaccatgtctttcacggcattttccaaaaatgataagtaccaagggaggaataaatttcctcaaaggaattcggatcaatcgccccctcgtgggcggaaatttgaaccaaggaaatttcgtgatcagaggcacgataatagtgactcatcagtcagccattcaccaatgagggataggaggaattctccttatcccaaaagggattggtcaagttcaccagagcgtgaaaaacggaaaaaggatgagcagagaaaatgccaattgtgccaaggtgagcacagtgcgagtaaatgtcctaaatatatggatgccctctcacggcgcaacaaagtattgaaaatggaattatgtttcatttgtctaaggactggtcattgggcaagtcaatgtacgttaaagggatataagtgcaacatttgcaatcgggcgggtcatcacatctcattgtgtagatccaaagacatacccaaggataggaggaatagtagttcagaaagttcaccagttcggtcgaagataaatacgactcaagacttctcagagtctgaagaagttgaaaaggaaataacatcggtcacttcgtgtgttacaagtaaaacaacgaaattgtctttgctgaaatgtaaatatgttaccatttataatccagaaaatccaaggcaaaggaaaaggattttggttttcatggacgatggaagtcaaaagacatacatttcgaccaaattggctcaatttttgggtttgaagccaattggtaatcaaaggtttgaactctcaggtttatcgaatgtcgaattgggtaaattcgaatctccaatttatgagtttggccttaaaaagggcaactttgacattctgatgaaatgtcgagcccttgataaaattttgaagaaaattccggtgattgaactcaatcagctctctcaggagcaattacggaaaacaaaattgaaggtaccagaggtatatggtgagcctgatttaattattggaaacgattattataatcgtttgagcattagtgtcttagaggaattacaatcgggactgtatatcaatgactcaaatattggtcaatttttgagtggacaaggaaaggttcaattctttaagtcattaaacggatctcaatccgacatatcatcgtcagtcattcaccatactgtaaaccaaaagtgtggcaatgatattcaatggattattggtcaagtatcggactccaatcacgaaggttcagtagaatgggaactgaatggtgaccaactgagtccgaatgatttaaataaaatgattatggactggaatggtctagaacatgtcggtatgtctgatctcaattcagataagcaaaacgtgagacaaagaatgattgataaaatatcattcaatggggataggtatcaaacagaattgttatgggatgaagaattggctgctcaattgccaacaaattatgatatggcatttagacagttaatgtcaaatttgggcagacttagaaaaacaccggacttgcttcgacaaatccatgaaatcataatggaacaagtcgaaaccgggtttattgaagaatgtgagccattacctattgaagaaaggtatttggtaggaagtaaggttcattatttaccacatcacccagtggtaaaggaaacgagtgaacatactaaggttcgaattgtgtataatgcgtccgctagatgcagaggaggtctcaccctcaaccaagtgttagaaaagggagataatgattataatgatttagcaggcattttaattcgaagtcgaattaaaccaattctcttgacatgtgacatagccaaggcatttcaccagattttgatacatcctaaggataggaatgcaatgcgatttctgtgggtcagagacccatatgtagaagattctcccctcatggagtatcggtttacgagagtcacgtttggagtcatttgttcgccagctcatctctctttgacaatcaaacttcatttgtccaaatacaaggacaaaaaagtaagagaaatagagagagacatttatgtggacaacataatacttggtttagaaagggctgaagaaattcagtcatattactctcttctcaaagagattttttctaaggcaggtatgaatgtgagagaatttgtgtccaactgtaccaaggaaatagagaaattaccaagtgaagaccaagtggtaaaaggaggagtcaaattgttaggaataaaatgggatatcaacaatgacactctggtcatacattttcccgtgtttaagtctgagaagttgacaagaaggaaggtcttagcacaaattgctaaaccttttaatccgaacggatttgcggccccagcaattttgccagcaaaattatttcggcaaagggtagaaacgaataaaaagctcaaatgggacacctcgttgtctaatgaagagctaaatgaatggataacactgatgaaagactgggaaaatcagtcaataacagtaccaaggaatatcattccgaaagaaatgattaaaaattgtaagtgtgaattgcatgcgttctcagacgcatcacataaggccatgggaacggcaatatatttgagagtcattaatcaaaatcaaataaaggccaatctcatatttggtaaaagccttgttgttccagcaataattccatcaaagtatcggaccattccgattttgtaattacacgcaatgcttttgacttcgaaatggttaaattatgtcaaaggtcaaatagaaaaattgctgaaaattgagacggtacaattgtggacggattccacggatgtattagattttctgaatagcaacaggaaattagaaagatacatcaaaaatcgggtagagaaaatgagacaatggaatgtcaaacatattgagggtcaatcaaatccggcagacgttgcctctcgtggcacaagtccggaagatttacagaccaatgaattatggtggaaaggaccgccgtttataagtctaaaaaatacacagtggccacaaacaatcagagaatttgatccaaatgtatgggcggatcaaaatcaagaggtcactgtttgtgaactggcgaatccggcaagggaaagaaaccaaaggaaattgggttcctttctcacagtttatgtgaaccacttctcaaagtggaagaggattagaaatacagtggcgtatattaggcgaatttacaaggggcctcttcaatttgtacaacaaattgagccaattcaggaacgcaaattgctcaaggcaagaagtgaaactataaaaagaattaagcctctcgcggcgaatgaattaagagaggctgaggaagtaattatcaaagagatgcaagtaaattttcctccagatgaaaataccaggaggaatttacaaat

SEQ ID NO: 8541 - DNA, 4479 bp, Heterodera glycines
  unsure (1)..(4479): unsure at all n locations
cccattgattttttggctgcgtccattccttccacgccttcattcgctcttcgctttttccctctctcagtcggtcctctttttcccggttttcttggcacttttgatcgtccaatcgtcacccaattcttcacctcgcgggtcaaaatgcttcccacaattttgggtgtccatttttcgctaattgtctccatattttcttcttagcgccctcaacatcgattgagacattcccttctcttttcccctttttttctttttcactgtgtattttgccgtgctttctgcgtctcttttgtttctactgccgcttcctttccctcttcctctctcttcgccctttcttcagcgtctctcttctcctctgcttctctgttagccttttcttccgcatctttcttcgcttctgcttctctattcgccctttcttcagcgtctctcttctcctctgcttctctgttagccttttcttccgcatctttcttcgcttctgcttctcttctcgcctttttttctgtatctttcttcgcttctgcttttctattcgccttttcttctgcatctttcttcgcttctctatgtccctcattgagtttttcggcctccaaatttccattttccgtgtcctttcctttgttgttcttcgattttttcttttttggtttgttttcatcttcttttccccccacttcggtactcattccaattttcttaaatgccgctttgacctcctccttgtctttttttgccttttcttctgctttcttttcttcttcccttttcttcaccttttcatccaattccctctttgccctctttctctgctcttccgctttccatgccttttcttttaaaattcgtccttcttcctcagcactctcttcttcttcaatttgcttttttgcggcttccatctcctttatcttctgattaattagtgctagctgctgttccctttttaatttttctgcttgcgctggggtcataatttggacatggttgattggcaaagaatgcacagtcgatgagtagggccgatcggggttaaattgttgttcacgtagttgttgttgttgtttttccgacaataataattttctcaaatgagtctcgtcgtcgcttaggtcctcatcagaaattagtatcggcgaatcagcattagccattattagagacaggggtaggatattgatttttttgtactgtaaatttgaatttgaacatttttttgcattcaaaaaaatcgttgaagaggagcatggcgagattcatattctttacacatttcgggctcattataggttatccaaaattctggggtgattttgtttttataaatgagtccgtccatgtccaaataagtctcccagtaggttgcttctccattttcgcaaattacattcccgttttgatttaaccacgcttgaattccgttcccaataattaagtcttccctttccccagttataaaaagctgaatattttcgtcaaaaatccaagcggttaaatattcatctccttctttggtcttgtgtatttcccactgggattgaaccatagatttcgggattgatgaaaattcaaaagagtctttcggatatagggcggtgatgacaataccatccaaaattatttccatccaaaataataatccgtgcttgttcaaattatttccatcatcaaattcggtaagcatttccatgcttattgtatttatttcggtctcttcttcttcgtctgtatcttccaagtttttgtccccgatttttctcttggatcccgaattcggctcttcgtttggtaccagaatttgttcctcttttgaaaaatacggtttgcactggtccatgtgtaccgtaaaccccatagcatctgcatgcatctctttgagtgtcaaatttggcttttctacagtaattattcgaaaagggccatcgtaattttgttctagtttatttcttttgtcaattctccgcttcagtaccagcattccttccatccatgggatctcttttgtccatttttgttgttttatcatttgatcggcacatttcctcagattttcttttactgttgtcttaacctcttccattcgttttgtcaactcctgcacatacactgccatatccgaaaaatgatcttccacttttccgagtgtcacttcacttgggagtctagggtcgaaaccatgcattacgtaaaaaggagaattgccgatttggtagttaattgaagaattgtaagcgaagcaaattaatggtaacgctgccgcccaattttttccttccgtgcttgtgacaagcatgtccacaatggtacggttatatcgttccacttgtccgttggccgattgatggtagggcactgtggtttgatgttcgaatccccaagtttttgccaacgatttgaatgttgagctcataaattgggtaccacagtcggtaactactatcttcggcaagccaaaggaacatagaaatttttccacaaaagccgaggtgattgttgttgtcgactgttctcgtagtggtattgtggtcacagaattttgagaaagaatcgatgatcgctagaatatattggaatccgcttttggccgtttttagaggccctcgctagagagatggcgttgggccgttcccgctatgcaaggatcggcgcgcctccggttcttttgccccagtgcatctttccttcattttggcccctgttgttttgctcccacagcattttcagctcccatagctattttcgatcagccattacattcccctcctctcatattcgagcgccctcgctcgagagatggcgttgggccgttcccgctatgcaaggatcggcgcgcctccggttcttttgccccagtgccagctgttgtttctggagtgtcgagtggtgtgaagaccaaacgacctggggtgtccgccaagtgtcaccatattatttaggcgaaaaattggggtggaaggccggatttgaaccgccgctcggggccccttacgtggatccgttgtcttagccactagaccacatccaccactggagggatgactgttgttatggggccatctttccttcattttggcccctgttgttttgctcccacagcattttcagctcccatagctattttcgatcagccattacaaatggctccattggcgacaacccaggcggcggcaccattcgtcgctccgacccattctgcagccccgcccaatcagaaccagccagtgggagcggctccggatggcgtgagtcgccggctgttgggctctatcaatcgctcgttgatggacctcctgcaagcggcccacgtccagagaacagttttggaacgtttgttgatggtcgtagaggcccaacgatttggccagcaatttggtactgtgcgtggcggggacggtaggcgcggtaatcggcgttatcgccgtagtggaaatgcgggaggcggaaatgcgggaaattcgagggcaaatgggggggcccgtcccactcgttttcaggaaacaagaacggccgtaggcccagtgggagtggtcgaacagccggtgcttggacaatctgctggtcaaaatgttgcttcaacttcggaagaaatgccatccgacacttcatcgacttcggctgtcggggtttgagggttgaccgtcctcccgctcctgctgcgggggcgggaggctgtctacgccatattttttgattatttaaaaaacaaaataaaacaaactaaaaacaaataatttgcaaaacaataaaaataacttttcacattaataactttttgggtcggggattagtaacttttgccaatgggccaatttgttgagttccaaataaaccactaatctgtaatcagggcctacggcccccaaccccccccccttttgttaatcccctaaagtgaagtggtgaatttggggcgctgaggaatttggacgctcgcgctgatgctatcggggccaattctgtgcgatggcgtgcctttctgctgttagtctccccattggctgatcatcccctccggcactgttctcgcctaaacaatttgcccaccaaacgacgccctgccccctcgacaatccgcccaaaacgacgccctgccctcccgacgatccgcccacccaacgatgccctgccctcccgagcgagtataaaagaaatgatgagccaagacttgggacttgctttttcttcttcatttccgtctcctacctatcacttttttgtgcttcgacgaccttttcctctgctttacaaaacccaaaaaccacttatttttcattgcttttccattcgttttttcgttaataaaccctttttttgtggtgaagtcttgcctctaggctttttcgctttcgttggctttaccatttccccctcgtaacccattgcttctcgcccccccccccccgtttgtttgacccattttttcacccttttgctccattgncttacaagggactcagtccccatttt

SEQ ID NO: 8542 - DNA, 1055 bp, Heterodera glycines
tgctcattgggctcatttctccgcttgctgatctgcttgtgctcgtcccaattagcttgttccgtctccatttgtggcgtctttttacaaatttatttgtcgaaacgaatttaattggtaaaaaaaaaattttccgttttcccctccaaattttgtgcttttagtgctggtatggagcgtgtacagctttcatcagttcgttttgtacattcagccaaattggccattgttggaaattgtgaaattggcgttcattgctcaagtaaatgccacaaatctctaaaaaaaaatttcaaaaaattgaccccaaaaaattccaagaaattggaggtttttgctcgagaatttaccattgtttaatggacagtttttttctcgaattgtgactaaggggttctaacctgttagcccctcgaaaatttttaccaaaaaatttcaggtctatgaaaaaaaattcttttttcaatgccactccatttttttgcagtttggcactctgttcgcattggtcatttgctcgctgtttctgtacgcttttctcggcctgatcacgcccttttatttggcaccgatcagtggcacttctgcgctggcaatggccgcgctggtggcgcttaaacaagttggcatttaaaaaaaattgaatttcaaaaccagtgaacttatttaataaaacccttggagtgccaaaaaacctagaccattttttggtgaacaactcttttcataattgtccgaattgaaaccttcaatttgattcgatgtccccaatcaagctagcaaaaaaaaaaaaaaaaaattttcggaggcgggagcccgaaattttttctgctatccaggctttccaagtgttattttttcataattttcaacgctggagcgaaaaagcaggaatttatagaggtttagcgtcaaaaaggtgacaattttttgccatttgggtcaaatttctaaaaataattagaaaattgtgtaaaaattttttttcaaggctttaacccaataaaaaattaaaaagccatttccagtacattccggacactgtctgctggcaa

SEQ ID NO: 8543 - DNA, 1294 bp, Heterodera glycines
cccccccccccccccctcctttaaaaaatttatttattttccttcataaatgtccgttttttagtttttccgcccaaatcagctggacttatctgcgtttcttccagtcccggggcggcatgcccgagccgatggtcggagaccgcagcgaacacttcacatgggccaggttgaacatggcaaatgcactacgctttctcccccccccccccccagaatgtttccaaaaaaaaaaattgttgaaagaaaatttgcaataaaattgttttgattgaattttagcgatttgaatagaaatggaatgtgaactgaacgggaatgggacttggaaagtggaccgggaagggatccgggaaacgggattcttatttttgcgggattcctatcatttcaaaaaaaaaaattttttcccggtataaaaactttttcgacggcacggtggggatccaaatttgcatcattttttgtgcctgtttcacaaatgcgaaaaaatgggagaaattttcgaaacgacgaattaaaaaaaagtttctcgcccgcctactactccttcaaaaatttaaaaaatttccataaaaatttgtttgcagtttgttcccccgccgtgcccaaccgttggccacgctgtgcggtcggctgacctttcgctcgctgcgtcgcgcgggtgtgctgcggcgcgtgctgcgcaccgagcggctggcccaggcggaggaggacacactgcacgcggacacgctgcagtcgctgcgcgtggtggacgcgagtgcggcggtgttggcgcccgagggttgggacgcggagcggcgccggtgcgttgccgggggccgaggcgcgaggcgtttgccgccgcggggtcaatgacggcataacacatgtttaacggaacggggacaaatttttaccgatagaaaaaaaacactgaatttttttcaacttttggaaagccttggcagcggtcaggcccgtaaaaaaaaaatttgtgacataaaatcctaagtttttttaagaaagttttcgccatcagattattttccaaaaagtagacgttgtggtgagtgaaaaaggcaggcaacaatttttttcttaaaaaataccaatttaaaaaattttttgtagggcagcgcgatgcacgttaggtgccgccagggaaattttttttttgttgcaaatttaacgaaatttttaagaaaattgacacaaatttcaaaattaaaaaaaaaattcctttcaacctaaattagacgccttcacaaccaaataaaattaattaatgcatttttcccaatttgcagac

SEQ ID NO: 8544 - DNA, 2521 bp, Heterodera glycines
  unsure (1)..(2521): unsure at all n locations
ctgttgtacctcttctaatcactgttgtacctcttctaatcactgttctatttcttctaatcattgttgtacctcttcatatcactgttgtacctcttctaatcactgttgtacctcttctaatcactgttgtaactcttttaatcactgttgcacctcttccaatcactgttgtacctcttctaattaccgttgtacctattataatcaccgttgtacctattctaatcattgttgtaactcttctaatcactgttgcacctcttctaataactgttgtacctctcctaatcactgttgtacctcttcatatcactgttgtacctcttctaatcactgttgtacctcttctaatcactgttctatttcttctaatcattgttgtacctcttctaatcactgttgtacctcttctaatcattgttgtacctcttctaatcacttttgtacctcttctaatcactgttgtacctcttctaatctctgttgtacctcttcatatcactgttgtacctcttctaatcactgttgtacctcttctaatcactgttctatttcttctaatcattgttgtacctcttctaatcactgttgtacctcttctaatcattgttgtacctcttctaatcacttttgtacctcttttaatcactgttctatttcttctaatcattgttgtacctcttctaatcacttttgtacctcttctaatcactgttgtacctcttctaatctctgttgtacctcttcatatcactgttgtacctcttctaatcactgttgtacctcttctaatcactgttgtaactcttttaatcactgttgcacctcttccaatcactgttgtacctcttctaattaccgttgtacctcttctaatcactttgcacctcttccaatcactgttctatttcttctaatcattgttgcacctcttctaatcacttttgtatctgttataaaatttaaaaaacggcgcgaagcggccgttcgaggccgcaaatcggcctaaaaaaggccacaaaaagggtgcgaatcgcccgtctgagtccatcaaaatttaataacgggcgcgaagcgcccgtccgactcaacacaatttaaaaaacggccgcgaagcggccgaaaagcacaacaaaaattagaaacgggcgcgaagcgcccgtctgagtccatcaaaatttaataacgggcgcgaggcgcccgtccgactcaacacaatttaaaaaacggccgcgaagtggccgaaaagcacaacaaaaattagaaacgggcgcgaagcgcccgtctgaggccgcgaagcagcctaaaaatcaccgaatttaaaaaacgggtgcgaagcgcccgtctgaggccgcgaagcggcctaaaaatcgctgataattttttaaaaattccaaaacctcttctaatcactgttgtacctcttcatatcactgttgtacctcttctaatcactgttgtacctcttctaatcactgttctatttcttctaatcattgttgtacctcttctaatcactgttgtacctcttctaatcattgttgtacctcttctaatcacttttgtacctcttctaatcactgttgaacctcttctaatcactgttgtacctaaacgggcgcgaagcgcccgtcatgaggccgccaagcggccaaatgttctcaaaaaattaaaagacgggcgcgaagcgccagttattaggccgcgaagcggccgaatgtccccaaaaaaattaaaaacgggcgcaaagcgcccgtcatgaggccgcgaagcggccgaatgttctcaaaaaattaaaagacaggcgcgaagcgcccgtcctgaggccgcgaagcggccgaatgtcccccaaaagtttaaaaaaacgggcgcgaagcgcccgtcctgaggccgcgaagcggccgaatgtcccccaaaaatttaaaaaaacgggcgcgacgcgcccgtcctgaggtcgcgaagcggccgaatgccccacaaaaaattaaaaaactggcgcaaagcgcccgtcctgaggccgcgaagcggccgaatgtcccccgcaaaattaaaaaacgggcgcaaagagcccgtcatgaggccgcgaagcggccgaatatccccgtaaaatttaaaaacgggcgcgaagcgcccgtctggccccacaaaataaaaaacgggcgcgaagcgcccgtcctgaggccgcgaagcggccgaatgtcccccaaaaattaaaaaaacgggcgcgaagcgcccgtcctgaagccgcgaagctgcagaatgttctcaacaaattaaaaacgggcgcaaagcgcccgtcctgaggccgcgaagcggccgaatgttcccaacaaatntaaaaacgggcgcaaagcgcccgtcctgaggccgcgaagcggccgaatatcccccgtaaaanttaaaaaacgggcgcgaagcgcccgtcctgaggccgcgaagcggccaaatatcccccataaatattaaaaacgggcgcgaagcgcccgtcctgaggccgcgaagcggccgaaatccccca

SEQ ID NO: 8545 - DNA, 2509 bp, Heterodera glycines
aaattacaaacgggcgcgaagcgcccgtcctgaggccgtgaagcggccgaatgtttcccacacgataaaaaacgggcgcgaagcgcccgtcctgaggccgcgaagcggccgaatgtttcccacacgattaaaaaacgggcgcgaagcgcccgtcctgaggccgcgaagcggccgaatgttccctacaaaattaaaaaacgggcgcgaagcgcccgtcctgaggctgcgatgaattgctaaattacatcactttctagcgacgcggcgaagccgcgtcccatagcgcgatagcgctttaaaacatcacactaatggaattaatgttttgtatgttttaaaataacaaatgagggccatatattaccaagccacggatgcacaccatagccaactgggcaccctagtttctactatatatagagaaaaggtgcaactcgtagaaaaaattataagtccccgtggtttgcccgtaggctcctgaaagtgcggcattgcttaagcaactttttgaggcgcatctgggaaaaataaggatttttcggtccggcggccagttgagcgccagcggcgctgaaacggccaaataaaaaaaatcgtcgcggttttcgggctgtaacttttctcagcgaaccgggagcggaaaaagtccgctgagagggcacaccccagacatgttggctacaactttgtcactgatcactttttgatcagatcaaatgccgagcctgtagaaattggcgactgaacggcgctcaaaatgccggttttacgtttttcgggaataactcgctgggggttaagcggagcgggttggcgccgcttgagcatttgtgcagtttttaaagctgcatccgatggcgttttcagattttgaaaattctcaaaatttttcgagctaggccccctcgaaaatttttcgtttttgaattttatgattttttaacgaattttcccagaaaaacggagaccactttcaagcaaccgtttttcaagctctatcgattggtgacatttttagaaaattttcgatttttttccggaaatagaaaaaatttttggcctgagcgggacatttgagtcccgggcccataactcgtcgggggttggttttagcgaaaaattgccttagagcaaaattgtagagctttcaaaatattaaattattttttttacaaattcaaaaaataaataatgaaattctttaattaaaaaaaataaataaatttaaatattttataaaaaatatttgaaattaataaaacatgtaaaagtaatcaaaaatgcacagaaaaataatgtacaccgatcggatccgaacttcgccccccccccccctcaaaatgatgcctcagaatccccaatcacacagggattctgagggcttaacgatgtcaaaagtaaaaactgattatgtattcatgatcagcggcccaaattacccctaatgacatgtttttggaagatttttgtgaaaaaattttttcaatcaaaatcctgtccaccccctttggtcccgaaccccaaaatcacttttatttttgtatctttttttaatcgagaaaaatagggagaattttatgagatttatttgaaatttataccacaaaaacaaaaaaagttattccagatactactaaagaaacaaggagtttcgtttccaaaaacaaaatctccttacggtttgccgggagggattcgaaatttcgaccttgggggtaacttttgacggcgcattcaggaaaactatagattttccgatccgagggccaactgagcgccaggcgccgaaaagtcacttttttcgaagcagtttttgcagtttttgggattcaaaaattttttaaaggcttaaatgaaaaatcggcctcgataggattttaagttggacttttttggattttttttgtttcttgaccgaaccccaaggtcttgtcagtttttccgaaaaactggctaaaaattgcatacttttttgggccatttcagcgccggctgaataactcgccggggtttgaccggaggaggtcggtgtaagcggcttttttgtacagcttgacgagctctatccaaccatgcttttagatttcagaaattttcagaaattttcgagctaggccccctcaaaaattttccgtttttgaattttatgattttttacagatttttccggggaaaacggagaccactttcaagcaaccgtttttcatgctctatcgattggtgtcaatttcagaaaaatttttaaaattttttttggaaatagaaaatttttggttgctaggcctcaatttcagttctggcgcaataactcgtcaggagttgattttatcaaaaaatcgtctaagagcttttttgtagagaactttaagcccaatctaatgtgctttatctcatgtttttatcttaaatttaaaaaaagttataaaattaattgtgattttgaaactcaaaaccaaaggggggaccccatggttttgcatttcatgaaaaatttttttgctcctaaatt

SEQ ID NO: 8546 - DNA, 1463 bp, Heterodera glycines
acggaaaaccaaaaaattaaaactctcggatttcgagttttcgatttaacaaaaccaagatggtccaggcagcagtagaaaatcttcgtttctcaaatcggagaggaaaaataaggaggactcatttagctctcgcaatcagccacaacaaaattctgggaagtaaacgcttcgcagtgaaaaaaaacatttatttagatttggaccccctaaatgtcctattttgagggtttggaccaactttttagatttgtttacaatgaattgcgatttataaaaacagacctgaaaactcctgatcaggtcttggatcttcaagcggtcattgatggcacgtgtcgattcatcggccggggtcattttttttgctaatgaaaaaattaaggtatattaggatgacaaatagatatatatatgttttgagtaatagtacagtagtacagatggtaccatcaatacagaaatatgcatacgatcaaatattatccgcacatttacaaaaaatgaatatttcatccacaatatattttcatcttccgcttggattgcgcatgacttccttctcatccctcctcattcgttgaccatctcggcgcttcgaaatactggaaaaattgaaaaaattacaacaaaaaattggaatcggaaaaacgcaaaaaaaaatttccgaccgaccgtgccgttcggtgcaggacacttagcaagcggcagtcgattcatcaacgggtggttgtccatcgcatccatccatctcatcggcgtatttaaacagccgcttcgcggcggcggtatccaattgacgccgccctttcattttttgctaatgaaaaaaagaggtatattaggatgacaaatatatatatatatatatgttttgagtaatagtacagatggtaccatcaatacagaaatatgcatacgatcaaatattaaagttcatcggcaaatttacaatgaatatatttcatccacaatatattttcatcttccgcttggattgcgcatgacttccttctcatccctcctcattcgttttgccatcagttcggcgagcagtgcgcgtcaaaaaactgttgaaaattaaaatttcaataaaaaacgaaaaatcctcaaaaactacccaatgtcgttgtcctggatgttgatgcacagcatagtgtccaaagtatggtttgcgtcccactcccacttcgccactgtgcgccgatccgtgccgctccgctggcgtacaaccacaggctccgcggtcacacgccaacgcagcgtcagccactcgcccgtccgttcattctcccgctcaacgacctcggtgttgcgacgcgatgcccgatgacaaacgacgacgtaattgaccgcaatggaatcagtgctttaaaaaactggaaaaattgaaaaaattacaacaaaaaaaaattggattccaaaaacgcaaaaaaaaaaaaaaaatttccgatcgaccgttc

SEQ ID NO: 8547 - DNA, 4813 bp, Heterodera glycines
cgaccggccgttcgcaggcttgacgtgagcgtagaccaatgcgcgcgtcgccactttcgaatcgtcaaaaattttgggactgccatctgggagcggtgtgtgcagccatcgcaacagttgatgcttcggcttctcattgaaagtaacttccaggtcgacgcacctgtgcgaaatgggggaaatttttgaaaatttgcaaaaaaatttcgccacgaccaaatgtagatggcacggaagccaatcacgccgttcggtgcagggcacttggcaagcggcagttgattcatcaacgggtggtcgtccataacggtgacagccgcccctgtcccatccgattggtgcccgatgaatacccagcttccacttgcgcatgttgaaatgcgtggccaccagcctgccgaagcgcgcgtcgatcagtgcaaaacttcgtgcccacctcagtgcggtcaatccaaaacagagtgtccagccaaacgtcgtttgccatgcggctactgaaaatagaaaatccgaactgttgatgcatagcagtgtccaatattcgatttgcctcccacttccacttcgccactgtgcgctgatcagtgccgttccgctggcgtacaatcacggcatgtgcagggactcgcgcattcggcgtcagccgctcgtccgtctcttcattctcccgttccatcttctggaagttggtattgcatgcaatgtgacaaatgacgaggaagttgacagggacggcactcgcgttgaaaaactgtaaaatgattgaaattcaaaaaaaaatggaatcaaaaaatgcaaatatacggttttacgcgtcccatgaatgactatcatcctcagtttctttgggcatatcttttttcatacttggtcaatgcctatattcttggtatcaaacgaaagcttaaagtctacagaagcttttgtataactaaattctcggctaaaagcaatagacaaaaaattattcttgaaaatactcgaaaaaccttgaatttcatgttttctcattgtaatttattttctaatgcaagtaattgctgttttcttggatttataagatcccgagagttcaagcttttgattggtaccaagaatataagcattgaccaattaagaaaaaagttatggcctaagaaactgtggatggcatgggacgcgtaaaatcgattagaaaaatgaaaaaaatggaagcaaaaaatgccgtaaaatctttcggaccgtgattaagcttggcatgaacgaagcccattgcggtttgcgccacttgcgaatggtcacaattttcggacggccatccttgcgcggtgtgtgcagccagcggaacaggttgtgcttcggcttctcatcgaactcgtccggcgggttgagcagggcattgatgtgcacagcgctgggcggcggtcggatggggaacatgtgcgtgttggtgatggcacgaaggttagcacagtcgaacagcacattcggcgacacatggcgacgcaacagcgcgaagttgacggctttcatgtcgttcagtgcgaggacggcgtgcgaaatgagtggccaaatgcgttgcgccatcaccgcccagcagcggaggtccgtcgaatggatggtgaactgcacagcgatgccgcgattgatgacacgttgcaggcactgcagaaatgcgatcacttccaggtcgacgtacctggaaaattagggaatttttaaaaatttgcaaaaaaattttgttcgctaagaccaaatgtagatggcactgaagccaatcacgccgcccggtgcaggacacgtggcgagcggcagtcgattgatcaacgcgttgtcgtccataacggtgacagccgccgtgccgccccggtcccatccgcttggtgcacgatgaacgcccagctcgcccagcctccacttgcgcaggttgaaatgcgtggccaccagcttgccgaaacgtgcgtcgatcagtgcaaacttcgtgcccacctccacgcggtcaatccaaaacagagtgtccagccaaacgtcgtttgccacgcagctgctgaaaattgaaaaaatttaaaatccgattttttgtgaaattttaaattcgggcggcttacaggtcggccagcgcaacatttggatggtccgacattgctcaattgtcgtcgttttcgttgtacacagagaagggatgattgatgaagatgaattgccgataattaatgaatgatgaaaataatggcaaccaaatgaattttttgtgccttttatatatgaatttatccgaaaaatttgactcttccgactaaaaaatttgctatttaaggcccacactttttgcttatccacgttcattccgttcattcattccatccacttaattattcgtcctcctccaccgccacttaaatcgtcagtttatttaggtaattaattgttttgttatgtgcattttcattgtgctaattgccccccccccccatttttcagcgaatggccaacgcaatgtacgcggcacgggcgcgcgcggccaaggcggaaaagcgtcaagcgcagctgcgcaaggcggccagagcaagggcaggaaacgtaagtttagattaaaaaaatttaaaaccgaaaataattttccccaatttttttcccacagaccgccaaatcgcgacgagccgagcgctgttcaatttgctggggccgactgagccgaatcacgcgtaccacgatgggctgccaccatccgctgcaccgacgctgcctctacaattgggtgcgcgtcaacttgttttgtccgatgtgcggctacaactacacgcgcgggaggccccgtgatcgccatggacgacgcaccaggggactccatcgtatgacgccggatcaggtgcgacgtgaaatggaccgcatgcgtcatatcaggcgctgatggaggaggaggagaggtgggttttgttgaggtgtgggacgggggcagcagggaggacgagtgtaatttttggttctgtttcagtttggtgttttgtgggggagggagggtaataccaccgccgatggtatcccaccccccttttcgaaaaaaaaattttcaaaattttttagagcggttttcaaggtcggggaatacgattctaacatccatttgggccgtgtgttgggggagggggcggaggacgtgcaatttttggttctgtttcagtttggtgtgttgtgggggagggagaaatgaaaaattcagaatttattggactcaatttatttttaattatcatttttttgaattttcaggcccggaaacgagaagtcgtcgcaatcgcatggcaaacggcggaaggatggaaagaacggacgacggatcacacaatgaatgattgccgagtgtatttattgatgtatttgtgatggatattcactcatttgttgtctcataaccaagtcagaagaacacacgcattgtttgtatcacttaccattatatttgtactgaattgaatgcataaaattgttgagcacaaatttgattccaaattttaaggggggtcaatttttaatctcaaatcttatggtcgtgtgaactcatagagcccccggctcaagtacagtttatgcgcccaatcaaattgttactttaaattgctatttttttcaaaaatcccgaaaatattgatttcttcaatatccgattttgtcaatgataagccgtgccatcccacatattgattttaagcgcaggtcaacagaaatagagagctatccgaaacatggccactggatgaaaatttaattggacgcacaaaaatccattggacatataaactgtacttaagccctaaatttatcataaaagcatacacaaaacaaattaaaattaagttgatcaccaccacaacaaaacaacaattttataaacgtcaaatgggctcaaattcattctcaaacacagaaattcaaattgatcgatcacttctcaaggaatctcgattcgattccactgatcataaaagtcccatccaatcgcttccttttcccattttgcccatttgctttcgtcgcgcacaattggacaacggatcagaagaaaattgcgggtatctttcatttctttcaacgtcaattgttcccgagtcaattcgttggtcagatcgaagagctcaacggaattagcagaaggcggcagatgaaactcaatgacgacaatgaaattgacggaagaagaagcattggcaaatgcctaatgggggaaattggataagaaatgcgaaatgataaatgaatgacattttacggttaagtggcccaagttgggcataaaaatttttttgtcagagaatcacaaacggcactacactttataagtccaatcaatcaaccatatctggtttttatacaatacaataactttgttcatgttctaattaaaatatttttgctatcattcgaaagctaaaagtcaaaagaagttaaaacatataaaatcttagtgtttaggcaattacaaaaaagaatgattaattaattttgttaattattgaacaaacttattgtgtaaaaaccaggtatggttaattgatttgactcataaagtgcaatagagctccccaaacacagtatgaattgcaaataaaagcaaatccaaatcaccgctttgaaggcttcaatccttgacgccaaatcccagtgctcgttattactccacaaaaagcatttgcgcatctttggcacattgtccggacggggagtgaaaagccatttggccaccgcttgtccatctgatgccatggcattgtcatcgcacgggaattcagggaaggaattgtcattgaaacgcgaagcgatggacattcgttgagaa

SEQ ID NO: 8548 - DNA, 1365 bp, Heterodera glycines
atcaatgaacaatgttctcgagactttcgagaaatgccattcaagattctcgatgggtccttcccataatcactgattacgtttggactcattcattgctttcctcctcccatttatagttttcgccccgttccggccctttggagggcggcaccgtcgtggacatcgttggccatgatcttggctcgcgtctgcaagatgtccaggaccgtgtccaagtcgcgggtgtgccgtgccgtgtcctccattacgaattgtcagttcgcattctttgcgtcaccgaacgttcgccgctgcccttccgcgcgcccatccgcttgacaatcggtcgcagcgcgcgtcgcaacgctcagtcagcggaacactttgagtttcgcagcccacaagtgctgtccgcacagcccacgtttgggccacagagcggaggcacgcgactgcagctgatcggcacaaatttggatgtggggcggaacgcgagtgtgtacttagacaacttggagtgttctcttcaggaaaagagggaagtgagtgacgcgcgcggaatgggagggcgaaacgcaagggaaataaacgggggaacggaaggcgggtgaagtgtaaggggaaaagcgggagacggggttggggaggcgtggaaagagtgtgggagaagcaggtgagatagagaagaagaagcttccccgagaggaagattaatggatcaattgaggcaacaattgatcctatatgatcgagcaaagtggggagctggagagggcagggtcggtagttcagctggtagaacactggtccggaaagccagagacgccggttcaaagccggcccgccccatagtttttccctcaaaggcttccccgctcgttcatatatttcacaagcatatatgtataaaaatttaataaattcagaattgcatatataaattttaaaaatcaaaaatttttgcaattgtctaaaaattgttctaattttatattattattttcacgctgtgacatttcattttttcgctgcttaagcttattaaaaatttcataggtaattttttagagaataaatgtttggaaatattttttattaaatgcttagagacaatacaattttatcgtattttagatggtaattaggtgtaattgattatgactttccaccaggaatcatttcatttagtatttgaatttgttgtttttaatcctcagctttttgaatttgtcgcattacactcacaagagcatgtgaacatggaaaatttctgcttccgcaaacgttgggtcgattttatgattgaaaccctgttcggccctgacaacagatttgatgtaggtcatagcaacacctgccaaaaatcaaatttaaaaataaaaa

SEQ ID NO: 8549 - DNA, 2527 bp, Heterodera glycines
tttctgctctccgcccccaccgttccgtccgcttcaccttatgagttggaattgatctctgagcttggcgcgtgccatccgctcaattcgagtgcgttgagttgtgacagtccgagtttggcactgccaacggcgcttcttcggcagtcgtctatggcgcgatggatggttggaatggcaatggacggagtgcggacagtgcgcaatttggggccgatcattcaggtgagttcggctgagggaagaagcgaagggcaaaaaaaatgccaaaaatgaatggccaatgagagaatggcatccatttgcagctgaccaccgtgcccgacccccagttttcgcctttcgccggccttcacattttgcaggcggaacagcctctgatgctttccggacaatggctgagtcaggcggcgacgccggcggaatattcggtgggaaaaatggcaaaatgaaaagcaaaaaaaatggcttttccccaccatgcttaattaatcccttttttctcttttccatttaatttccttcccatttcccaaggttaccattggcactgccctttgtccggttttccttctcgagcccgaccgacttttgtgccgtcctccgactgtgcctccgttgcccaccgatgattcgggaagtgaaatgcccgatgggaggccacttgtcgtcgtaagtgtctcccgccattttcggcattgttatttctccgtgccatgccgttcttcgtttacttgtcttttgccaggtgcacattggccgtgtccgtgtcgaaattggtccgttggaatacgccggcggcgccattagcgccggaatttcacgcatcgattggtcgcgtcgcgcgggcgttctcggattggccgtccttctggtcatcgtcattgttgtgctggtcgcggtcggattggcatggcgaagacggcagggcgagcacgagcggacgtaccgacgcattcagttgcaaatggaacagatggaaagccaagtgcgctccgagtgcaaacaggtgatgggtggtgggtactgagatggcgggccacaactacccggggggcttttaaaaagggagaataaatggcagctcagatgcctatgtaataagcatctctctgtttaggcctttgccgaacttcagacggatgtactcgctgaacttgacggggtcgacgacggcgccggcattccctttttggaaagtcgcgagtccgtcgcccgtctcctcctgcgcgacttcggcgagccgacgataaacggcgcatacggcggagcgatttattcgaggttcatcggcagagaagaaatatttatgggcaatgattcattaattacccatttagtcagttgccgatgactttggcacagttcgaatcgctgctttggaatcgccaggtgaaacatcggcaaaactcatttttgtgccatttctctaataaatgccaatttcagttcatttatgtgctcgtccaaatggcagaagaggagccgacaatcaggtgagataataaatggcaaaacacattaaaaactcgctcgcctttttttaatttaagtttgtcatttgtcactttggtgccaattcttggcctgtctttttggcatttatcttggcattcattttcctttggcattcctcacttcttttctgtctttggcattccgttctccctctttcgttgttggcattctgtttaaccctttggcattccgtccctctccctccctttgtcagtgcctctgaacgtgcttcgctcgcttcgcttcttctcgccgtcctctcccgcaacttggccttcgcctccgacgtagtcctttccctgctttctgcccatgttcagcgctgttcgctgatgcactcgccccatttgctgttccgccactccgattcgctggtggaaaagctcttccaacaatggctcgccctttgccttttgccgcatttgcgcgactccgaaggccccgcgcggtcgcttttcctcctttacagggcactcaaatcgctgacagaaaaagtatgatcggaatttttgatcacccattcgatttgaccaaatttgcctcgtttaagggccccgtcgacgcggtcaccggccaagcgcgttattccctttccgagcagtctttgctccgcgaaagtgtcgaagcgcgtcctctcactgttttggtagggaatggctcgccatttcgcttacaaattagttttggttttcccttctttggcaggttattccgttggatggctttgaccaggcaccggtgccaattcggactttggattgtgatacgatttctcaactgaaggccaaactgttggacactttgtatcggaatgtgccgtactcgacacgggtcggcatcgaccagttcgaccttggtaagtcggaggactgactgacggcacaattcgctaattgtccgtttctgaatcgcccgtgccaaattcgtaaattgtccttctttcagaatggcgttgcccacgtcgtggcaaaggtttgcttttggacgacgatcagccccaacgaagcgg

SEQ ID NO: 8550 - DNA, 4182 bp, Heterodera glycines
caaaaaaaaaatatattcatttagcaaaggcaccgcgcaacgttttgtggacacattttttgagtccgttctgttcaccgagcagcagcagaacattcccgtcgttttgaagtacgtcttcgactttttggactccgaggcggcacattgcccacaggcacggcacttattaatgaacggacgaatttatcattctcatagctgattgatccaattattaaatttattgcttaatcgtcgcctcgctttttcagcccatcgattcggatgttctgcacgcgtggaaggccaactgtttggtgttgcgcttttggcagcagtttctccactgtcccgacttgctctttgatgtgccgcctcgtcccgcgagtttggccggctctttggccgttgttggccaaactcttgtcgaggcgttcaggtgggaaaggcacactgatcagtggacaagcaattgctgagggattgattgtccgatcatcatttgacgaatgccaatcccaaaattgggctttagccgtgccgatttggacttgagcagtgcgagtccgtccagccgtcttttgtttgcgcgtgacatcgcccgcttccgtccccgggcggaagacttgttccggtggatagcggcacaaccgcccatctccgcccagcactttttcgattatgtcggcaccctttcaaaggtagaaaatgacgatgggacttcatctttaacttttaaatgctaattgccttcatcactaattaccctccgttgtcttttcgtgttaacaccaactaactttaatgagtttctctccattagcaggtatccgctgatggcgtgagcagcacttttgccctgggcgagttgctcaattggaccaaggccaacggactgcgtttgatcgcggcgcttgaggccgacgcggaggcgcggcgcgcgcggctggcggaaagattgaggcaaatagtgcaaagcacactgatggagggggcggaagagcacgtttatgcgacactgcggtgaaaaggggacgaaaagcgcaacgaaaaggagccaaaagacgggggaaaagggccaaaaaggaaaaaaaatggacaattggccaaacgacggatggacggaggggaagtcagtcgccgcgagaagaaaatgccgaccgaccgattaattccactgacgggtgccataaaattttattgtttcagaaattaattaattaactgcccattgttcatatttgtgcatttgcctatttatgtgcatatttaaaaaacatatcgaatacgaataaaatattaaataaaatgcttttttaaatgccttttattaattaggtaatttgttcgttttgccatttctctcttttcgccgttggatttaccatttttggcattttcctctgccattcgtccctttctttcggtcggtcattctccgtctctgctcgtctgtttctgctgctccttctctctctcccccttttccgtctttccctccccaaccgtgttgtctctctcccctttctcccttgtcttttgccgtttctctctttctttgctgtccattgctccgctcaatcgccgttgcgcctccgccaaaaagcgtttgtgcgcttcgctgccctccgccagccaatccaacgcgtccgcggggcccaactccttcctcccccgtggaggaggagggcgtgcggaagcgcaacgcgggcccaaagcgtttctcgcgccgccgaaatgccataaaaccgagcggaatgccatctgacaaaaagcggagactgaagcgaaacaaacggaaaatttgcgccatttttaggggggtcaaaaactttcgagaatttcgacaattaattaattatttaattaatagccttcgggttgacctgcatttcgttgcgcgactacgcacgcgaccgcgagcagtgcgaaagtcaatgcgcaagcgattagaacggctaaaaaccaagcggcactgcgcaagcgttctgtgcaaaaggagggaagggtactgtacacaaacaaaagaaagactactttgagcaaacactgtgatgagtgcttacagtactcttgtgacaataaataccgtaccgttgctgaacggtggcctccctctgctgctttccgtgcgaatgtctagcgcttcggatgccctccggcgtttcggcccttcccgcgcctccccaattagcacataatccgttccctcggccaaattccgcaaatcaaacaccacttgaggcaacacaattggcaccgtttgatgccattgggaggtgcctattaaagttggggaggggggtaattaagagagaaaacaattgaaaaaataaaatgacaaaagattacaaattttaaaatttacattttaaaatataaaagaaaattgaattcaaattgaaaattggtcatttaaatgaacagttaatgccttttttcgtgtagttgagaaggaaagaggagcccgacatgcgccaatggccggcggaggaagcgtttccggagggaaaccaacggacgcgcaaaatggtgggggaaagggagtggatggagaagaggggcgggtcggggtctggaagagtgggtgggccattcgtcaaaatgctaattaccctaattagtctgccctcccttaattacccctgaggggccatgtccgcgtgtttcgccatgtgcgcggtccctctccgccgcccgtctcggcccaaacggcgacgcggaaaggcgtctccggggacagagactcgtgaaggtaaaagagttggcgacgaagcacaaaagtctcttcggtgaagccggaggaaaggtctaaaaacaaaggacgaaacaatcggcagaacaaaggaaacggggcaatggcactttcgaaggcgaggtaaagccgcggagatttccgttgggatggagcggcggctcccaagtggcgagaagggagcgcgagccgacggaatggacacgcaaatttgtgcactttggagggcgctaaaggaacgggaagcaagtcaaagggggactaattagtcaattaattaattgtcaacgattaattgcctaattagtgtcttaccgccttcgattgtcgtgaatttcagcaaattcgacccttcgctttcgtattggccattcaaaacgcacaccttcgcgcaaaaggttttaattttcggaaaggaagaatcccaaaattgactttggcctcgtaattggtcagtgcctgaagccccgaaattgtagccacggtggaaatattcggcacaatttgagaagtgatcagaaagggacggacagaaggccaatggtccaactgacaaagagtgatcaatgagcaaagaaatgtgaaatgggcggagaaaaaagggtgaaatggcaacaaaaaaaaactgacgcgaaatccaacgaaatggccacggacagagctgaaatggccaaatgattgggctaaaaatggcccaattgatcagtcacagtcacctcgccgacttcagctcctcccaacccaattcgaccgtcgaatggtttcgatgcgcaaccaatcggagtccgcgcggtgcctccaatggcactgaaagggggcagcttttttccaatttggcattttccgtttgggatttgtgccgaccgtcttcgcccgaccagcccagcacagtttcgggttcaatcgcggaaaagccgcgcgaattcactgcgcgcacttggacaagaaaaggccgaaaggtgggctgttccctaatcgtggtctgattctaaaaaagatgtgtgcccctttcaagcagtgttttcttctttttactgcaaatggatcttccacaaagaattcgtgccaatccgtcggtgctgagtcgtccatttgccgatagcgcaccaaatatttcagtccatgcgcattccaaacatttcttgatagaggcgtccatcggatcacttttattcgtgttaaagcattataattattcctaaaactacccaaattgtccggttcagtgccctgggcgtgcacttccattgggttcgagaagggcacgtccggaggggtggcgcacgggacggaagcggacggagccgacgcgggttcactggcaccgtacgaattatgggcgaacatccgaaaggtgtaattgaccttaatgacggagtggggaatgctttttgttgtatttcaatgggatcctgatttttcagacagggaccaatcggttcgac

SEQ ID NO: 8551 - DNA, 1961 bp, Heterodera glycines
agacaatgctttgctctgtggacttttatgaagtgagtgagcgtaacgcgtgtgaccacagcaaattcaaacccgacaaaaccgcgtccaaaaaattgcttttctgtcaaaatccgatggattttttttgttgatcaaattgaaattcatttgctgcttttgtcgcgttgagtttttatgttcgccaagtgtcaaaaagcatttcctattattgcgtcgcttaatttgttgttttttaagttcttcgtctttcggtatgccttcccttctgtctttggctggtgtgcttctgctgcgctctcatcccgtttgctgatcaattggacgaacttctggacctgcttcaacttccgcgcggattacacaattgtgccgttggtcactttggtgagtttgtgtgccacctttttgccatttgattttgtggcattttccaacttttaggtgctcagcattgtcttggcgtgttcatccgtcttcgagattttcttcatgaattcggtgctgaaaaagaagtgccccgtgtgtgcttatgcttcaaccgacgactacgatgatgatgatgattatttggtcacggaatgtgccatcgactgagcttaagcagacacgaaatcgggaacaatgctgatgccaacaaaacataaccaatgcgatgaaacaacaatgtgatggataagacatatgatcgatataatctaattctacgtaaactgttgtattccgttgtctattccattatattagtagatgtatgtatatgtatatatgtatcagattatctatttcaaaaccataaactgctgtattcaatgtgttgtgtattgtatgttccattatattagtagataaaatcttgattgatgtaaagtttttagtaagaatttattcccaattagttatccgaagtgtgatcactgatcagatagatgctcactaaatcttttttgcatcatcattttatttatttttaatactatgtatcagggatgtgccgagccagacaaaatccgattccgattatggccaaaaatccgatacggttttaaaaccgattacgattatggcccaaaatccgattaattgcgattccgattacgattccgatttttttaaaataattttttcccaaaaattttattcataatcaaaatcataaattttaagattgtgatgcaaaaataagtttgtccacattctcaggcaataaacgttttctcagatctgtcaatcaacccagcggtggagaatattcccagatatttgacatttttgctaaataacaaaaaacttgattatatcggggagaattaatccggcactgctttgtgagaaaaatttaatttcagtcattatgttaaaataagattaaaacattcgttttagaaaacattttttttcaaaattcattggtattctcgctaaaaaaattccttcaaaaggtcaattcttaggggtgtaataatcggatttcaaggcaaaatccgattacgattatccgattccgattatggcccaaaatccgattaattgcgattccgattacgattacgattacgattcggcacatccctggtatatatgaatattaacacatttatttatgcatttaataaaaaattccaaatttattttatttatctaaatataaattttcgtgaaaaattattcaaaaaataagatgaaaataattgtttgcactgcttcttcagctgtttctttattcattatcattatcccatattttttaattccaatttcaaatgcaaatccatcggtgagtttaaattttaggaataattatgtatttgaaaccacactaattaggtcgatgacgaaatgctaattgcatttgtgaaagaaaatcatgaaatgcaaatcagtgaatattcaaagcaaaagtatgaggcataccttggcattgtgtattttatgagaaagaattggcaatgtgacaaaat

SEQ ID NO: 8552 - DNA, 5388 bp, Heterodera glycines
ttctcattttgttcacggtgatcagcagatagcgtttcgttttcactgtcattgttatccaaaaacttgcgcttacgacatttttgaagatttttaatttttttacgattcatcatacgtctaaattcgtaaatttatgctgtgttaactaaactcggaaaaaattttagtggtaacactttaaaaactaaatattttataaataaaaagaaatttggggacgaaacgactaattttggcttgggggacgaaacgacgcgggacgaaacgacgcaggacgaaacgacgcgggacgaaacgacgcgggacgaaacgacgcgggacgaaatgacagcgcgccgacttatgcgggggatttaaatcggtacatgacaaaatttggtgccatataatgtagtggattttttgaatttccggcaaaaaattacgcaaattggctttatgtgacattttgtctaacgctaagcttgacccatagtgtagattttaagcttccgtttgatacatcccaagaatgtatagacattgaccaaataagaaactaagttggtcattcattggacgcgaaaactggaatagagcctattttcagcctaatttaaagcttctacagccatattaaaaaccgttctcttacatatgacaaataatgccaatttttggtactttttcactttacgccacataaaataatttttaatttttttttctggagttttcggggtcgctgatcacgaatatgacattcatttcgaccgatttcgaaccccggacccgaattcgaacaaaaagtcaaaatttcatttttcaacaaaattcacatttatcttccaaaatcgattcaaatggatggaatggcaatacaaatgcgttgaaggcatgagaaaagaagaaaacaactattcacatgggtaaatgagacgaacttgatcccacaaatgaaaaaaagcatcatcgccaaatcgcttacgccagagaaattcattccatccatttttttggctgaaaattatgtcactattcgtcactatttcggactttttgtcactatttcttcactatttcggcatttttactcactattttagttaactatttcgggatttttcttcactaaaattcacgtccctaacgatgacaatggaactaccaatatttaatcaattcattgctaaaaattaatggcattaattttaattcaaagaaaattaaaaaaaaaatttttttttacaattcgctaaaccctaattttctattttaaaaagtgtccattcgtccgtcatcccttcgtttaattgcccttcataaaaatgtgcttctcacaaggaattggagacatacgcaccaaatgcaaatttgtcttccagcagcattgtcgatgccccaccaaccaactcgaggccatcaaattcagcaaagtagggaaaattttcaaaaatttttttttttttttcgaattttccaacccgtaaatctcattctgaccctctccatttgttgtgtgttaaggtgattagcgtacaacaaaacagtggagacggtggccaaacttgctgctgcatttggtgcgtcattattggcgttgtaagttttcaaaaaattaataaacgccgattactgacatcctcgggaatttgtttgtatacatataatcgacatgtgtgtctcggtctgtaatgaaagaattcgaaagaatttccggtcggcaacaaaacactgtcaagagttatagacccgggactgaaatggcaaaaatgacctttggactgaaccgtctgtcaaacgatcagaaaataatttgacaagttaatggaccataactttttttagaagcatccaaattaaacaatcttggtatcattcgatagccctaagagtcctctattttaatatttcgttttgtgttgcacaaaagttatggccagaaaattgcaaaaaaccggctttcaaaacatttttggccttcatttttttgaaattttgtcgcttattatagaactcttagaccaatcgaatgataccatggattaatttgaatgcttctagaataatgtgtatacaaattgccgagcaattgtcagtatcgaaatttgtatcaaaaattgcacccccccccccttcacacttttcggtgttggtcgtgttattggcggtgctgctcttctcgaaatcctttgcttatggatcaggctcgacggagttgtttctaattggtacgatcatcatcgtcttcgtggtggtcatggttctgtgctgtatttatgcaggtccaataaatacgcgccgtataatatatatatatatatatatatttcatattttgaaatgaaaaacgcaacgatcagaaatcagtttttccgaccctgaaaaccctgaaaaagcgctttcgacttttggttagaaatcgggtccggggttcgaaattgtgcaaaaacttcttttttttgttcgattttttgtctaaataggtattttggcgcaattttgaaatttcgttacaggcgaagacggtcacagttcgctggaagtgctgtacaaatgcacggcgtgcggcaaagacgtgcacagaacttatgagtgcatcagtacgtacagtacagcaatttttaccgtatcccctctcaattacaatacatacaataaagtcccgtcgatttaagttgacgtcacttacaattggtcgggcggacgacaccgcgacacctttcgctaccgtaatcaaacgtacagtgtgtggggacagtacacggaaaatgtcatgaaaacggtagtgcggacgcggatgaccatgaacaactttgaggcggtggagcgcaaattcgacgtgatgagcgttgttcagacggacaattattacaagacaagcgatgaatggaccaacgatttgattaggcgtcttgaataattgaggcagaggccaaatggcaacaacaatttttgtgtattatatttgtgtatttctcgtatatactttgaaatggcaaagtgcccacatcatttcggtcacataatcgcaccaattaattgattaatccattcatttctgcttcggttgctgatcagtgatcactcgtcccgggggaagcggtgtcgagaagaagacttaacaaaacattgctcagttgtcgattggactcttatgtaaaagcattttaaaaatgttttgttcacccgtcgtcgtatccgccatcttcgatctgaatgtcaattgagttcgttcgagcagcacccaattccttccacacattgtcccatttcttatcatcccatccaattggacaacggtcgagccaaaaattgtttgtgtcatattgttccagtgtcaattgctccccagtcgcttcgttgatccgatcgaatggcacagcggagttaagcggagaagacggcagaaagttaattgaaaaggaaaccggagaagaagcattggaaaatgcctaaaaatgggacaaaaaaacgcaaaaaacgaataaaatgcccagtgataatcaccgaccgctttgaactgttctatcgttgacgaccattgatccggtgaattaacaggtgatttgagcaacttgggctgaccatccggacggggcgtcaacacccattttgccaccgcttggccatccgacgccatggcactgtcatcgggcggaaattcggggaaagtgccgtcatccaaccacacaacgcgaagggatggacaatcgctgagcgaagacggggccaattgacgcaaacggcgaaaaaagatggtgttcaaaatcatcagatgcatggaagcgcggaacattggccaaatgtggagcaaaaagtagtccaaaatgcgaacattttcagtggtaatgtccaaagctgttgcacaagtgccgaaaagacggtgaaaacggtggagaaattcgatgacattttgatcgatgtaactgaaaagtgcagaaaattatgaaaaatttctatctaatcagtttgttacatgatctgaatgcgtctgaatccgatgactttgttcggcaacggatttcgcgggattggcaatggatttccatcggcatcgtcaatttgcatttgcttggggccatttccgacaattttccatgtaattagcaattgtttgttcaacatccatttgcgcgttttgaagtgttcatcaacgtagaagtcaaatcgacggctgatcagtgcaatttcgaggccaagttgagaaggcgcaagaaagtcgaacaccaaaagccaacaatcggcgcagataaagctgcaaaaaagaagaattttttcggaatttttgtttatttttttacatttcttttttgggagggcgtcgccgttttttgacacggtcaaaaaagaaccaaagaatggaggcaccacaatcgaccaacagaagaggcacggcacgccaactgaaaaatgaattggtgaagtgaatgaatgaatgaattgaaagagtgggaaaagcatcaaagcgagggaaggcaaaagtgaaattttattttaaatccaatgaagctaattgtaagcctcaaaattaagtgaattttgaaacatttaaaagttgagcaaaagaaatgtgaaaacatcagaaaaaaagaagaaataataaacgtaccgaatttttgaaggcatttgcagcaacaaaatgatcggggaaaatatcggaagaatgaatgaaaggaatgaggaggaagagaagaaacaaaggcatttttatactaaaaatattagcgtacatttgagtaccgatgaggaaaaaacatataaaagacagagaaaattggcagtcaatgtcattgtttttacaatcataattatataattacgaccgactaattaataactgcaaaaaagctcaaatcaatcattcatttaacacacagagaaaataatacacgaataaatttaaattcttattcaattatgaatccaaaaaaaggatagaccgatcattttcaaataataattcattcactgcgctgatcactgcttggcaccgcggcactcgagaacacttagctgttaatcctttgtcctgttatccaattccacagcgtcaatgctttagttaaataaaattcaaaaaattttaattcgtgttcactgatcagcaaaatcgaaaattccacaacattttttttaaattattaacccaactcaaattcctatttttaatggtcagcgtcaataggcagtttaaagagcaaacaaaaatatcatcaatcaatcaatccaattcatcatagctcaaaaagatcggtcattatttcttaaatatcaatcattccgctgataactgggccccgtcggaggtgtcgagcacactttttcgtcactttgatctggcggagacagcggcctaaatgaaatgcaatgtcaattcgatgaaatccgaatctaacagttatt

SEQ ID NO: 8553 - DNA, 1740 bp, Heterodera glycines
cggcaaatgcacgccattacaggtggacaaaatcagtgatcactgtctgatcagactggggaagctgagtgatttgttcaaaacttacaggataatcactctgatcagtctggggaatctagtgatttgggcagaagaaatgtagttggtgataacgaatgggacttagtctgactattgtgatcaacatccattctgatgataatatgattcttacgtcctccccctctccgccgtttaggtggtgaatttgctgaacggactgtacaccgcctttgacggcatcatcgacacccacgactgctacaaagttggtcagtcagcggccgatcacttccattttgatcattttacaacgcatttccccgcacagaaacaatcggcgacggttatttggtgtgttccggcattccgaagcgcaacggcgaccaacacgcgaaggaaattgcggaactttcgttcgctttcctccgcacggtgtccaacttccgcgtcgaccacctcccctccgaacgcgtcaatctgcgcatcggcttccattccggtccctcccctcccctcccatttcaaatttggcatttcctcccaaatttggcattttcagggccagcagtcgccggcgtcgtcggtctgacgatgccgcgctattgcctttttggggattcggtgaacaccgccagccgaatggaatccaacggaaagggtaaaattgggggggggggggggaaacaaattcatttcccatttcagccggcaaaattcacatttcatcgagttcaaatcgcttcttgaccaccgtaatcggaggatatgtgacggagccaaggggcgaagtgattataaaggtaattagggggggggaaaggcttttgttaattaattgcctgattaattcattagggcaaaggtgtgatggagacattttggctgttggggcgaattggcgaagtccatttgccggaagggccatccgtggcggaacggaagagcccagcggaaatgcgctgattgaccggtaattaacggtttacctcagttgggcgccagcatgtttttctactataactttctataacttttttctttgtcatccaaatccaacaatgttgctatcattcgaaagcttaacatgtttagaaactttttctaagatattgcggtacttatgcactttacagaccataaaaaataaaattattttttaaatcatataagaaatttatagggggttttcggggtcgctgatcacgaatctgatatccattttgaccaattcgaactccgaccacgtattcgaataaaaaatcaaatatatctatgagctctaatatggtgttaaggagctcttgaaggtgttgatagcgcatcttaactcgggtttgaccaattccgaactccggacccgaattcgaacaaaaaaaaattgagtttttttaatcaagaataattttttcagggtaaaagcttctaattcattatcaactatttaggtgtaaaacaatgtttcaattcttaattaaataaaaaataaggaattggcgccgaaaattgacaaactagagccattgctcataatgctattttgaaaaaacgaagaaaaaacttttttatattgatccccaaatccgcaccgtccatataattatgcagaaatttgaattttatttaaaaaaatatatttaattttattgccgaaacggcattggccaaaacgtattgccgaaaagggattgtcgaaaa

SEQ ID NO: 8554 - DNA, 2661 bp, Heterodera glycines
attttctgttctttaattttgtcattgtcactattttaaattaaataatgatctgacaaatacccaatttattctctcctccattaaatggacgacattttttaaaatttgtttaaacgaaaattcacaaatggtaaaacaatacggtaaaaagtcataaaatgatatacagtaatttacaaaaatattgaaataagttggccaaatcaccggaacattttcaacgccctctccgcaaatcggcgctgctccggcgccaaccgccgaagagatcgccacgaatattcgcctccgtccggcaattgctggtgaaggcttgagaaggcgctggaatttttcaaaataaaatttaaatgattaaaatcgaatttcgaattgttgggggactgccttaggtccaccgcccacagctgcgcttcggcccacgcgttgtccgtctctttgccctgcgccgtctccgccctctccgtgcacacgtgcgccacccctccgtcccgctcgccttccccaagtgccgtcttcgtgctcagcgtgtgaatgtccgggtcggacatgccgagttggagcagcacctgtgccaagtgttcgtccaccatcggatgaccgggcgaaaagcgccagcgaaacggcaaaaggccggaggcggaaaggacgagcaccttttgggatattggaattgccgaaaaccatggaaaatgaaaatttaaaaaaataagaaaaccaacattacagtcagtaaccacaacagtacagtacccctaccgctccctcactctcgcgcactgtctgttggaaatttgttcgccttaaatctctggcccatcttcccctgctaattcacatgtgaccccagcatatagagcatgccattcaaaatgccatcttcacccatccctcgtccccacctgaatctcctccgctccgttctgctcacaattgtcatcttcgtcttcttttctgcagtcgttctcctcctcctcttcgtccacaattcgtctaatcagtgcgtagatcagcatccgattgggcccaaaccgcgcgaatttgccccttccggccattccggtccgtccgccgggattcagcggaattccggcaccattcagactaatcgaccgcttagccctcctcgaatttggcgactgtttgcactcgtcaatggcggaaaaaatcgcctgaagacagcgctggcgccactgccgcccaatttcgatgagtcccttggccgaatggtcatccacgtgcttttgcaattctgccgggaactgattggccgcttttgaaaacgaattgggacgataatgaggctgaagttggagccaatcgcgttccgaagctgggacctaaagaaggaaaccgtctttctcccactccgtccgactttttcccgtccgatcagtctttccccgtccgaccaatattttcccgtccttttcccgtccgatcagtcttgccccgtccgagcagtctttccccgtccgatcagtcttttcccgtccgatcagtcttttcccgtccaatcagtcttgccccgtccgaccagtcttttcccgtccaatcagtttttccctcgtccgctgtttatcccctattcaatcacttcgagtcgcgtcggcttttcctcctcgcctccttccgtcgccataactttccatcgctgggccccttttgtcgtgccgttgtttttgtccacctgttgctgtaagcaactgaatgcgattagcagatgggctttgtccgctatttgttgctgcgtttggtgccttccctccgccggcgtcccttccgtcgcgcttttccattgggcaacggccaaacggcgccaatagccgcagagtgggcgaccccgcgagacgggcacctttttaacgatggaggagggcatttcgaaaaacgaacgaatgtacagtaccaggcaaggaccaaaaatactaccgtatcaatggccaactcataaaatatgaaagagtgaaaagcccaatgcgtccttttcccagctcaccgatgggtttttgtagaccacgatgtatttgctctgcggactgttcggcgcccgtcccccaaagtccgggtgatcggtggccaaacattgcgcaattcccttgcggcgctgcagacacgaaaaggcgccgcccccgccgcagcgacaaaaggcgacagagagaagaaacagcggagtgaaaggcgggggaaggcacggacggacactgtggcaacagattacggattggggttacggtaagaaatgaaatcggcgagacaatggaaaaaggatggaatgtgggagaagagtaggcactgtgatcagattaacgggacactctcgaaaatgccattttcttcccaaagtatggcgccaaggaattgccgtcccacctaaacgaggtggtgagcgagtacagctggtacttccaaatctgatcggcctcctcctccactcgctttgctgtcctcgcgaacagcgcgaacaaaatgggccagctgagcagcttgaggaacacaaagaactcgaacacggtcagctgggcaaaccagccttgggcagggcatctgagaatttttgaaattaaaaattcaaaaagcaaattggcacaagcacctcgggttggcataaccaccgacactttggcaaaagggccgactttggggcagcaattgcct

SEQ ID NO: 8555 - DNA, 1916 bp, Heterodera glycines
cgatgcttttcatggataaatgggcggacaaatagtttttgatggcgccaatcccaggcaccagccaacaccttctgctcgatgtgccgcctcccactgcgctcgtcccgtcgcagaacatcagcgaccgtctgtccggactttgccttcgcgaggacaccgaccggcccatctccgccgatgcgccgccgttgtgcatgttcatcgccaattgctgctgatgttgctgcaccaattgattctgctgctgctgtgccgtctctttgcgctccgtcccgttttcgcgcacttgggaagccgacggcaaaaaggagtcggtgaccgtactctcgtcgtttgtgctcatcccctaaaattgaattgaaaatatctttcaaagctatttgtgcttctttaaattagtccacctgagttggtgagattgtgccctgctcggcaacgggtccgtttggcatggcggtcggctcgtgcactgtggtcatcggcggcatcagcagtgccggattgcgcatgtcgtcccgggagggcggaaacgcgtaaatggcacttcgcatggagtgcatactgtaagagaaggacaaatcagatactgtaggaccgccaaaaaatgcttcccgtttccaaaaactttaacatgatcaaaaactcgacctgttctgggaggaggagcgcaccttctttatttgacgcccgtcttcgagcagtgccaccgtcggactgattgggcgctgagcatccggcaccacgcagttttcgcgccgaattcgaacccaaaatgccgcgggcagcacaaaaagggcggagagaagaattttgagccagttcgggaagggcaaaatgcgcgaaatggtgcgcaaatggattcggccgtacagtaaacggagcacccaccgctgacaacactcgtgggccaaaaaactccgtgcatttgtctaattggtgatttaaatgtcatttttatgaacatgcataagcgaacggcggacttcaaatgcaaattgggtgagggtcagctgccgaaaagtgcccatcgatttgcaaagcgaattgtacgccttggcagggctgtcgcggtaggcgctgtccaacagttgaacagcgaattgggaaagttgctgggcgagccgttggaggggctggtcgtagaaaagccagggacgggactaagcaaacaaatcggatgaagataattagaatatctcaattgcctttctcgccaaagtgcgcgaagctttggccaacgcaagcgaaagtgccatcggttcggtggaataggcacaaaaaagacggacgagttcaggccgatggatcagaagggcccagacgatcagcgcacggagggacctttcctgatcattaacgggaaattgggcggaggaggagcagaacaaatcggacgagaaaaatgtgacggaaagaccgccgcaaagatggcactgaaaagcgaaacgccaaatcaaaaacgaaacaacggcaaattgagcaagcagaccatcaatcggttgattcgcgtggcgaactgttcatcaattcgtcccaactcgcgatcgatgccgaaataatggcccaaaatgatggcattgaaaaaatactcaaaattttaaataaaataaatggcagatcagagaaaaaaaccaattacctgatcaccggtgtccgcgagccaatccaaaagcaattgggaattgacaagcaaaggaatgttttggtcgagcagagaagccaacacgccgattcgatcgtcggacgaaagggccgaacggagcaaaagggacacttgctaaacttgttaatgaattttaacttttaaagtgattcaatccgattaacatccttttgcttgtgagaataagcggtagcggtacggtaattaccggtgccgtttttgaaaaagtgagataccgttaccggttttg

SEQ ID NO: 8556 - DNA, 4118 bp, Heterodera glycines
tcatccgcgcataacttgacggttgaaaaatttcgcctgtgcacgggttgaacagtgcctctttgatgtcatcctgaaccttaaaaacggaattcgactttttattgccaaattagaaaaaaaaacccattttcccaaaaaaatcaagtaaaatttttctaaaaatccataaaattagcaaaattttggtgaaatctgttccaaatctgtcgaaaatttccaattttttcaaggcggcgcctaaccgaaccactcctgttccccaaaagttttttgaaaaaatcgccgcaaaaaataaaaatttttgaaaaaaaatttaaaaatggtacaataactatgcacaaagccaaccttccgtttggcgccatatctttgctgaaccgtccggcacatgtccaattcgtccctggccgcctcggaggacgaggcgcgccttcgctttcggcgttttttgcgctttggcactcctcttttctgaaaaaaaaattgaaaaaattaaaatttaatactcaaaaattttgctgtcagctaacaaagcaaagtccaagtttttacggaaaaataaaattatgttttagagaaattgataattttttctaattagggtcggaaatttcgtgtttccaattaattctgatttccgaacattttttggggcctcggaatgccatccctaaaatgttgactttgtgaaatgggtttttttggtcaccggacagaacagtaccggacagaaacaaaaacaaacttcggccgccgccacactttcgaaattatcatttttatttgcaacaatgttttcatttttgtcctcctcctctttttggtgtgccgacatttttttgaaatgaaataaataaaataaaagaatgtacaaaagggaaaaaattaattatgtaattaattaattcgcaaataagcgaaaaagcaattttatttttatatgggatttaatttttatgagattagagttcaaaaattatgcatataaatttttttttaattggaggtaaaattcccaaaatttcttcgaaatgcgttaaatttaagaaaaaaatttcgaaaacttaattccgttatgaaaaatctactcagaaaattaggggtttttttgaaaaattttcggtccttttcttagatgtcatatgttttttcgggtgtgtcacggaccgggtcagttgggcgccgccgattgggcgacgccgattgggcgacgccgattgggcgccgccgtttgggcgccggtacgattgggcgccgccgattgggcgccatggggaaatttaaattcattaaccttgcctcaacttagggttaaggactttccaaggacgggtataataatttacaaggacgtaacgtgaaagtttcattaaattcaaggatacaaaaaaattataatatgcaatgaaaaatgattgcagtattttttcattattattttgtttctgttcatcagtttcctcatttcaccgcatgtgcacttttttgcggtatgcttttttcaaaaaactttttgggaacattggttccggcggttgccgatcagcaggaaaatttttttgaaagatttcagggtacttatgtatgcactttacaaaccataaaaaaaaatattttttaaaacatttctagggggttttcaggtcgctgatcacaaatctgacatctattttgaccaatttcgaatcctggacccgaattcaaataaaagacgaaaatttatttttcatcaaatcaacctttgttgtcccaaaatccattcaaaagaatgtagatgattaaaaacattatataaaataattgtttttctcgaattctttttcaaggacattaaattcaaggacagcttcaaattttaagttacagggcataatttcgaggacccatgccattaaaaaagaaggagtcatgaaggaattttgtgactcaaatagattttaaccccataaacattacgttttttgagtgctgtttctcgtaattcaggtgaatggctagaaatttttgtagtaatttcagttttttacgtttttggataatatgaaaacgaaaaatttggctgccgcatggcgcccaaacggcggcgcccaatcgtacccgcgcccaaacggcgtcgcccaaacggcggcgcccaatcgacccccaccgatcgacccccaccgagaaaaggatgttaaattttgattggacacggaataggcaatggtacactgaaaataatgaaaagccagaggataaatgatagaaagaaccataaaaagagttgaaattcaccaaacaaaaaacccaatttttcaaaaaactcatttttcaaattcgagttcatattaaaagctttttagcattgtcggaaattttgaaaatttgagtgagatttgttaacagatttttaacataaaaaagattggtttttgggattattaagctcaattggtaggattttcatttaaaaaatgataaaatatgtatcaatctaaaaaaatatattaatatatttttaaatttttttccctttaactccaattttcatcactaattttcactcagacccccattccttttcacagcatttaaattaaatttcgtggtaaatttaattaaaaatcatgaaaaccttcgttgtttgaggacatttgaggacaaatggaagaggagtcattttgtcatcggaggagccaaaataatcagcagaagacggggaagaaagccctcttggccgctttttctcttctgacgtaaaaagcttttgagggaaaaactatggagcgggccggccttgaaccggcgtcacttctggctttccggtccaatgttcaaccaacccactaccgatcctaccctcatgatgatgttggggatgatgatgatgatgattatgattactgtgcaataaattccttcgtctgatcattttcaattgcgcattttcgtcgtcgttttttaaattggccgagagtttagcaaaaagcggaagaagcaaaagcagtgaaaagcatggccaaactgagcagcagaacatccatccaatgggaggacagaaacaattgggaaatgttgctggattggatagaagtttaaagtacttttaccaaaaatatttggtgatggaggggtataatttctaatattaatgagtgttttgactaataacatagattaattgtgaatgggttgcgttggtcctgctttgctaatatatatttttttaatttcaaatttgaattttccggtcaaaattcccaaaggttctgcaaattcatgaccggtttttcacgcttctcagctttatcttttttttcaaaaattctcgtgcctatttttccctaaagggtgttgactttcgtttctcacctattcaaaagaattctttccgcttcacacactttgtgaggggccttaatgggttcaacaaaagtgaggtccttttgcatatcgaaagcagccgaaaagtgccactcaaaacgttccatcggcgagtgccattctcacaaatagcatttgagaagaagcacacaaaaataacgaagtgaatgggacggcaaattggagatgtaataaatgtttctaaatccatgtgagtgagtaaaattgggatgggcgggcgccgcgtgagcggggggggggggatttagtgaagtgagtacctaaagtgtcgaaaagccgagaaaagcatggcatggcattagctaattactatgtgaataagtgttgcgacacagtgaaatagaaataacaaaatgagaaagaaaaagtatagtaaaaatatgtgacaataaaaatccaattaattaatcatttcaatgagtcaattttctagacagaagcattctggaagtgagacttttgtgaaaattgaaaatttgaagataaagtttgatttggaaaaaccttgtcaagaattgctcgacattcattcaaaaccgacatttctgtctgatcactagggcttgtaattatattgaaatccatatttttttcctggactgttggaggtctgaaacgcacgaaaaacatgtttttagcttagtttgaagcctctaggacggatttctatatccatattttccatatttaaagatttatgtccaatttccatatttgtccatattttagca

SEQ ID NO: 8557 - DNA, 1105 bp, Heterodera glycines
ttaattaatcccttattttcagctcgccgcattgacctttattcaaagcaatcgcaatttgtggtcaccggacgaaggggaaatgggggaaggcgatttgccacttgaaggtgctgggaataacaagaaaaaaacccgttaattaataatttatatttgaattaagaggaattggccgattgggtgcaggcggagacatcggacggacaattttactattggcacatttacacggggggtaagtgttttacattggaatagatttaggaaaacggaacttcatactgtaatattttattaagaaactcgttgggaacaacccgagaaattttacacttctgcccaatacgccgaacgttatgccaacattgtggaagagacaactgaccagagggaagtcggacagtgtgccaattccgcctacgatttaacacaatcatcggtattaaaaaaagttctgcaaattagaaccgaagaattacgaagaatttgtccatcgccggcacaagtcagactgcttgtcctgaactgattgacccaacttttgtgcaccaaatgactgttgccgaggtgaacaatcaaatggcatcgacaggacatgaagcgccacccccggtgaaaaagtactatggaatgagggaaaagcatggtaaaggcagcagaaattaacttacaattagaggctggaaacaggctcgctggtactgaggcgagctttttttctctaactcgaaaattccgggccttttaaaacggacttttcgtaagaatcccttaaaaggatctagccttaatcaaattagcaagcattactgttaacataggagaatttctcaaagttttccattgataattttttgagttatagaaaagctcggtttcagtaccagtgaacccgtccggtctctacttacaattaacacattaactattagtaattgtaaacaaaaacgaatttttttgatggtgggcgaccaaatgaacgacagacatacggcgaggaagacaaaagcaatgcccaaaatcaaatgctgacgagggatgaacggcggaagatcagaagagagcgaaaagcgatgagtgacaaagcggacgacggtaaaga

SEQ ID NO: 8558 - DNA, 4192 bp, Heterodera glycines
  unsure (1)..(4192): unsure at all n locations
ccttcgtttccagaggccaatttggtttntagggtattttctggccaaaagtgatcaatgacggtgccgtcgacgatattgcccagcaaacagccgtgaaacgcccaattcgatgttcacatcgacgtntcagaaggggcttatcatggacacggacaaagtgattctgatgcgtaaggtggaaatataaaataaaataaaataattatgaaaataattaggtgcgctcggatattttaatattataattaggaatatggtagattcggacaattaaatgaattctaaagtaatttgtttgctggaccgggttcattcattatttttaaatacaacttcatttagtgagatacgtgaacttgcgcgtaaactaaatattatttaagctcggacggaatcccacggggattgtcggggacccctacccttctaggggtgtgcgttagtcttggttctcgattcccgagtcgagaaatttcgggggttttttgggtctcggttctcgtatcgtttctcgcggtcatttctcggtctcgggctaaggttctcgattcttggtaaaaaccgatttctcgcacgatccctcccccccccatttcccaaaattccgggttttcaccttcacaaccatcgggcgcaatttttccattataaaaaaggtgtcacgctctttctcctccatgctgtccaatttttggatgatttcgtcgccaaagtaaacatttttggagcctctctttaatggtgcgacttcgttccatttcattacgaaattgtccgggttcgcttttaccatcttaataatttaaatatttatttaaaaatattaattttacccgaattatttcctccgcttcttcctcatctgctcctatgctccaactcttcggcataactttgcgcacttccgctgctaaatgtgcttcttctggcatcctaaagaaatgctccacaacgcccggcttggaaagttcctggccaaaatttaaatattaaactcagctaatccataggcgccgatacactccgccgcaaaaattttgcaaatttgaattcaatttgtgcacaaattttgtccaaaaaatggccaaatttgcgaatcttgaaccaattttttatgaaaagaataagctaaaggagtccggtggtgccgataggcgccgccggttaagttcaatttgttaacagatttttgtccgtaaaatgagcctatattgcaattttaatcgatttaaaaaggcaaaaaacgatgaaaaattgcaaatttctataagtgcacttgccatttttcaattaaaaaaaatctggtactgaagtgtcattggcacgggagcctataatttgcatctttctcatcattttgcgttctaaatcgattccgacttttttaaatggttttttgtttgggagctatgagacatatttacccaatttttacgaaaaatagggattttagtgtaaaatttttgaaaatgggatttcttaaatccttttgccccaaataactttatttcgagcgaattttaaagaaatttaatgagttttaatttaaatgaggtcatccttgagactttgcttttatttgtttttcgcacaatatatgtagttggctttgttctaaaaagtttcaggaataggggaggggccggcgggcaaggcgccgccggggaaattttttaaaatttggctctatttcttagcaaactttgcccaaaaaatgacaaaatttctctataaaacaatatgtaattcgtaaattttaagttttagccagggtaaatttttcacggaataacgaataaccgtgaattagcaccgtgaaatgtgatcgtgagtgaaaaaacactttaaatattattctcagcaaattcatttaaactaattaaccgcacttatttaatcgttaattaatccacctgttgcactttttttgaatgcgccaacaagaaaagtatattccacacttgctaaattagttttaacaataattagaaaattaacaatgaagtttcaatattaaaaccgcaaaaagccaaaattcttagagaaaaattgagcgttttacatttgattgaggcccaaacgaatgagttaaaatcgcaataattaaaatattcgtgtaaaatttgatttttggtttctcatgcgataggataagcgcaaataaaagatataaaaccccatccttaattataattatttttcaatttatttttttattacaatggcttttgagagtttaattgctctcaacacttcactattggctttagttgtcaaatcatccgtggcattgcgggccattgaaacggcaacagtgaatttgccatccaaaatcaaaaaattgtccgagttgagctttagcctttattatatcattttaaaaatcgaattaattaaatttaactaattcaccggtcaattccctcttccaatgtgaggaaaacgcatttcggctttggctttccctcaaaaatgcgttccattgcgtattgaattgcgcgcgcttcgacgagcaaaaaaatgcgaatttttgggtggacaaaaagaatcactgcattaggatcaccgaattcctcccttaagcaatgccaaaataaaaaagtaaaaaacaaataaaacatttatttattaaaaaaacaaggaataaccatttaaatgctgaagtataacctttaccattatcaatcggttgacttttaactcaatgacagattcggtttttccctctcctttctcttttcatctctcactctcttccccctttctctctctctctctcggtctcacgctctctttctatcccctattctttcccgctcccccccccctctccctctctctctcttcgccctttatctcgtatccactcatcctttttctttttttatctctctcctctctctaatctctctctcctctccatgtcgctctctttctctccctctctctcctctttatcatgagtcataatattctctatcttgcgctctctctctctaacctcttacctcctcgctcgaaacgggccagttgcgtctgagccaagtttagaccaccataacttttttctttgttgaccaaatccaacaatgttggtatcattcgaaagctcttaacaagctctatcggctatccaaaaatcacaaagacataccgacatataaaaaagttataaattaaaatatgcaaaaattctgactttttggtagtgttcatgttgcaacttttttataagttgttcaatcgcttagcaatatcttatcaaaagcttctaaacatgtagagctttcgaatgatgccaaatttataaaatttgacaaacaaagaaaaaagttatggtgctttatgcttggctcagacgcaactgacccctaccgtccccgctcccccccctgtctctctctctcttaccccttttctctctaatcccctcgtcctctttgtcactctctttttttgtcactctctcttttctctctttccttttttacccactctatctctttcttttccctctctctcttaaactgaccatgctctgtacattgccgtggccaacatttcgctggtcagattttccggcatcaccgatattgaattgtcaatgccgacattggaaagcattcggcgatgaagtgcggtaaggggctgaggagtgccgtagccgccaattgagccgccattcaattcaatcttaaacagagaacaatttcgttaaagttacaaaaaaaaaaaaaaatttccggaacgcctacaaaattccctaaaattttaaaatttgacctaacattggcaattttggtaaaataaaaaaaaattgcgtaatccagcgtcgctggaaaactttctgttgaaattgtcccaaattttcaaaaatccgcgcgcccgatcccgtgcccgttcgggctcgattagggctcaatttgtttacctgtttaagcgtatattttttctcattgcttttttcatcaatttcttcgctggccatataatcctaaataaaaaaataaatagaaaaaaaaccttttttttaacaattaaatcttttttatgttcattttaatttttaaatcatttgtctgtgaatataaacaaatttaaaaaagaattattttggataaatgtttaatccgcagagttgcgatttttgagccaatttaatcattgatgtcctcaaatcctaactaat

SEQ ID NO: 8559 - DNA, 1504 bp, Heterodera glycines
  unsure (1)..(1504): unsure at all n locations
tagtgttaagtagggatgggaaatttagataaataaaatttacggaatttaaaaatgcttttttcctgttcatttagtaattgtcagaataatatgaatttttgcagagaaataaataccttggtataaatattttctgcctgcaaaatataaaaagattttatgtatccaaaacgtttttataaacattcccgtgtttaataaacttgaaaatttcacggaaaaatatttccctgaaattttcaagatttaaaaacattactaaataaacagaaaaatcagcatttttaaattccgtgaatcttatttacctaaatttcccatccctagtgataagagtaccataattaatggcatatggcatttttttgccaagtcttttggggggtctgtgccgaaggcttctttttgaaaaatttaggcaaaatttttttaagttctgaataaatattaaaaaattaataaattcataaatttataaagttagaacggatttaaagcaattttgaaactattttcattaactttttctaagaattttttttgtttccctcaacgttgattaaaaaattcttcccccaattcttacagtgtattttaggatccagttggatccttctagccgggtagggcacctggattgcattttcaaaaagtcgtcttgcaaaggccgctgtattgagtctggacccggggcctaccccagtaaaattgttgtgcctaattgctcaaaagctaaaaacagctgaaaaatagaagaatatacaaacagttttacttgattttgttcaactttgtatgctttaaaatgtcatattttggcaatattttccaaaccattggcctaagtaaaggaattgagccttttggctttatttaaattcaaaattgcatttaatttttaaaataattcgagccccacgatgacattacaattaaagcctatggcatttgccaagtttttagggatctgtctgtattttcaaatatctttttctcattcttttctcgaaatgttggtcaatagttttacttaaattttgtttaattttaattttaaacattatacttcattgattttgccacatgcgtcacatttcagtttacttcttggcaccggaaaagtcagcccattagtcagtgcccaatcttttgcgtcgcgaattcgctccattaaaacattttcgtccctttcaatgttttccacacaatatttcacttcattggctgttgataaaaaaagaaacttttatttcatctaattttaaatatttaaaatatttttaaattttgacttttaaattanattttttcattaataaaattaccttgngtaagagtggaattcacaaatttgagctgaataattccgagaaagaatannattataaagttgcacttcatcatttagtttggttttataannatataatttgaatatttttatttcctttaaatancatttgttttatgggtgcagcttgggatgtgtttatctaaatca

SEQ ID NO: 8560 - DNA, 1590 bp, Heterodera glycines
  unsure (1)..(1590): unsure at all n locations
acaatttgtttatggtgccagcttggatgtgtttatctaaatcatttttaaaatatgaaaacaaacaggaaatgccaacattccatcgataaattaatggcaaatcgatgcatttccggactcggatttgctttaattatttattaaaatttatccatctggtgaaaaacccacaaacacaaaatttgcagtttaaaatttgaatggttaactttggcaaaagcatcggaaattcgattgcaaagatcgattagtcaaaattttaaagcggaaatattggcgagatcaacggaattcgattttggacaaaaactccggcagaagtgaagttgcaattaaaattgttggcacactttggtttacggcaactaaattttacattcttggtattgctctacagttctgaggattttactattttaaaaatagatacacagttgatgagggattatttgttagattcttcattttcagtttcttattatgtcatctccctttattaaagggtctaactttccttgtttttttttcatttccaatacaaaaagctcactttattgaggattgttctattaatgcttttcaaaatctccattttctgttggtcagtgatcaggttgctgaaaaccggaattaacttaagagaaaatgatcagtttgagagtaagccaaggaacttctcgaaaattatggaaaatatcgccatcatcgccttgttgttggatcagcagaacaagtctaccccccccccccttcaaatgttagccaccctttccccctattttcaccaattggcaccaaacgtgccaattagggcacatcaacggatttggcccttcgtcacctctcttttctcatccatcccctcacctgtcgctccccttcatcttggtcttcctccgctcccaatgtgcttattattagcattttgttctgcgccaacttttgcgcttgggtgcccaaattgcccctcctcttccattcggcgtcgcttttcgttcgatctttccccgccggccattcgcccctccctccttcccccatcggcaatcttcatctttttcatctgtataattcatcgcggtgcaataacttgtctattcttcctcttcctcctccttttctgcgttgatcccctctttctcttccttctcttgtctaggttatccggccctttttcttatcacttattattcggtttctttttcctttattttttccgtcttttgtcgattccattcattaatttaaattcacgaagtttttgtggttcggcattccgatttgcgattcccgaatttttctttaaatcaatttaaaataaaacttaaaagttcactagggtaatctgtaagaccgggaaagttagaatgtaacaaatttctaagtgatttggtatttcgacctcatttgactttgacctcaatttatttattatttattttcacatattttgtctttttttaattcctgtgatcatccatatattttgtcacttactctacgacatttatctgatagtcgtcagagtaagtggttctcgcccttctgatgacttttttattttttatgaataaatanataaataaa

SEQ ID NO: 8561 - DNA, 2775 bp, Heterodera glycines
tatgactagggtttgtaataatatggaaatccatattttttcctggactgttggaggcctgaaacgcatgaaaaacatgtttttagcttggtttgaagcctctaggaaggagttctatatccatattttccatatttcgtgatttatgtccatatttttccatattttggcattatgtccatgttttatgtacatatttttgcattttttcaaaaaacccctattagaacggcccccatcagataaattggcagttttgaccccaaaggccgtaaaaatttccgaaaagacattttttagcaaaattttgtcgaaaaaattgattaaatttaaattttcttaaaaattggtaaatttatgtcaaaaataagcaaaaatggaaatttttgattttttggtcgtttttctctagaaattgcttgttttcttctaaaaacgagttcttataccgtatttagccattttagatgtattttactagaatttaatgaatttgaaaaattttttttgaaaatttacccataacggaaaatttatgtccatattttcgccattttatgtccatatttcgggcttttttggtccatattttatggccatatttcatccatataattacaaaccttaattatgacatttttaattattgtcatttaatattaaaattctgcgaaagcatccattagaaataaaattaatttaattgggatttgtttgtgagcatgcgaataaaaattatgaataaaacaaaattaatttcatttttcacatgcgcacagccaacttttaaaaagatttacacgaagtcacgcaatgattttctaagtaccggaccgatttaaaattgtttaaatgatgaaacttttgtcatatcgtgtaaatgcaaaataaaaattattaattttttttgttttatcttaattgagactcacgcgatgattgaatgtcacaaaattttaagatatattgacatattaaaaaatttaatttttttcctttcacataattagggatacgatttttagttgctaaaaacagccaaaatagttcgtttttaggttacatgccaaaaatgggaatagttgctaaaaactttctatgcagggatggcagatctgaggctttagcctcatttttggttttttgacaggtcaatgaggctaaattttcaaaatgaggctttgaggctttttgtggttttttgagaaaaaccgcaaaataaagaatttttttaatgaaaatatgctaaaaatatggtcaaaattcttaatttttcccccggcggcgcctatcggcaccgccggaccgtaaaaatccttaatttacaaacaaaaatttgctcaaaatcgcaaaatttggtcgcattgaacgtgagggcccaactgacgtagaccacattgattatcttttgaaataaatattcatagcattgattgtggatagcgcagcgatcagtaaaatgctttatatcgtcacttatgcgatgatcagcgtgggtagttggtctagtggtatgattctcgcttagggtgcgagaggtcctgggttcaattcccagactacccctactttttaatattcaaaaacgcattcatcaaaactaatttttattttttttataaatgcgggatatacaaacagaaacagaaaatgccaaattggcaaagcaattaaaaaaagccgtaattatcaataggtgaactaaacatttgtagtgactaattggatgggaagctcattaagctcattctgctattgtggtatcagttgattttgatttgaaatttgtttgaaaacaaatgcaaactgctctttgaatgcttgtcgttactccgtactaaataaaaaaattaaattaaaaacttattttaaattttatttgcctcgttaagtataaaatgggtccgtccgttcgatgccgcaccaatattcagaagaattacggcgattatttgaccaaaccaagcagtgatttacatgtaaaaaattaaattcttataatttttacctaatatatatggattttttagcaaattattaaataaatttaataaagcctctttcagctctattaaaatagaaatttaaaaaaattgaatgcaaaaaatgaactctaaaaagtggaaatgcacttgaaatttaaattaacattttacggtaaaaaaaaactattaaaacctaagaaaaactttgagtcaaagtaaataaatagggatcgacaaacaggaatgaaacatgatatgaacgtgatgatgcatttcgagaattatttgacaaatcgcttaaatattattttcctctaattacatttcttataaaatttattttatgaaaatcattaaaattttatatagaatcatttgaatttttaaacgaatatgcggctaatctgaatgaatacctttttagtaaattttcccaaaattactctctcacagcttatagtaaaatagaaaaaaaacgcaaaaattaattattatcatttttcgattaaaactcttgtaccgatattcttgttagatctttatgtatttttactcttcactcaaataattacatataattattttgtaagcaattttttttatatctgagtgcgtccatttttattacactgacgaaatatgtgtcaaatgatggaaacgcgcgtaataagtagagaccgaacttaaaaggcaccaaaattcgcgaaaaaggcactataataggcatcaaaaattgaaaaaatggcatgaaaggcaaatcccgaaaaaggaatgaacatagcatttaaat

SEQ ID NO: 8562 - DNA, 2958 bp, Heterodera glycines
atactatttaaatattttccaattttaattaaatttaaataggattattttttgaaaagataaaaatattatttcaaaaatgttgacttcttagcttgggaacctaacagagttatcctggcaaaaataaaatttttatttttttgtggtttacaagcaaattaattttttttttaaattttaatttattcattcttggttattgcccatcttagtgacttatttttttgaaatatattttcatgaggctcgtaattttgtagccaaaaaatacgaagttttcgaggttcgaagcacgaatcttaaagttcacacagccctggtcctgatcttgactttatcatttatttcgttagtcatggccaacttgccggctcttaaatttatgctcaaattgcaaaaatcaatcgtaaaagaaatgataaactcattaaaattaaacttttcggcagttaagtagtcgcaattatttcaaaaagtttttgacactttttccttgacatattttccctgacaaagaaacgtgtgattttttacttaagcatacgtgtgaatttgcacttaataatggggaaatttgtgttaattgtgaatgaattttctgttcttcccccataatttgtgccttttgaatggggctgctgcccttacggctcacacttttgtgccccatttcatttgcgcctcataagtatcaaaatttgtcttatttaatttttatacttcagttcattaaaaacaaatgttttaatattttgaaattaatcaacttatgcaaacataaaaacatgaacacaacggcaccaactgacattgacctgtttctttttttcctcggcggtgccgttgaactgttgaccaattttgttggcattccgttatccattgccaatttgattttggtggcacgcacatcggtcatccacccgaacatgaaagccattctcatcttccagagtctctttattatcttggtaaattaaattcaattaaatcaaagtatttaaataaaaaacaagaaatgattattattctaaatttaagcgtggttcctgtcgttttgtcatttgtcttttcaagttcttcctttgggacccaattggtgcagaatctacgctatttttcccggcacttttaaaaatgtatttcattggcatttatgctcgtaattttgtgccccatgttctggtcgttgaacgcattttgtccactttatttgtccgaacatatgaaaagaatcgtggcaatctgttcagcattctgtggatgccttttgcggtgagataatcgagacttaattgccaaattgataacgaattataacgaaaaagtatcttcaaattcaagtacaccaaaaggaatttttgaaaattttgttaagcattaagaatacataagcgatcaaaaattctatttgcagttgatcatcccaatttatattgccaccacaacatcttcaccgcatgatcataaccaaccaataacgaatctgatcacaactgccgtccaattgctggtcggaagcattgtgttaggcattttctaccaattaagccgatacaattccaaaatttatcaaaaaatgttccaaaatattggctcgaataatctgtcaattcgttatcaggtaatccatataaattaattatataatcattatttattttgaaagctctctgaaaacattcgcattggcaaacagctaataccgccactgtttctgaatttgggcaacattttcgcgggaacaatgattttattatgggactttcttgatttgccattttatatttatatattcaatttggctgcgattatcaactcaattttcggccttcttatcgaatttttcattataacgtaaacaaatgtaaaacttaaaatattaatttaatttaaaagttttaagatgccatccatttttgaatagggatttgtgccaatttttgaaccgtattggtaaaatgtttggatttaatcatttggcctataatcatcgaattggtgatgcaactgtaacatttggcacaaataatactgctccttctttggctgctgtcaatggcattgctcaacggaatttgatcagcggaaaagcattgattgataaccaaacaaaaccagaagatcattttgccatgctgaaagaagcatgggagaaggggccgatgaaatgacaaaatgccaattcgcaaaattaactgaaaaactatttaacatttttgaatttccgttgtgaattaatgcatttattaaaaaacggatcatttgagatttacatgaaatgccaaaattattttccgaataattcgatcataattgattttctggtgaaacaaatggagttttcggcagtggccaacccaatcaaagagagtgctcaattggtacttcaaatcatttgcaaaatcagcagtagttgaacatggcaaaacatagctacctaccgtaaattgtccgtaaaaatggtacggtagttgatagaattaaaaataagttaatatttgaaattttttactgatattagtgcagtaaataagaaccgaactcagattgattaaattttggatacatttgctttttccgttcctgctaaaatataaagttgagcaaagtgtaatcaaactctatttaaatccttcaatttggttaatttagatgaactgaattcggaccaaaagcaaatgaaatgggtcaatttaatatgtcatttgaatttgaatcaccatcggtcgatgaccaatgacaacaaaacttttttggcaaacacaaaattaaacgcaatgcaaaaaaaacaggaccaaatcaaaccacatttggtgtgaaattttttaatttttttaatttaaagaatatttttaagagggacgaatttgaacattttaaagaattggtgagcaatgacaattttctgcgcacaacaaagaaatatggagaaatctttagtttctgtaagaa

SEQ ID NO: 8563 - DNA, 2400 bp, Heterodera glycines
  unsure (1)..(2400): unsure at all n locations
aaagcncattttcgactcaaatggtcaaccaaaatttgccattattaatatgcaattgataaatgtttttttcgcggtgtcttttttcaaaaaactttgggggcggtgcaattttttaccagcagtaccggtactagaaaaaccagtaccgtattttttcattttaaagaaactagtatcggtataaaaaaaccggtgattactgtattggtacacttttactttaattttgaaaaatttattccagctttaataaaaataataaaataatttactctatgatcaaattcaataataaccaataatgtttgaattaaggaaacaaaataattgaaaaaaccgaatagaaatgtgttttgttaatatttaaggaggagaactacagtacatatttcaataaatatgataaaatatttcttaatttacaattaaaggaaataaaaatttaagtgaatcgaatgaattcttatttggcacagattatttttgaaaatgctccatctgagaatattcgcttccaaattcagacaaatgttctcgcagttgcgcttgttgatcctgcaaaatgacaatttctttttgcctttctctcccttttattaaaaatttaaatggttaacagaaattgcattctttttttgtagttttctacgattatgaaatgaaaagtatttttatttttcaaaattctctctttggcacatccctttgctaatttacccccccccccccccctcccccaccttaaggtgttttgggatttctgcgtaaacgtcgacaaataattcctcgggcgctctctttttcaatttctccgccttcgcaaatgaattcatcacttctcgccgaacctccaaagggttgggaatggtcacttttttcattcctttaacaattatttcactaaccgtgccaacccattgtttatcttgcgcatctaacgaaatatgtttttgtgaatggataaatggcaaattaacaaaatgcaaagcctaacaaagaacgcaccgtcccaccattgacgccgttccaaaaaccgtcgaaagcgaccgatcggagggtccaattcggcccattctttcacttcttccatgggtctgatcagtgtttttttggataaccaaaaagcgagcggaagagaaagaaaggaccgataagcggaggaatcgtcggaagttgagtggtggccgacgcggtaagtcattgcttcgatcatcaccggattgttctccaaggccaactttcgggcttccgaagtgactttgtacacggcgaacggatcattcccatccaccctaaggcacaaaggcaaacaaagtcattttgaaaaccgaattttaatacgaaaggttaattatattaaatcaaatttaattctcctaaagttaagagagatggtttctttaatttaaaactgtttatgaaaaactcagatttgaaaaatttttagtaaatttccggggcgaaaatgttagaataaaattgttaggctcctctaatcaaagattgacacaaaattccttatccaaactgagtttccaaattcaaactcaccccccccccctaattgaattctcatttcaatggattttctaccgaattgtgtgcattccgtaaccaatgcctttgccggcaattccatcgcccgcgtactgttcagaagcgggtgtgctaatcgcaaatccgttgtttcgacaaaagaacaaaacgggacaacgcttaatgatttcgagagagatagctaatcaaaatttctgtaataaattttgtttttttcacaattttccttctttcgcaccaatgcggcagcgaaattaaacgccgcgtgcgcgtccccttccgacgcggccccttccccaaaataaacgcagacgacgcgtttctcgtcagccgatcgttgcgcattggccaatttgaaggcgtaagcggtgccaactgcttggggaagctgagtgccgagcggagaactgatggtgacgaaattcagcggggaagatccgtaatggacgggcatttgtttgcctttgcctgaagaggagaaaatggcacagcaaaaggagacaaaaaagaatttggcaaagatggcattcaatggactgtcagtttctttcgaaatgtttacggaagtaattgcgtaaaattagcatttgtcgggtttattttcgtgttgttttgctcgcccaccttcgtccaattcgttcccatagcattggttcatgcattggtccaacgaaaagccgcgccacagaaggacgcccacttctctgtactgtccgtagaccaaatctcgaagttccaacgcggcggccgagcccatgtgactggccttttaatgagtcgcctttgcctcccaatttcttttacctcctcgccaaaattggtcatataaaatgaaattcg

SEQ ID NO: 8564 - DNA, 1952 bp, Heterodera glycines
  unsure (1)..(1952): unsure at all n locations
aaaatgggtcatataaatgaaattcgtcttgcnngttgcgattcatacaaaattttgtccattgtatcaatttaaccatttctttgtatattttaactgcaatgtcctgaaanagagaattctgttggactttttcttattaaaaccttcggcagaggacactcttcgcttccgtcaacaaattctcctcgcgaattaatgcattggtaaattggcattggcacttcattggcactgcttcgaaattccaatttctctgtgaacttcacctgaatattgctgaaattaattaagtttttgtaggaatccattaatttttgggaagttcttatgaatatgataaaaataacatattaattgtccatcaactgtttgttgctttttctattagcagaccaacttctcttttgccgaggtatttttggccaaattcgcgcaatttgaattcgtctgcatttccaatactttgctttgatccgatggtgctgttttcccggtaattaattccacgatttaatacaaaattcggaggaaaagcaatggtccgtaataaaacgatgtctcggaatttaaataaattcatcataattaaactttagccaaaaataattaattaaaaaattattacctaaataaaaatgattaaaattctcattaatggcataaaaactaaaaatttaatcatataattcaaattaaagtgaactacggtagaatcgagagtcaccgaattcggtatacggtagaaaacagaaaaacattatttttgatatttaaaataaaatttaaaattattctttctaaaatactgtaccgttgctgttgcgcagaaagaattgcttaagtaagaaaagtcacaaaagtaaaacaaataaattaaaggcgcaattcgccattttcgaaaatgaaccaagtcgaattgtgagaagttcttctcaccgtccgttaatgtcatcaaatgattgactaatgaatctaaaactgctcttatccttcagaaatgtcacttaatttctcaaaagactcagcttcacagattcccaactttcccgcctcaaattctgacgacggggctgagtcagtggtccgatattaccagggaggaacggacgaagtgaaaaatctgttgaaaaacgaatgttccgttatttacgagtgcaggtcggtgatgggcagccattccgctgagaaacgatgggcttttcttttctcatttcgcccttttttagctgttgtcggtcgctgtttcgctccatcatcaattttgttgcacacaaaagaacgatctgtcgcactttgctttcttcaatacgaacagagcaggccgaattggtccgggacagccaaaaaacgaaccaaaaaggtattcgaaatggaaaaataggggggggggataaagaagtcgaatttggtgggggagaaaagtgacggtgggaagtatctgctggggaaaaagtgtcggcactttttttaaagaattcgcaacccatccccatgggtacgtccatactttttcggcctggcatttatcgcgttggacaaaagttagtttcaaaacaaaccaacccaaagaagagtatattttgaaaaattttgcaacaaatttcattatattaaatttaagaaaaatctcaaaattgttcttttttgagcctacctgcgccattctcgttttccaatatttcttattagagttcgacctggacctggatccaggcctggatttttcctggatccaggtccaggccatttttcggcaacctggatttttcctggacctggattttcctggatttttgtccaggaaatccaggtcaaatgtgaaaaaaaatccaggtccaggcaaaacacgaaaaacctggattttcctggacaaaattttagaatttattatttcaagtgaccgatgttttttttcaaanaaatgattaaatagattcaaaactcattat

SEQ ID NO: 8565 - DNA, 1346 bp, Heterodera glycines
  unsure (1)..(1346): unsure at all n locations
ttttcctggacctgcattttcctggatttttgtccaggaaatccaggttccaggtcaaatgtgaaaaaaaatccaggtccaggcaaaacacgaaaaacctggattttcctggacaaaattttagaatttattatttcaagtgaccgatgtttttttcacgtttcaaaaaatgattaaatagattcaaaactcatntattattattaattagatatttttagaggtttataagcaattaattgattttttcaaacctttttttgatttttaaaatgagtttcaaaaaatccaggtccaggcctggatccaggtcccgaggagcctggatttttcctggacctggattttcttggatttttgtccaggaaatccaggtcaaacatggagtccaggtccaggcatttttcaaaatgtcgagctctatttcttatttatttatttttaactattcgggataaatttattgtagagtgcagcgggaccgggaaatttgggcaagaccgggactttttggctgggaaaaccgggaaaaaagccgggaatttcccggtcccggtcaaaactggtcaaaaccgggaccttggtactcagttgtccgtgttcaggtcccggtcctgctgcactctaatttattgtaaattatttattttcgttattttttattttattttagcctattataaatttttctttaacattttggctttaggtaacagtgaaaaggactccgattcggttaataatggccaaagaaaagttgcgaaagccaatcgaaatttgaatttgcggcgtttcaacccgacgagcaatttggtgagacacatccgatcagtgaatgtgcatttggaaaggacaaatgtacgaaagagtgcctttcaatttgtttttccagtttaattttctcatttttagacggacgtcgaagtccaaactttgccgaaaatcgtcagaaaacctgcggagaccacaattgtcgacggaaaacaagtttcttccattggcgcatttttatttgttttttgcttttttcggtcgttgaaaatttgccatcggaactttcgacactcaaaaagagtgtgccggagaatcgcgttgcgctggtgatgccgcgcgagtgttcagtccgttgtggagagatgcaattgcgacgaaggcgggggacgcaaatgtccaagacgaggccaaatgagggcaaagtttgcgaattgaccagcgaagaggtggcggcaataggggggggggcgaatggcaaaaattagcaaaatgccattggcacagattgaaatcatcgaacgcattccgtcagcaatgcccgtcgatttcaccacaaatcactgcgaggacca

SEQ ID NO: 8566 - DNA, 1516 bp, Heterodera glycines
catacagttgaggtctttaagaaagatgcattacgtccccaccccattcacaactcaaaaaaaaattaaaaattttttttttaaattcaactttctaattttgtagtaaaaaatacattaaaataaattcaaaagaattttagcaaaaaaaaaattttcttcgattttttataattattattaacttttcatttttcaaaataaaatctatttttacaagaaaaaaacactaagaaatttggtacggcaggctgagaggaaatgaattgcttctctccattaagaaagatttattggcgtgtttaaattatgtacatattagcaataaagagaagaaaacaaaattgtttcagcgtgttttggtcatccaactgctcgatcagatcggtgtgcaacagaaacatcggcctccattctgaatcgctttttttgtcgaatttttatggtaaaataaaatttttatttatttttaagtcctcattttttaaagtgtctcacccattctaattttaaagaccaacagataaaaaatgaatgccaaatgaaattgacaaatggttaatggttgttttttttatttaggtatttataaaatttcattgtaaaattatgtgaaaacagaaaatcaagatttaaaacattagttcttttaaaaatttaaaaaataaataaattaagaaaagataaatctaaatcttgtcataattaattcgacctcataagcattcatcagagatgaaggcttcgaattcaataataatacgcaatttatgccaaaaattttaaaaaacattccattttttattttccattcttaataaatttttcgaaatttgtttaaacatttaaaagagaaaattaaactctctaaaaaatttctgactatttaaaaaaaatgggtattatctgtagggatgggatttttaagggtgaaaaagtccaaaataaggccgtaaataagggcgaaaaattcgcgaaataatggcgaaaataaggtcgaaaaagtttcaaatttagaggtgaagttttcaaattgctgttttttacatgaaaataatttaaaattaaggcaaacaattttattcattgattgcagttacaaataaggtacatttcaaaattttcgggggtaaaacgcatgcgattatcagctaaaatggttttgtaaatggaaaaagatcgttccacgtcgcaagatgtcaatggagcaaatttgtaaaaagtgatgaggtttgggggtacatcagattcagtgtttttcccagacagaatctggcaaaattgggacatttttcaattccattgttcttggccacaatgtccgagaattttttgcgaatttcggttgccttttcgcctttacctcatgcacatgagttggcggttttaagaagaatccatggcggttttaagaaacgcccaatgtggcggtttttaagaaacgtcccagcaccatttaattatttaattattgtttaatgttgctttgcgtaaattattttttattaatttttgt

SEQ ID NO: 8567 - DNA, 2779 bp, Heterodera glycines
  unsure (1)..(2779): unsure at all n locations
atgcggtgctttcagaaatattgcttttgttttgcttatcaatttgtccacttgcgcaaactcgtcacgactttnttcggccacgcggtgcaatgcgtgacacaaacatgtcacatgcaacaaattggtgtaaaaaacctgaaaaagagaaaagatttatttgaattttcttttttctaacttttaattgtcttccggcctttttcatgtacgcagccccgtccgtaaccaaaaacagcactcgctctttcttaatatcagcagaaaaactgtctaaaattaaaaaatatctaggaataaaagctaaacgactaccaaggccttcattaacaaaactcgctattgctccactgtccaccttttcaagcgctttcacagaaattaaatgcggggggggggggtgccattttttgccatccaatttgcctaacaacaaattggcgatcattcgccccattttatccgtagtctcgtccaccgaaatccagacaaatgcttcaccaatgtcttccttaatttttgtcattgtctaaaaatcaaaattgaaaaaattttttgaacaattttggaacctcagaaaaaagttggaccaaataattttttagaagagttgactggtctggcacggcgtgttgacaatacttttccaaaaaggaacacaaaactgcgttgttcagcttaaaaaatggtatgttagcagacacaagtgctttgcaaaggtcggcagaaaattggtcttgtttattttcttttgttgtcaaaaaaggctgatgctgaatgcttttctttttcgaaaatcgatccaaattcttgcgatgttttgccgtttcattgtgttgctttaaatcccagtattgcgaacatggaatctgtgaaaaatcgtcatgttgctgccgttgttattgcaagtcgtcgttgtctttacctgctgttcgcaaacttgacaaaaaattattttgccattgtcggtataaattgctccgccgccaatttttctgatccagtcacgaataaatgcagattttgattgaattttgggcattttagttagatatttcctttaaaagtatggattatttggtatatttgaagaaaattagtgaattttccttttgtaaattaaaaaaatcgcgaaataagggcgaaaataagggtgaaatgtcaaaataagggcaaaaacttattttaagggcgaacacccaaaataaggatttctaaggtcgaataagggcgttaaaacgcaaaatttttgaacaaaaaatgtgtttttcgtgcatttctcgtcgagttaaagccgcagaaaaaataaggaaaaacttaaaaatcccatccctagtaatgagtgctcttaataaattaagattgtattttcttagtatattaaaatatttttgaaaaataccaaagaaaacaaaaattatacgaaaatcttaatttttttttggttattatctgttaaaaaatagagcctaaatttcaaaattcgcccggcggcgcttatcggctccgccggccccaaaaaacttttttttttaaatagcccaaaagctctaaatttggtcattttttagacaaaatctgttaacaaatagcattaaaattacagaaacattttccgtcggcgcttatcgacgccgccgaacccccctgtcccccaaaaaaagttcttttaaaaacaaaaaaagtcgtcgacttgctataaaatcgcaaaatttggcagttttgtgagtttttaattaaattttcgaattactcccgctcccgcccgggactcccgttaaaattggacgggattttaacgggagcgggatttttacgggattcccgttcgggactcccgtcccggaaaattttcaactcccgatcccgctcccggaaattttttttttaccggtctctattataaacattagtatttgttattctaaattttaaaaatttcttcttgccattttttattttcttttttttgcaagttttcgtgtcataaataatctctattcaaaaaaccatcgatttagtatagttagattaattaaattttaagttttttaaatttaccctaattatgataattaattaattaaattctttaattctttaaattccaccttttcttcttacaattaatgattttttaatcaaattatgtcaattatagcagatgctgtatccaacggggggggggagtccgaatacaaatttacatatatccatctgatgagggtttatttatctctgcagatggggattttttttgaggatttttaaggctgtccaattaagtccatcacaatataccgtatttattcgattagagccccgggggctctattttatttatttatttgccttttcaatttgatattttgccaacttcattacatatgtgcataatttgttgggctcaaaatgatgacaatcggtggattggatcggccgatcagcagcagtccctttttcactggcgattggttcatttgttggtggtccgtcgtggacttggccaaatcatcagaaccaatttgcttttgctatcccttttttttcttttttttgtgccacgtatccatttgtgataattaccaccaccaacatttgcttggctctagctatcaatctgttcattcattcccatttaattgggatgggtgaagcaaatgagttggggttggccattagctaaaattatttttactaaaataattagaagccctccccttgaaatataagctaagccccctattggggggggggggggggggggggaaaaagaaaa

SEQ ID NO: 8568 - DNA, 2452 bp, Heterodera glycines
tcgtttcggcgccagcccaagtttttgggctataacttttttcttgtaatccaaatccaacaatcttggtatcattcgaaagcttaacatgtttagaagctgattctaagctatcgcttctcgattcgacaattaccaaaaaagttctaaattgaaaattgcaaaaaagtcgaaatttttgaagttttttctttataactttttttacaggctagaaaatctttttgctttttgtaaggctaacagagcatgtgaagggctttctaatgataccaagttgttggatttggttgataaagaaaaaagttatagtccaagaacttgggctggcgccaaaacgtcggcgccgaaacgacctagtccccccctgaatgagaagctccccaaacagaagcctcggggcttacattttagaaaataaaaaatattaacaaattttcaagggttgcccactaacaaacgagcagccttttaactttcttatcagttcattgttttcattgccactttccccccgtgtttttgctgtgtccacacatttttgccaccgctcccgcacattttgctcttcttatgttggcatttttttaaataaattaaatgttttacacatttttttcaaatacagcctcacccgtccgtgtacaaactaaataatcaaactacctaattagtatcataaaatgttgccccgttttgtgtgcccattcattgtgatgtttttgctgatggctctgttcgacaacagttggaagtgcagtgccgacctgcctcctggtccttttgaagataaaacaactgtgcgtccgaccgtgaagtagactgccaagtcgggtgccattggtggtgtgcgggtgggccagcagttgttgcttttgcccatgccgttgttcatcgcgctgtcgctggcgggtaattgtaaaaaccgtatcatattttctctattaaagcacccttccccctcagaagggttcaaaaattaaagcccctgtgggctttattagaggctaattacgataattttattaaccatactaattcaatgtgtatgtcacgcagtttatgctgttttttgactaaaggaagaaagaaagggagggaagttggggtgaaaggaaggaagcgagagaatttaatgaaaagagagagagaaagagggagaaaagagagaaacagggagagagtagagaaagagagaatggtagagcgaagagatgtttagtaaattatgacatagagacaaaagaaagagacaggaagagaaaaggagacaaagaggagagaaacgagacttggatgaaaaacgtatttattaattaaactagggttgcaaccccgaccccgccccgaccccgaaccccgacatttttggccattttcggggaaaaccccgaccccgacgcttcataccccgacaaccccgaaccttaaccccgatcggggtcggggttaaatatacacccctaagaatggcattttcgtgggagaaaatgcaaaaaagttagacgaaatttgaatttttttaaccatttgccaaatttttattaaataaagaagatttgctcaattttggacatttggaatgtggtgtagaggttagtgccattgagattactttctgtcgtgagttcgataccgtttgacgttttcttctttaattattttctttgtgacaaattgtttttttaaattaaatactcatagaaatcgaccaatcttggcatattttgacaaaatacatatcgaagaaaaacaaaaatttaccgaaattcataaatttttttggtgaaaaatcttagaaaatagagcttaattccaaaatttagcactgcctatcggcatcacagggcccaaaaagtcataaaccttattaaaaaaattggctcaaaatcgcaaaaatttagcatattttggacaaaatctgttaacagatctaaccaaattttcaaaattttcccggcggcgcctattggcaccgccggacgccgtaccctttctccttaagtctttagaaaagagcgacgtgaaaaaagatgttttggaaaacaaaaaggtaataaaaaattttaaaatttcaagaaaaaaaaattaattctatacaaaatttctgataaaaaagaaataaaaaaatataaaaacaatagcaaagtgtagagagtgaggagagagaaataattagagaaacagcagcaaagagagagaaagggaaacagagagagagactgtgggagtgaatgattcaagagaaaaatgagagaaagaaagagagttggagagagaaagaaaaaaggagcgagagagagaaagagaaaagaggagagagagaaaaaagttgagagataaaagaggtgagagagaaaaggaaaagaagagagaaagggagagataaagagaaaaagagaaagagaaataaacgaggagttgagagatagagagaaaaggagagagagag

SEQ ID NO: 8569 - DNA, 5375 bp, Heterodera glycines
gcgctgacaaatgagcacgaatatgaaatccatttttgactttgtttcgaaccccaaaccctgattcgaacaattttttaatttatttttttacttaaaaataaattattttttaaaaatcatctaaataaaagtcttccctgaggttttcaaggtcgctgatcacgaataaggtatccatttcgaaccccggaccagatttcgaacaaagtcgaaaatttaaatttttactttatgtatgttcgaatctacataaaatgacttatttttgccgctaaaattacatgtgatttattttctgctagttttaatcaattttagaataaaagtgcgaaatcgaaaaattgaattttcgactttttgttcgtattcgggtcctggttcgaaattggtcgaaatggatgtgatattcgtgctcagcgcatcaaataacccctaaaaattgtttttttttaaatttttattcttttttttctgggaccaataatcttcacaattgccccaaaaagtaccgattggtcaaccattgacaacttaataatccttaataacctcaccgtcatgatcaacaagccattccaaaacacgtcgaaatgtctccgcgtcaatgttttccatgtgaaaagtgaatttgcgggaacggccattggtccctttctttttgcttttgtgctcctcccaaatccgcttgaaatgtttgctctgttgcactaaaacaaaaaagccaactaacaattaattattcatttggtttaaaacaaacgtactcaaataccaatccaccaaatgcaattgtccctcggatgttttgcagttcacttttcgggcctaaattataaggatatcacatcctttcttatttccgattttctatggtttaattgcctttgctttttgcgcgtcattttacctgaattttgacgagtggtggcaatttttcgtcgtcggggtgttcaatttcgaccatcccagcggatccctccgcgtctctcgctccgtcgtcctccccattcattttgatttccatcgttcgcgaatttattgttcctttagcgattgtcttcacctaaaggaattcaattcgcttcgctgtatcggaggctttttgtattatttcacctgttttccatttgttagtttcgcttttagtgaattcgaactttgcggaacgatttcatcttccaatggcttaaaaatttaaattggcaattttgtcaaaaaggagcaatattttagtcgttttgtttattagtcaccccattcgctgacgaattgtcttcggtcacttttggcgtacagccacaaatcgcatcattttcctttcttaaattaacttcggagactgtcccaccacttttgccgtcctttgtttccgtccccaacaacccttttaacatcccaggagttgtcttgaccagactttttccaattagcgtagcagccgcccttttgtgttgtaaatctccatttttcgttgcattaagcaaaaaatcccgggcattaaccatctttaatttatccatcctgcaataaaaataaattattggagcggaaattgacgagataaaattggaaccataaaagaaaacccatgtttttcttggccaaaaaaatgaaaaataaggagacatttcgtcaataaagtttttttttgtttttcaaaagaaaaataaacaaacaattaacttaaagataggctttttcctttctggctttgttcaaaaacttattgttcttttctgttttctaagatggttgttggattaaatcgaaaagattcaagcgaaagtcaggagcccggtcttcatcctttccaggtcttcttaatttaccaaaaacaaaagaagtggtaaagttcgtcccaaaattaatctcttccgttcttcactttccattcatgacttttcctcattaagtatgtccaggccggtttctttacgggtgtcgccacaagggcgattatacaaccattcgatgtgctcaaaatccgactacaggtggacttacacacacaatggctattgcagttcacacgaccataaaataattaaacaacgttcatgcttcataactttttctagaagcatccaaattaaacattcttagtgtcctttgacagcgctaacaataagtgtcctattcaaaatctttgttttctaaacatttttggccataactttagaaacaaaacgaaatttgaaaaagttatggcacattaaatttgccaaattattttatggtcgtgtaaactgcaataaagcccaatcaatgataaatgccaaaatatcatttaatttagcttcaagaagaacctttacgtgggaaaagtcgtggaaaatacagtggaatttttcaatctgccaaattgatttaccacgaagagggaatcgcagcattttggttcctaaaaactgtaattcgaattcccgcattttttaaggcgtggtcatatcccagcgcaaggcctctcaattgtctatggcaagtttatttagaattttgtaagttggaatgtattagttattaaatttaaattatttttatctggagggtaaactctctgacttattgttagccttgtggtgggacgacacccccccccaaccttcaaaaatctttttatggtcgattttttggtcttttctctttgctgattgtctcccattctttcggtctggtacagttttgcactttcgagctgctcaccaaacaggccggcgacttcggctttcacaatttctcaaaatcagtcgattttgtctgcggtgcctctgccggctgtgagttattttggcattttcgccgttcatttggaaaatggcgctcttttgaggtttggccaccacttgtgcaatgccttttgatgtcgttagaacgcgaatggtggcacaaggcgcccatcggacctaccgtaacatggcacacgcattcatcaaaacgtggcgttatgaagggccggcggggtatttccgcgggttggtcccttccctcgtgcaaattgcgccattcaccggtctgtcatgcccattcggaattcaaaggaatatttcaaaaatgcaggtctccaattcacattctacaacttggtcaatgtgtactgggacagcatttggcagggcgacagggaatccgtcggacgaattgtgtcgggatgggtggcggggatggcggccaaaacgataacggtgtgactgcttcacatttaatgcaaagggtggtcaaaaaggacccaaagcaacaatcaattgagaagggtatcgaaacattctcccatatgggcccaaattaaatgcaagtggcgcgcaattaaggcgacaaaaccaccattctttttcaaaaaacattgactttctttgttaattttcttttgtcagtatccgttcgatttggttcggcacagactgcaggtgaaccggcacattcgcaaggacacattcggccagaccacttccgacgggggcatgctgcgcacgtttgtgggcattgtcaaaagagaaaccgtctttggtaacacatttttttgtttaaaaagaaccccttttcccaacgcaaatcgaattgtcaagacctctaattagaaaaatacggagaggcgatcagagagtccttttttgcgatataaaaaaagttgctctaattttcaaattattttaaataatcttttgggggtaaggttttctcagagtgtattccttttttattttctaaactctttgaattcacataatttaggtctgttcaaaggtttgtcccccgcggtgctaaaggcagctgtccaatcgtcgttgtcattctttttttacgaattgatctgcgactttttgcgtactgttgcttgatcttcttgttaattatttattcattagctcaattttcatttttttaaatctattgttgctcttattcggttgtacattcaaaataactattttcatagtaattatttgcatcgtttggctttaataagtactggtagatatagaaagggagctaccatagttaaaattaaaaattcaccaattttccccctccccatctaaaaaatgcaactcggagacccctaatcatttattttaaataatatacgcgaaaaatggcacataatttgtcggcatgacaatgtttggtttttgactgcttaatcaattgtctttttgtgtctgtttttgcattctctccgttccttcgtttcaatttttgtccaaaaacaaacggacaattcgttctctcacttccattcgttcacacccttccgctgaacatttgtaacccatcggacaacacttttggctttccttgcagcaaattccctaagtttgatggatttgtctttttttttcgttttttgtctgtcgaactttgctcaacggacaacagccgaaggtcgtcgtttgttcgccttcatttgtcgggagggagtgggcacagcaaatgtccgtcgatgaaccacagaaagtgccgtcggggcattccgttggcatttttgtgccgtggaaacgctaaaatattaatttgcaattttattacattaagttttgccagtttttgtactctttttgttgcatggtgcgtcgggaacatttgggtggaaagggaaatgccattctgttcactcacacaccgttcctcctcccgcgcacatccgaaatcaattcattaaaaagatttggtggtaattagtcgggtcattacgcaaatcccgcggggcaacaatgggccgagtgggcgcagcattggccgtcctcaaaggggcagcagccaatcttttttctgttctctccgtctctgtggcgacagctgaaccaaacaaagggtgtggtcatcaatgagccgcttcttcctttgccaattccgaccatttttcgttccgttcgcagatggaaattcgctggcgatgggcggcgctgagcgatccgatggaatcgccgcaaatgcgtgccgggggcgccgtttcctgcgccgacttaaaatgggcaactttggcggcagggacctttttcatcggttcacttctgtgcactttctagacaatgataaatgagtttctgttcgctttttccttgggttccttctctgtcccctctttttttttggcattttcccatttcccaccgcgccttcgcactcgccccccctcgcgttgcattgcgtcccgtggggacagcagtggacgtggtccgcgcaacaaacggcccgttcagctgggcagcagccgtaggatatcgaaaacggatgaaaaaaggatgccaatgagtgagcttcttacgctttgctgagcgttagtttcgagtcgccaaaagtcttttcgacggcgtccgaatccgtcgccgagcggacaacacgtgggcacggggaggacacttcgaacttccgtc

SEQ ID NO: 8570 - DNA, 5140 bp, Heterodera glycines
cagcagaatgctgttgcacagcagctgggttcttttcactgtatgcccctcccacccgccgctgccctcgtagaaagacagtcagacagtgcactatttcccacctttccctccctctactttttttcaaattcatttttaacgcaaaattcaaacaaaacgccacaccaattcaaaccacggacacatacacacagacactcaactttaatatataggatttcccgtttccagcatcactacagaattgaccgattgtgtcatagtgaaaacaaattctcgtcagcagctactccacttcacaatccgttctttttctccctttgccctttcaattccaatttgtcatatttttgaaccatttttagcaaatgggtctttgtaagtgcccaaaaaggaaggtcacgaatttgttttgcttcgaacatcgcgtaaatgtgtgcgaattttgtctgctttcgaatcacgaatcggtgctcttttttattctttcttttttgcttaatgctcttttagtgtgtcgttcaaacgtacctttcttggcttaccgacagtgattatgatgccaattgtttgctctgtttcggcatgtttttgttttttatttttttagctttgaatttcagaatcgcttagctccaaagagacattgaggttgaggtgtcttcatttattccactgggactgctttgattcgcgggctcgtcagttgccccaaacgacggctcccgccggtaaattttgctgtgaatggattgatttgactttatttaatcccctctttcaggttacaaatgtccgagttgtttggtttgtatcattttgtatcaattgcagtttgtacgaccataaaattaaataacattgtgcttcctaaagttatgaagagttaaaattgttattttattttatgatcagataactgtaatagagccccatttagacatttcatttaacttttttttctgtttcaggaatgcattttcccatccgaaaaccaatcgtcaccagttgttgacaaactcagggccaaacttcagacagtcaattggggtcgctttggtcttggccttcccagtgtttgtttgatataacatacctattttaattagttatttaacacttacattctaatagagtttaaatttaactgaaattcaaatattattttagtttttccttttgtttttagatccccgaaaatgagcaaaaagttttggctgccaaagtcattgaaatcgcttcgaattctaatcaccgaagcgatgaaaatgtcagcaatcgtcacattgaagctcacacacagtcgccaatgatcgccaattctattacttgccatgaagatccattcgaagcgaacactttcactggtaatcattttgccagaaatgaaaatgattttttatttttagcgaggtccaaatttcccacgaattcaaatggcaattcttcgaacagaatttttatcggtaatgaggacgactcaaaatatgcgaaggctgctgcggcagaaaaaaatattcggtcagtttttttaaattgaaaatccgcattaaaatagcgaatgtgcacgttgcacaaattgaatgcctaaatttgctcaattttcgttgtttttaacagtgttttctcttaggaatcgcttcgttcggcttccccgtcctctcaaacgtgtgttctttgccttactcgtcatcgctttcctttacttcttcctcggcttgtttctcaccggcaatgactcgtctcgtggtgctggcgatgatgaccctttgttcgacccccgcgccaatccgaacataaaagtggccaaagaacggtgataaaacatacgagacaataatttattaatgggacactttttggtgaatcgactgttcaatatttattatatatgaaaccaattatccttttgcttggacgtggggaacggatttgatccttttttaattgtgattttgccgtaatattttttgattagaaataaagagattgtgagtagattttatcatgaataaaatcaattaaaattaaataaatacaaatttttacaacaatattttatcactgtaaattcactgctctgaacccggacttaaacccaaatagaagaccaatggttaaagccggatctgggattcgtaattataccaaatggagaccccaaaaatagcccatttaattttacatttttttagacataaaacccttttttctatgtccgcccctctctctgtctttctctttgtcccgccaccgtcgcgcaccaccgcgtggccatcacttggaatgattgtccgatttcattttcaatttgctctccgtccaatgccacaaatcctcccatttccggcgctggttgaattcgacacgctttcacaggcattacctttagggtgggttatttataagtaaaaactaagatgagagaacctcaaaggccgggtcttccaaatgagcagaggaatttatactaaaattgacataaaaacaataataaattttgaaaaaataccttaacaaaattcgggccatgtgtgctcgggaacggagattcttccaacgaacaaacgaaaggtaaagcaccgcttcttgaggtcgggcggagggaacaaagggaatgtcggagcccaaatgagagagggcggagaggaggacgaagcagaactcgcctggagggaggcaattagcaatcagagcagaagctacccaagacgaagaattaccgtcaattgtgagccaatgggacggaattggctcgttcagaggcggcatctgccaattaattggactattcgtccgttctgtttatctatgccatgtaatagtggttaatagtggcacacctgctcctcctcctcctcccctccggcatcttccttcccctcgtcttcaaaatgtccgtcaccaaatgcgcccctctgcacacccacgccaaatctcaacttccgctccaattcgcagagttcagggccatcactgatcggcaaataggacaaacgggcgcgataaaaggcaactgaggggagttgggcaattcggagaaaagcctcgaggtgaagacgaagcattcccttggggaagaggcgattaagcgacaaagaaagaaataaagagagggaattaacgacacaccaaacgacggaaccgttcactgcccaaatctgaaaaatgggctgacaattcccaaacactgtgaaaacatgccaatgtcagccaaaagtccccagctgatcgaaagaaacatcattttgcttcggttttgagagaattcggcacggtaaagtctgaggcgacggaaggacggacggagtgccatcaaagccatttgagagcaaaaagtgccacggggagggaacggttcgctgaatgaatgggcaaactgacaacagaatggaggagaagccgaacttggccataaaagcgactgaagcggccaaagaattgccagtgcccatgggaagatgaagcaaagggaggcgaattgcccggcgaaagtccgcatgatggaaaagtccgttgatcgcttcgcaaatgaggccatccccactgagagaagaaactttcttcaaaagtgatgttgggttgtcaatgattaccctcccaatgccaacattccaatgccgtccaagtccaactcggcggccaatcgtattgcatgttcaggtccctctaaaacattttgaaaaatcaaagtgtgtgccgcaatgtttgggcctatttatatgatgacagatcaactgaaaagctccgctctaatcgaaaattgaattcattcggattgaccggtttctctgagttcgtaggaaatgcccgcctctctccacaacggctccacttcggtcctccaaaggtgcaaagcgcgcttctgtccgctgaacggattgagaaggacgagcacacggagagaaagcgaagaagggacggagaaagaggagggagaatgggctaaaagagagaaaaaggggaaaaggaaaggggagggaaagggacggacgaggagagtccaaagaaaaagaatgacgaagccaaagggcaagggaacgctgcagggggacgagctgagagggatggtcggggagcagagcgaagcgtaccaaacgacgttggcacgagggccaaatgaggggacagacggagagcagcaaatggggcgaagacggagcaaaggcagggaaatctgaaaaagcggaaaagggggacacggggagttcaaaaggtatttgggggaggggggggggaagttcaaagcttaaccaattgaaatgtaagcatttgtcttaatttgatttgtaatgatgatcctgtaacactttgaaattcatataaaaagtgtcactttttatgaatcacttcccaattcatcatctctaatcattttctgaccttcttcctccgctctttgcgattggtgtggcactgtccgaactgaaacaatgtcatcggaaaagagacagaaggaacggtcggaattggaggcgattggagttggggggcgatcagcagcaacggcagtggggggccatttgaagggaatgggcgacggagagaagcaaaacgaaggacagcaaaagcgagggttttggagggggaaaagtttggcagaaaatgaggacggagacgtaggaagagaagacattttgaggaaaaaaggcgaggggaaagagaggaaaatgaaagattaaaaaaagaagaaatacctatttaataaagaaaaaaacaaaactttattttatttttggtacatttaattaacaaatgatcagtttgaattttaattgctcagattacgaaatacaaaatgaacagaacgaacatcaattgaaattacagggaaaaatgagaggagaacacgaaaagaggggagggggaaagggaaaggggagtgaacaaataaataatcagacggaatgtgatggatggtgactaaagtaaggaattatcgacagatatgcaacaaacaaaattcagcagatgatggacaaaaaaacgaataaattgggaggcggcgattaacacattttggggatgaaattgaaaaagaaaaaccgaattttggtaagggttatttgtctggaaaaggtcaatcttttgacattgtttaaaaaaattccaaccaattttttgaaattcccccgct

SEQ ID NO: 8571 - DNA, 1583 bp, Heterodera glycines
cccccccccccttaaaagcttctctctccccccttatacttccattcctctcggccctgtggccttcgccagttcttccactgccctccgctgtctccgcaacttccgcgtctcttccattgcgctgttcggtcggatgtacgtcgaaagtggcaccgattggcctcgcattggcacattttgctgcttcgctttgtccggcagtgaaagagtgcgcttccttttcagctgtccgatgcgaatgtccgaatccgctcgataagtgctttgggggactggctttgctcggaacggttccctcctcctctccgcctcctcctttcgcctccgctcctccaacatcgcctccaaatgccttttagcgaatcggcatggcaccggtgacctttttattaattcaaaatgccattttatgcattttcaacacttcacctggaagcgagtcgaaatggtttcggaatggtcgtcgaatgaccgacttggaaatgcccctttagtggactttgtgttgggtgccgtattttgcgagcagactcaggtggagttgggggcagacttttgctaatggcagcaataatttgcatggccgtgtcgagagtgcgtctcgcctctgtgtcgagagtgcgtctcgcttctgtgtcgagagtgcgtctcgcttctgtgtcgagagtgcgtctcgcttctgtgtcgagagtgcgtctcgcctctgtgtcgagagtgcgtctcgcttctgtgtcgaaagttcgtctcgcttctgtgtcgagagtgcgtctcgcctctgtgtcgagagtgcgtctcgcttctgtgtcgaaagttcgtctcggcttctgttgaccgtgccattgtcccttttctccctttgctgttctcatcggttcctccgtttgtctggttataaatgtcatcgttttgttctgctcgtgccgttcttttcgacttcgttctgtcaatttctcttccagcaaatgacccaattcaatgcaatcgctgcgcaaccgatccaatcgaaaaagaaacggacgacaaacgatggacacttccattgattgtgagccgaggagagcatttggccaaacgacggcacccgcggcaatttaatggcccacgcggaaagattttttgtttgttttgttgccatagaaacgacgacagaagttatttatttagataagtaatatgttttctattgtttgttttctcatttaaacttttcgaccaattgccgcaacccgaagaaataaagcattttcaaagtgattttggagttacccttctttctctgtcgcctctctccgatcaactaatctctctctctctctcactctcactctctctctctcactcactctctctctctctctctctctctctcactcactctctctctctctctcactctctcactctcactctctctctcactcactctctctctctctctcactcactctctctctctctctcactctctcactctctctctctctcactctcactcttcctctctctctaccctaacttttgctttcactccacgcgctgcggtcaatcattgcctccgagaacgagggcttttgcgtcgc

SEQ ID NO: 8572 - DNA, 948 bp, Heterodera glycines
cggtaaagcgaccgaatgaatttacgagaaaaaaaaatgcaaaaacacttttttgttcagcagtttttttcgaggaaggaaaatacgacgaatgcatcgaaatgtgtggaaaagcggtggaagttggacgagagaatcgggcggactatgcgctggtggcaaagtgcgtaatctttataaataattgctgatgggggttaaggcgggtaataattgcctttctggccccataaaaaggccgattttgagtagttagttttttttagggcgctgatcacaaatctgacaaccatttaaaagcttaggaatttgcctgtgtgttaaagcctttgttatttttcgcttttaagggcttacgctcgaatggcaaacagttacaaaatgaaggacgaccccaagaaggcactgcacttctacgaaaaggcattgtcggaacatcgcgacccggacattgtgaagaagcacaaggaattagcgaaggaagtcaaagagatggagcagaaggcatacattgacccggaattgtcggataaagaaaagaacttgggcaaccaattgttcaagaaaggcaagcaatgggagaagggacgaaaacattgggaaggaaaccaatccgaaattgggaatggcaaatcaatggacaatttggcgttgtgtctttaccatttcatcccttttaaatttttgaggcgattaccccggggctatgagacattacaacgaggcgattaaacggaatccggacaacgctgtgctctactcgaaccgtgccgcgtgcttcaccaaacttatggaattccaaagggccgtcgacgactgcgacctttgcctgaagaaggacccttctttcggttcgcttttccgttttcctttcgttgtgcgatttcctcccgtcattcagttaaggcgtacatcagaaagggcgctgctttgtccgcaatgcgcgag

SEQ ID NO: 8573 - DNA, 4878 bp, Heterodera glycines
  unsure (1)..(4878): unsure at all n locations
cagcgcactccaaatgcccgtctcgcggacgccgtacgggaggactttggacacgtaaatgggcatataagtggtcatgaacacaatagtgacgatatcagcaaaggaattgagccaaacgacgagcacaactttgttttggagaatggcactgagaggaaagaggaggaaaaggcgagactgacaatgagcagccactattttggaaaatgtgagccattttcattaataattttgctgatttttcaaatattgctctgttattggcacttttcttggccaaaagcgaggtctaaggaattagcacattaaaatattgtagtttgccatgggacgggcattagaaataaatgccaaaaaatagtttaatttctcaccagtacggcacttttccgctgattgctctttcggccgaactttttccttccgaaatggccgctttttccctccgtccgacgcatttgtgtgtttcgggaaagtccgtgtagagaaaaagccaaaggccaaaaaggaaaggggcgaccatcgcatggccaaaataaaccgaaggccaaccaaaggacggggaagagctgagctgagaccgaaagcaattgaaagataaagagatatcgcacggaaaagcaaaaacgtacaaatccggccacggtatttgtgagagtttgggaaagaggcgtaaaactggtcatacaagagctgaaaaggggcagcaaagagtgaatttgctgtttcatttatacagaaacagtccgtgctggcggagattggcccaccgatggcaaatgaaaccaatggccgcgaaatttgcgccgtaagcaaatccctaaggcaagaaaaagaaatgggagtaaaaagtgggttatggggggaggtgacttggacgaagcggacgaggagaaaggcggtcatgccgcgggcggcagccaacggcaaaagtgcggtggccacggcactggcgacgccggcgccgaagaacacgaaacgagcgccgaagcgcgtgtacagggcactgaacggaaaagtgctgacgatgctggccgcgccgacagcgtaaagcagcgccgacttttcccgcgacgaatagggcaccgtcggaggcaccacgtggctgctgttcagcacgagcccgggcagcacgtcctcctgacaacagagtggaggttgatcagaccgatggcaaatttgggatatcatatcagaaagaggtggcattttttccttttttggcactgaccgatcattggctctgatcagtctcatttttcatacgatttctcatgttttactgatcaatcttttccactttcaaggctgatcagtcttttgtgttcatttttcaatttttttgatcagtttgtttccccgtttgatcactccaaccactaattaccttcaaatgcacgtcactttccttcagcaaaatggacgaattcttgggaaaggacgcgttctcccaattggtccttctcatcacaatttgggtgaaattaaatgcgatcatattggacgaaattgacgtaagacaaagtgcagcaattgtcagaatgccatatctgaacatcccatcccggcaacagcacactctagtcgaactttcgttgtcattttcagctttttcccgccttcttccgccaattgagtgaatgccatcaacggaaaatgccatcttaatatttttcaggcttattaaaaggaaattttcaatttaatttgtgaaaaggcgcaattttgggaatcgatttcatatgaatgaatggaaaagaaacaaaaaaaagaaaacgaacaaattgagaataaatgcatttttattagtaatatgaatctgtgcaaacttttctctcattttaatcaaaaaattaaaggaaaaacaaatcatttttattattatttattttctaaaattgtaaaaggcattaatgtaaatattaatatttttaatttcagatgaacaattagaaatagttttaataaaacctaaacaaaacaaagtgaaaatcgattagaaaagaagtgcgacagcaaatgatcactgatcagattaattaccacaaattctctttttttgttctgttttccttcccgattttttttcctcggcttacagtatcatataaatgtattgacacgagacggaaatacaggaaagattgagttgaaaaaagaaagtaaaattaagaaaaattagcgaaataaatctaaaaggggaaataattaaaaaagtatatattttttctatttataaattcattcactttgttactaaaggcatattcataaatttatttggcccttttcacacgcccccaattgcctgagggggcattactcaaatttggccaccccgtgccctcctccgccgatcccttgggattttgccagtcgaatacttttgccgaatttgcccattccgccggtggcatttgtcaaattttgaatgttttgttcatttcgttttagtaaatgattttgagacttttccaatgcgttttattctcattttgctcaattgttttgcagaacattgcagaaaaagtaaggcatttctgcaatgtctttaagtaatttgaattttaatgcaggcggaccctttgaaattgcggccaaaaagagagggccaaagccaaatgatacgacgaaaatctccggccgacccgtgtctattgaaatgcaaagacgattatgtgagtgatcggcgggggggggaaacattttgccacgaatgagccaccaaatcactgacaaattggcacaatatgcagatgatgtccgccgaactgtcgccccatcggacccaaaattggcgcttggacagtgcaattgggtcaccgctacacggattggtagaaaaatattggccaaagattaattgccgtcctcgacacaattaacgtttaacaggtcgaagcggccagcgatgctaatgccatccatcggattgactacgaatgcaggcaccgttctgcccatttgacatcatttccaattaccgtaccctcaatgtcagttaccacgccaatttcgtcgcctgtctcgagcagtgcggcacttcgccagcggcccaaattttggtggaaggccaagaaacattgaaaacagtgacaatttgctaatttgaccttgattaacgtgaaatttggaaaggtgtgccaaagtttcaaaggcgagaaggaattcgtcggttttattttgccgtgtttggcgcgcaatgggccaaaaattgggaagagctgtcaggtgaaggctaattaagcaaaagaggggacaaattcacaaagtgtgcccaacaaaaaacagcttcactggtctctgctggagaaggacatttttgaggcattacaaagcaaaacagagcaaaacgaagaagagcaaaagcatttggaggagggcatcgggcgaatttgcaggtaattggccaatcaccggcatggcaaaacatactttatgggaaaagtgaaaaacaaacagggaccgggattagacaatgggtcgggtcatttcagaaaattaagattagaaatcctggttatttaattaattaactaattgatttacgactattagggcgatgaacagttacacggactgccatctcagaacagtggcgcaactttgccataggcgcactctttctttttttgtccaattanactcgaagagttcggcgtaagtttcgcttcccatttggcactcttttgcctttcagtgcgttgctccgtcttttgctccgctgggccgagttcgactcgcattccatgcccaaccaatggcccgattgtgcccaatgagatttggatgccattctgaggaatgatggcaaaacttgtcgttagtcaatccaccgattttggcattgtgtttctcattgttaattcacactcatttttttgaatgatgtcattttctgaacctctcctcttcaatttcatctgaaatttctttgctttttctgctgccaattgcgcattcgatggcgaaaatcagcagagcggtgccactgctaatgccacacattgccaacagtccgaacatcggcacaaacccttaaaatttgtttttttcggctctaaagagtgaaaagggcaccaccgacccaagggcttgtagagatgactcttcgccatcttctcttcacattcctgattccggatcatctcgcgcagcattcggtaacggtcgtaagagcgccgaatggccactttttcactttcgattacctccaaagagagtgcgtttgttttttgccaatgttacccttcaaacacttcccaaaatcactttgttgaaaagtgccgtgaagggactgccccggcggaaaagcaaatgggcggttcggtaaggcatttcgcggtcgacgaacacaatgtcgcaggaatgggcggccagaaaataggccgggtcatcgccctgcacgagcatcacattgccaaacttctcaatctgtgcaaaatgcatttatggcaattagagaggggattcgagagggagtctcgaccagctgcagcgactcttgaatcgaatgtgcctgcaaaagtttcttttgtgccccgccttcgcgcatttctttgaatgggaaagtcgtggatttgttcaaactctcataaaacctaaaatgtttttcgcaattttggctaattcaatcgttggaccaatggcctctgtattgggacacaaaagtgtatttgccctgctgaacgtccttcacaaaggatgaagcatctctgatgggaatggccggctttggctgtaccagcgaagtgacaatccaagaacggtacagcgaagtgaagcacacgcaatgcacgaagctgaacagaaacaacgcgaatttgcctatgaaaaggaggggagggggggggggggggaattagcaaaggcaaa

SEQ ID NO: 8574 - DNA, 1300 bp, Heterodera glycines
  unsure (1)..(1300): unsure at all n locations
aatgacaaaacaatggcaatggcattgaantttgattggcaattgcaaaggcaaaacaatgacaatgtggcaattgaaatttgaattggcaatgacaaaacaatggcaatggcatttgaaatttgaattggcattgcaaaggcaaaacaatggcatttgaaatttgaattggcaattgcaaaggcaaaacaatggcaatggcatttgaaatttgaattggcaatgacagtgattcaaacagacacaaattattacccgaaacggtggccaaacggaccgattttggctgcagcaattgaaggcgaagaaggcgccaaaggatctttgaataaataaattaacattcattacaaattgactgatatttaatttcttaattacatagaacgctattaattaattattattttaattaattaaaagacactaattaataacattgtgaaatattggcatttgtgcgacagtgcggcggttgaccaaaaattcgattttttcgatgaccatgaagacaaaactgtgcagggcaatgaacaagacgatggctaaccacgtgtcgacggagaacggatggaacagacgccaaatttcagccaacggaaaactgttgtggtcacggatggcaattcgggaaagagtctgacaaattaggggaaattgaaatcggaatttatggcgagattatgaaattatttccaagtcgaaacgcaccgaataaattggcagagaataatcaaagtcggccatccgcggcggcgacttctgataaaacaggcagcccgtgtccacagtgccttcacccgaaaatgtgaccaatgccaattgcccagagtgaaaggcttaccgttggcaatggcgccgagaacgccgtgccattgtccgtccgtcccctaaagggacaaatctaaaattcagccactaaaacggggggggggggaggggtgagatggggtcacttgccttactccccacgtcaatttccattttgtgatgactcagcacaatcggctcaacagacaaattcaatttggaagtggcaatgcgcagaaactaagcattaaaagtgtaatggttcataataatataattattttagaggcagcggattttgaccaataaaaaaacattaaaatgagcaaaaaaagcaccaaaattgaaaaagaaataattttttatttgaaaacatcgaattttgaagtgttccaaaattcttgtgcttaattaaaattttgtttcgttcataatgtattaattatcaaatgttcactcaattcactgactttttctgctaacaaattaa

SEQ ID NO: 8575 - DNA, 1556 bp, Heterodera glycines
  unsure (1)..(1556): unsure at all n locations
ggtcgaagctgtgtgctcccagaaaagagatcaattaatgggtgaaatgagcgtaagccatggactagtcgaagctgtgtgctcctagttgtcaagcgaaaaaatggttggtaacgctgtgtgcttaaaatgactatgtgccaagggcttagtgccaaaaatgaattgtgaatttgaaggcataaagccattgtgtgattttttgttattgtttgtattatgtgatgcctaactggttaaatgttgaaccgtttttaatgccaaaattggttttactgaataaatgacaatgcataattcgatgaaattttaatggaaatgcagaaaataagctttgggagaagccaaaaaaaggaatgaatgtgtgaaaatcagagaaaaggcagaaaaaagatgtaattgaagtactttaattaaaattgaaaggatgatgtaattaaaaaaggaaaagtaaagggtcaaaaaaaaaagtgaatattttggaataaaaaaccttcgaaaaggtaaagcagcacattttgagaaaattgatgcaaagataaaattgataaaatgaaaagtaagaagtaagcgaatattttcttctatgaaatgaagattaaaaattaaaaaaccggagactgttttgaagaaaggaaaagcaaaatttgccattaacgtgaaagtgaaataacccgagatgggtgtcaagagaaaatgacataagtgaatgaagcaaatgggaagcttgttcaactgaacggcagtggatgatgatgttcatcaatgggtgaccatcaatgggcgcccgaaggctgatcagaacgatggacgtgatcagaagtgatgaggcaaaagccaggaggctttttttcgaggaggagagaaatgctgtatccgcagcattcaaaatttcatattttgtgcataatgtacattgccctactttctcccgaccaatcccgtcgtaaacttatccatctgttcatcccatcccaagccaatcctatccctctcatttccaatgttatcgtgccatttcttcctattcacctctgttgcatatgccatccatttctcttattcccttttgtgtttttccgtcattacccctcatcctatccaaaagtccatccccattgtgccagtatataagtccatccaatttccccctcgggggctgcgagatgtctgcggtgggtcagtctgtgccattccttgcctttggcaatcctttcccaaataaccaattgcactgacccacccaaaatgctctgaggttgttgttgacccaaacatattcccggttttcaattcataattatttgtcaatgcttttccttataataaattcctctctcctaaaacggtaatttgaaatggctgaagccttaaacccggggacacaacataatccctagcccgaactcgaataaaaatcgaaatttttaatttttcaaattaatgattttttgttcaatttagattangaaatcggaaatgatcaaaataattttttcgttcacatgttttaaaaaaaataaattattcataaatttataagtatgaaaatctat

SEQ ID NO: 8576 - DNA, 5264 bp, Heterodera glycines
cagttttaaattacggaacgggcaaaaacccagtcataagtgccgttcgtattcaaaaaaaattttcatttcccccccaaaatttggataagccacttttttctccggcccgatgcctaatatcaaaaaatagcccgaatgctgaattaaaattaaagttattaattttgaggaagcgtcgtcgattcgaaattcacgcgcattgacattcacgagttctggctgcagtctcacgttccgttgaaggtgattttgatggccttgaaatgacggaccgttcgttacgaatttattcgcttaattatgctttattacagggaaccaccaaaatccctcaatatgtcttcccggtgaaccaagtcatggccaataacaacgagttgcaaaggtggattaatatattgagaaaaatttacgatttctatgtaattggaaccaaaaaagggacaaaaacggtgccgaggggtgggggattccgatatcagcaacttgaacacaaaatcgtctccaatttctttaatttgttgctggtgtcatgctttttaattgattttccagttttctcctttcgctctgctgcaattggcaaattgtgacattggccccgggtttgccaacccccgtccgccaggctgccgaattggccaagcgcgggcgtgccaatttcaacgagctgaagcggtgagtctccctagccaatctaatcaattaacggtgataattaatccctccagcagtacgccaaaattcatcccgcgcgttgaggacaccgaccagattaattatactgtgctgaacaaccgcctctgttataacgggcatattttggcggacacgcgtttcaacgcttaagggttgatgagactgatcagtgagacggaacgggcggacgatcaaagggacggaaatgagaatcaaattcaattttggatgaaaatatttggaaaacacattcgtcatatttgtctgttctgttctttgccttaattcttcactttgctactttatcaattattgtttaaaaaataacaaaattaaaaaaatatatatggaaaatacacaaattcattaacctaattttttaaaaattaattttaaattcgttttcttcacaaaagcaaaagaagacacgaatggtcacattgtcaaaactagagtccggcgggggttttactggattcccgcccccgtaattttgacccaaatacgggagtaaaaatacactggtaagaattgtttttttttgttaaattaataattttttattgaaactctgtttatatatccaaaatttcaaaaaaaggtttcccgtcggcgcctatcggcaccaccgacccttataatccttaattctcttaaaaactggcttaaatttgcaaagattggtcatttttggacaaaatctgaacaatgtattgtgttcgaatattcaattgtttcccgggccgccctccctcctcctccctggtccctaaaaagttcttttcaaaaaatacgctgcaaagagttgttaaaattaataaagggagttgaaaaataatgttaataaattttttgttgaaataaattagagtgccagtttttttcatctgaaattctatacatacttaaatttcgataacaatagcagttcgtacaatacatttttttacaaaattaagcttatagcttgggccaaatctaacaagggaaccgtcagaactgtgtcagaaaatgcatgtatcataactatttgatagtgcagggccggctactctgaatttttaatgttagcggtgtgttgaagccgaatagaaaagttattggacctcaaaaatcaaaattttgactgtgttttccccttcagggaggtggtgaagtggggaaaattaaaaaaaaacggtggatcagtgggttaaattcctatttttcggaggtccaggttcgaacccaacatgaaaaaaatacattttaattaatgtgcaacaaagttaacgattaaaaaaaccattttttatttaaaaatatacataggtaataatttttctttagtgaaagtaaaccaaaagtcgactaaaaaagtgactgccccatggggcccaatcggcggggcccaaccggcggggcccaatcgacccccaccgggttttaggttctaaaaaagggaacgggtcgtttcggcgccgccgtttcggcgacgccgtttcggcgacagggtcgtttcggcgccaaaaaaaatttctgatttttaaggccctgcaacttttgaagcagacgaaatcccaagccaatcctatccctctcatttccaatgttatcgtgccatttcttcctattcacctctgttgcatatgccatccatttctcttattcccttttgtgtttttccgtcattacccctcatcctatccaaaagtccatccccattgtgccagtatataagtccatccaatttccccctcgggggctgcgagatgtctgcggtgggtcagtctgtgccattccttgcctttggcaatcctttcccaaataaccaattgcactgacccacccaaaatgctctgaggttgttgttgacccaaacatattcccggttttcaattcataattatttgtcaatgcttttccttataataaattcctctctcctaaaacggtaatttgaaatggctgaagccttaaacccggggacacaacataatccctagcccgaactcgaataaaaatcgaaatttttaatttttcaaattatgattttttgttcaaatttagattaggaaatcggaattgatcaaaataatttttcgtttcacatgttttaaaaaaattaaattattcataaatttattaagtatgaaattctatccattcttacaaaggcaataactcgtacaatagcagttcgtacaatacatttttttttacaaaattaagcttatagcttgggccaaatctaacaagggaaccgtcagaactgtgtcagaaaatgcatgtatcataactatttgatagtgcagggccggctactctgaatttttaatgttagcggtgtgttgaagccaaatagaaaagttattggacctcaaaaatcaaaattttcactgtgttttccccttcagggaaggtggtgaagtggggaaaattaaaaaaaacggtggatcagtgggttaaattcctatttttcggaggtccaggttcgaacccaacatgaaaaaaatacattttaattaatgtgcaacaaagttaacgattaaaaaaaccattttttattttaaaatatacataggtaataatttttctttagtgaaagtaaaccaaaagtcgactaaaaaagtgactgccccatggggcccaatcgtaccggggcccaatcggcggggcccaatcgacccccaccgacaagtgatggacggttttgatttttgtgttgccaatggcacagaaaggtcgttaattaacaatttattcataggcacattgaagaggaaagtcgaagtgacgagcagcaaaggcacgagaaaacggcggcgccgatgctaacgacggcaccagcgatggcggcggcacttccgtaagttagtggttcttgaaagaggagtaacgcgctaccgtttcccaccatagttaatcgtcgtttccctttttccaacggtagcagcgcgcgcattgttcggacgccacacattggcacaaatgcccgcgagaatggcaccgcctcattgtccgccatcactccaatcgctgccgcctttcgatggtgcactccgctggccaacacaccaactgtaaggtgcacttttgcatcttttttagcggagatggaggtcaatattttgaaataaaaattatttggctggcacaaattggggacaaaattttggaggttcaacagtaaatatttcgtggggtatttcacgaagggctaaaccaacgggatttagtcgtctcactttgcccttccgtacgccatgttttgtccatatttctgtccatgtcaatcctggtcatttcttcgtccaattgccctcccatccgacattttcgtcgcttgcgctgctcaaccaatatatgctcaccgtatacacgcacaatcagccgggcgttggggcaccaggcttggccaagccgtacgacggtaatttggacaaataatgttagggttcaagccaaacattgttcatcctgcctgtttcctttcagtcggcgtgctttgcgctgccccggcgtacaacggatggttccgcgccattactttggcatacgaccaggtggaaagcgttctccaatcaatcccattttaataatattttatcctgttcattgtcaggaccaggatgagatgttggtccgtttcgtcgattacggcggcttcgcccgtttgcctcgggcggatttgcgccaaattcggtcatttccccgggggtttttccagctaatgtcatcatctcttcccatttcagtactgactttgtgacccttcccctgcagggcatcgaatgctatttggccaatgtgcagccagctggtaattaattgtccctaattgccaattatttcttagggcattttacctttcctttccgttcagatggatctttgcattggagtgacaaggccaacgagttgttccagcagttgtgcgtgtccaaaatcattcaggcggcgctggtgggctattgcaaaacggacggaattccgtgcgttgagctttttgtgatggacagcgccaacaaaaaggtgggcatcagagggcaattgttgtttattgctcaacgaatgagtccgttactcctcaaaaatccaggggattctcgggcgaaaaccctggactctagcaaatccctagtgctaatggactgtgggtccgttccgttttccacggtgccaatgcctttttcatgccgtttcagactgtgcgcattgaccaaattctgttggagcgtggccttgccaaacagatggaactttaatgggtctttatgttcttgaaacggaattcatgataatttatttactttaaagtcactcctttggcctttccgatttttatttatttatttttctataaaacattgagtaaaataaatatattgtagaaatatttgttttatgccttttctggtgattcctatgtctcgcctcttcttggcctgtacgaaaaaataaaaatgggaagggataggacaatttttcaaaatcatttgacacaaaataataaaaaagtttatttttttcatttttcccttcaaaaggcatttcggtggataagcgaataaaatagggaa

SEQ ID NO: 8577 - DNA, 1397 bp, Heterodera glycines
  unsure (1)..(1397): unsure at all n locations
cccccccccccttttttcgttaaaaatttttttcttctaaaaagtcgtgaaaacacacattttatggggttttaagggtcgctgatcacgaatatgacattcatttcaatcaatttcgaaccgctgacccgaattcgaacgaaaaaaaaaattcaaatttttcaattttccatttttagtctaagaatggtttaaatgaccttttagtgaagcactaatgatattcagtgcgttttcgtgtatttaaacaaagtttgaacaaaaatctgaaaaatcgaaaaattttgaattttcgacttaaaaaaacactgaaaattatacgaaaatttaagagttttcagaaaattttcaaattcttaataaaaacttgctttttgaaaaatatacattattttttagattctcttatgtaaaaaacaaataaatttagaaactaaacatttttaatttttacgtggctcagcccctatttttttttatattcgaatttaaattaaacacatttttaaatcatttttagccatgtggtgctgtgagacggtgatggaaatgacattggcattcaatcgttgtgttgagctgtcctcggcacgttgggctcgtctgcttttccagggcaaacgcatttacttgtggatgcttttcccgaccttatacggcttttactacttctggtacacccaaccgctgatttttagcggcattttcttctcatggttcttcaacccacatgttggatacattgacgattttggcaaaacggtgagtgccaatgtaactcaattttttttaattggcaaaacggtgagtgccaatgtgattaattggtaaaatcgtgaattttttttttttaattggcacaatagttgctaaaggaatatctatgtaatatatcaatttgtgaaataaacaaaaaatatattttttttttgatgggaagaatttattatttttttttagtattacgtaataaaatattaattaaaatttgttcatcaaatctgtatttgagaaaaaatatttaaatatattaaaaaaaatatttcaattatttaatccattagatagattaaattagaaaagtaaattcaaaattaaaatttacagttaaatttttgcctataaacttgaaaatatttttaatttttgttatttttcgaaagttgggaaaatataattaaagattataaaataaaaacattttaaaaattaaaaaacccaattattttgagaattaataattaatgtatttaaataaattatttcaattattatccattttttgattaaattagcaaataataaactaatttanaaatttatatagtaaattttttgcctgtttaataaatttaatttttattatnttttcaaaattaaaaaattcaattaaatat

SEQ ID NO: 8578 - DNA, 4205 bp, Heterodera glycines
tgatggtgctaggtcgtttcataaatccgccaaatcgttattttgtaaatccgcaaatgagcgttccataaatcagttttataaaccctccaaatgtgcgtttacaaatccgctaatttcattaaattagattgctatttaaatgtcttaaatggcttgttttccattgtaattttggcccaggaacgaacgaatgaactccaaaatgtgttagggccaaaccaaatttaaaaatgggagaatgaaaaacagagtgagtagaaatctgtaacttagaaacaaatttattttcattcatgtattcgtttttttctcaaggttgccaatttcctggagaccttagcctcacagtttagttttcgtttttccaaacaccaatgaggctaactaaattttcaaaataattattggagaaaatcctcaaaaatgatcctattttgttcgaaatcgtttgattacaaactctattaaaaatgattttttaatttaattttaattttttttaaaggcattcctccgatcatttatttggcactgaacaagacggtccgtcgtgatgtgtacatcatgatgatgaagccgttgtccaagctgttctactgctgtatcaaagcaccagctgatccgagcaccacccgtctgttcaatacggtcacagtccgtcgaatggcggctggcggcaaagtggtgccagcctcgtccaatgtgcacacagcgaaaatttcaaattcgaatatgaaatattagttttttttttttggcattgtgttagtggcataattcaaaaaaaatgcgagttaaaatctaagtgtgttgattttccaggattgtggtcattttaagttttgacattactgaagaacccaaaaagtgccgatttttatttaatgtattttttgagtcaaaatttttgggcttaaaaaattgccacatttatccttttactaattacgccgctggattagcaacttttcactaatgattttaatgattattcaccgttaattggatccaaaaaatctaacccaaccgtgcccaatgtgcacacagcgaaaatttcaaattccaatatgaaatattagattttgagtttggccattgctgaaaaccccccccaaaaagtgctgttttttaagattgtgccattttttttagtgttggactaatattttaaagtatccttttcagcaaatctcattaaaaattacaaaaaaaatttcgacagcgcccgtctgcactgccgaatcccaaaaactcctcgaattgttttcaaattttgcaggaaaaaactttataattaaaaaaaaaaattaaatttgagagccagttaaagttgaattaatttaaacagttttatgcctttaaaaattcgaaatttcaaaaatcaaaaaaatggaatgcactttttgggtcaaaatttttggttttaaaaaaatttaccaaactcacccatttactaattacgtccctggattagcaacttttcactaatgatttttcatgttcattctccgttaattgatcccaaaaatcttacaatgttgttaatgagaatatgtttgaattttatgtataattgcttcgtcagcacatatccagtcaatccctgtttttatcttaaaaaaggtgtgcatatttaatatttgcttaaataaacctaaaaagtacaataaacaaccaaaaaatggggtttaaaacttaaaaatgcatattttttattgttgttcgttgtatcaaaaacacctccaagtttgccaaatttcgaaaaaattctcattaaaaaaaaagaaatgttcgcaaaaaaatgacgaaaatatttattgaaaatgccaaaatgacgacgaaaactcaaatttttcgtgttttgtggggtgtaatttttaaaaatttccaaaaagttgatctttaggggtgtatttttcgttttttttcatttttcttgtgaaaatttccaaaaaatggccaaaatatggactaaaaaccttcaccaaatcaaaaaattttaacgcagaaatgctatttttaagcccctttcttcatagcatatgcgcagaaaaaatatgttaatccatataatttacaaccctaatgataaaacagcgatcggaccggtcggtttttttcggtttttaacctaaaccgttcgaccgagaaatttttgattgataaactaaaatttaaaaaaattttaatatctgggctaaagcggggaatacgaattaaatcgtcggagtttatagggattgaagtcaataatattttatttttagggccacaaccatttaattaattgatcattaattaccctatttcttctattatagcccctccctccattagaaccccctctgcatttcccttttaatataggggatgaaatggagaacacgaatcaaatggtggggagtaccaagactgtaccaacaatgttttaattttagggccacaaccaaattaattaattaataattaattaccctctaatttttttttctgttttcattcctttattttttttccaagagttaccaatttactagagaccttagcctcgcggttttagttttttcgaaggccaatgagtctaactaacttttttcaaaacgagattttttgggggttaccccacttttgcgtcccggacatttgcggcccggacatttgcggctcggacatttgcggccccagccaaatcggacatttgcggcccgacatttgcggcccggacatttgcggctcggacatttgcggcccatttcttaagggccattttcggacatttgcggcccaattttttgctgaattttgcggcccaagctaaaatcggacatttgcggcccgacatttgcggctttgccctacatttcatttaaatttattttatgtaattttgaataaatattactattagattttatcaatttaagaataagatattttattctcttcatcataatatttaactttttcaatacatcaattaatacacaaaaataaattttttatttccaatggcttgctcaaggcccaacgagcgtcatttttttacatttcaccccattcatgaaaccactctgcgaggcgatactgtaatgcatttaaatgacgaagcaaagtctcattgtcgcgttcatcatcattgtcgtatcgcaaaattaattctttgatagcacggtcattttcctcatattttttcttccttttctcgctcaacccccttgtggggtccaactcataaggtcgaatgcgattctgttggaattcctcctccacttttagtgctctgataaatctaaataaattaacttctttcgaagtttagtgctgcaatacttagagaatggtggatgcaatccagcaaagcgttgcctaaaagccaaatgccatccctcaattgcattatttgtcctgtgaagattttcaatagttgaatcatgcatattccagtcataatgagaaaaaagtggaacagcacgttcaccatcaacctctcggaaaagataggtactgtaaaaaacataacccgtaagttcaaatattttttagaaatcggcggaaatataactttatttttagtttttatttttagttcagtgtttgaaattaaaatttatggcccagatttgctccagacttttgaaagtaggtgaaaattggcatagcttcctgaggagaattttccctcaagacaatgtatgcgtccaacacttcatcgatttgcaaaaatgccaaagcagtcaaggatcggactgcctttctaaattctgcattttgagcatacgtctgtgcatatccttcagaaacaagctttctcaaaacgctctgccccaagtggaagaggcagtgacgatacaaaaaattttggccaaaaacatttcggaatgcatttttggcaccttaaccgaatgatatcaatcattaagtacatacgaagcaagtaacgccgcttttttgggaatcgtaattattaggacagaacttaatttttaatcccggaatattaaaaaattattagtagctaaaaatgggaaattaagtgccaaaaattttatatatatcataaagacgcaattcaaagtcactaatgactgaaaggggcaaaatgccctgctgaagatgatttcgaattacagtaaacgctcgtaaataagattcttgctgtttgttctgcataattatgtaagctgaaggaacagaagatttgt

SEQ ID NO: 8579 - DNA, 1451 bp, Heterodera glycines
aaaaaatcaaacttagaaaattttccaaggaaaaatttctaggaaaattttttttaataggaaattttaagaaaaaattgttgaaaattttttcagtattttttttgaaattttatgaaaattttctgttttttccgaaatttttcaaaaaaaactagcaaatactttttttctttaaaattatacccttaaatgttccgtctgcagaccagtgcctgtggcgtcttaatcgcctgaggccgttatccgtcagaaatattaaaaaaacaggcaattctggttcttgctgtcttgaatcataaagcagaaatctctgcccatcatttccaacaataaattcgccctttaacaagaaattaaaatatccttttgattctcttttccgctcttatttctacccatggagagacgcatattttacggtcaatcctcacgctttttcgtcatctcctacgaaacagtggccgccattattctgtggttcatgcagaaagaactgcattaagggctgcactaaactcagggaaaagcggaatagctcataccctcaagaagggcacttcgaaattaacaacaaattttgccggtggcgttgttgggggagcggcggctgagaccgcagccaatttaattaggacaaaatgtaaaccccctatttttcaaaaccaactcgtaacttaagcacgatcaccatatttcttcccagtcactgttcggggaccaaaaaagacggaatttttcttggatgaagagtattttaccaacgacgaagacttgcacaatttttttgatgagatggaaaaagctgcaggggtaataactccagcctgctgttaccttggtcacaattaatttttaaattgttaaaaagagtatttccacagatgaagatggtgttctgcgcatgttgatcagaacttcaaacatggaagttgtcagaagcagagccaccacaattaacagacaaacttattttaactgtgacgctatgtgtttgttgccttaggtgtccatatgaccgtagtttaagcattttttaaaatgacgctcgttgggccttgagcaagccattggaaataaaaaatttatttttgtgtattaattgatgtattgaaaaagttaaatattatgatgaagagaataaaatattttattcttaaattgataaaatctaatagtaatatttattcaaaattacataaaataaatttaaatgaaatgtagggcaaagccgcaaatgtcgggccgcaaatgtccgattttggcttggaccgcaaaattcagcaaaaaattgggccgcaaatgtccgaaaatggcccttaagaaatgggccgcaaatgtccgaaccgcaaatgtccgggccgcaaatgtcgggccgcaaatgtccgatttggctggggccgcaaatgtccgagccgcaaatgtcgggccgcaaatgtccgattttggct

SEQ ID NO: 8580 - DNA, 4495 bp, Heterodera glycines
atccaggccgctcagatgcaatccgaaaattgccagtgccacatgacaaatcgactcttcgctcatttctcggagcccctactttactacagtcggttcatcaaaaagatgcgcgaacttagggcgccattggaccaactttttgggaaagacgaactttggaattggggtgaagaccagcagaaagcttttgaaaaagcaaaagagatcatgttgtctgatctgcttttacccacttcgacccctcgcttccaataatcgtcgcagctgatgcttcaaaagatggaattggagcgaccataagtcacattttcccagacaaaacggagaaggtcattgagcacgcgtcaagtgttctttcagaagcacagcggaactacagccaagtcgaaaaagaagctttggctcttattttcgccgtccaaaaatttcacagaatgatttttggaagaaaattcacacttctgaccgaccataaaccgctgatttccatatttgggtccaagaaaggaatcccaatttatgccgccagtcgactccaaagatgggcacttattttgtcaaattacgaatttgacattcgctacatcaataccactgcgtttggtcaagtcgacatgctttcacggcttatcgcgaattatccgcgacccgaagaagatattttgattgcaaaaatttgcaccgaaactgaatgtttcatcggcacaattttgcagtcacgaattgatcaacttcccgtcactgcaaccgaaatagcagaaatgactcaaaaagatgaaattctacaaaaagtggcaaaattctccaaggaaggatggtcacaaaagtgtaatgaccccgacctcgcaccattctttccaaaacggaacgaaattttgcaaatcgagaattgtctgctttatcaaaaccgagtcatcattccaacagtgttacgagacagaacgttgaaagcgcttcacatggcacacccaggaatagtgcgcatgaaagctctcgcacgccaacacgtatactggcctggaatggactcagctatcgagaaattggtaaaaagctgcgaagaatgccaaatcgcccagaaagcagcaccaaaaacattgctttctccttggaatgccaccaaacggccattccaacgtgtgcacattgattttgccggcccatgccaagatggccatgtttatctacttttactggattctttttcaaaatggcccgaagtttatcagatgaatacaatgacatcaaaagcaacgatcagtgttctccgattaatcatccatcgacttggcatcccagaagaaattgtctcggacaatggacgacaatttcgttcgtcagagttttccgaattttgtaaagaatttgggattcgacatacgttcacaccgccatttcatccacagtcaaatggccaagtcgaacgctttgtcgacacctttaaaagggcaatgcagaagtgttcgaaaaaggacaaaaattgggctgagaaaatgctcctgtcctatagaacaacaccgaattctgcaattaatggacattcaccggaccaattattctttggtagaaaactccgcactcaattgtctcttacacatccgacaggaaaagtcaatgagacaattgacaagaccattttccatcaaaaacaggaaaaataccgcacaaaaatggcacaaaatttcaatgaaaagcatggagttaagtcaaatgagtttcttccgactgacccagtgcttgttttgaattaccaacatggtaagtcacattggctccaaggcacgatcatcgaacgcctaaacaattcgccgacttatcgcgtaaatgtgccaagactcggacgaaacattcatcgacatgccaaccaaatgcgccgtcgatatgtcttcgaagaaagtttaggatttgttggtcccgcccaggtggcaaatgacccaaatcatcattcaccggcacatcaaaaccatccaacaccggcacgccaaaacacgacaccgaaatgccaaaagcggaagcagcccgacgaaatccacccaactactgccaattcaccaccaatggcattgagacgctctagtcgcaacaccaaaccgccgatccgcttctcgccaggctgacgccgttcaagaattgaggagggagatgttggatagtgaataatttgaatttatggcgatctgacttattgactttatttgttatttctatgtccatccgccccctccctcgtccataaaagtggacacctcctcccactttttgttctttcctttcatcattcatttatattttatttcccaatttgccctccgaccgaatcaataaaattatttatttatttctttttctttgtgtgttctaagtggaagaacacaacagtcctcaatcattctcagccggcctgcttagtcctcgtaattattaaattagaattttaattaataaaaacaattatttataaaaatgaaaacaaatatgtatcataaaatcaagaaatgcaacccaaaaagatactagaaatttcaattttaataaaatattcaaaaataaataaatgtccaaaattaattatttttattcttgaattttttattttttagcccgcttaattttaattagtcatattaccaaaaatatttgagcattctaagggggcttaaatccaggcccatgaataaattgagtaaaaaaaatataataaaaaatacaagtttatcaaatctaataaaacttaaacttaaaattaaaaaataaatgaaattgttcagtttatttttaataaagcaattggttcgccaagctacttttcggacgaatcatactcatttatggtgttatcacctgaggtttattcaccaaatgttgcatcaaaattatcaaacagtatttttgtgagtttctctatttgaaatattttatttaataaattatttatttataatgataaatttcagttaattttatttttggaaagagaggcatatttaatttaattaatgacgacaaccaaattttcaaggaagtaaatgtttgggttctaagaataattttttcttagaattttttgttacatttaaataaaaattattgggcaaaatttcagcttattctaaaaactatcgttttaatttgagataatttatttcacctaaaaaatgttatcacctaaaaaatgaagtccaagccttggatgaataaaaaatttcctgagaaaccgataccattgcgagagaaaatttaatctcatattttattttattatgggagtgtggtcggcgtatttatagcgaataaaagtttattcaaactaagtagtgaaaaatgaataaatattcataaaatattaaaataacggtaaaatacatacgattatgtatattttcataaaaagcagtaaggctaagacgaataaaaataatttttttttgtgaataaatagaaaataataaatgcgattgaagttgaagacatgaaaaattggtagacaaaagcggacaaaaaagcatataaatatggatgaaattgctagactaatcaaaggaaatgtttcaagggtaaggaaattgattttgttgaaaaaatgaaataaattattttttagattaataaatttgtaaaatgtgaaaatatttttttgaattatacttgaaaatttataaattaagaaattgaaaaatgccaacgacaaaagattctgcacatccgggcatcgattcggacacatccgaacatttttcaacccgaagggtcatgaaacttgacgaaaattatttgtatttataaattaatttaataaaagtgcattttaaattttatttaatttattctaactttttgaatattatagctcgaaaattttaaaaggccaaacttatcaaaaattgctcatccttgctagtcttcttccattggtggccccaaatgcctgaacgttaatatctggtcatatttactaaatttagaattaaattaaaacacttactggtaaatttctgtgaaggatagaaacctcgtctgttcgagatcagcggcaccctaaaaaagttgactcgaataattgattaaaaaattaaatgtcaataagattttgagaattatttttaaaaatcaaccaaaaaattatttaactcaaaattatttatatataaaaaatttaagtctttgaaaattttatataatataagcatataaataatttaataaaaaccaaaccgttaatattagttcacggtaatcgtccaatatttgactagcgaccccttatgcatcggtgatcaatgctttaatttgccgtttcactttgttgtccatcggtagtttttgctttgtcctaaagaaggcaacttacaaccaattgcgcgatatatcgggcttgaacataatcaacagccgatgaacactttcccttttttccgagaaataccatttctccgatacggcggctacccatttggatttttagcacctaaaaatcccatcactattcattact

SEQ ID NO: 8581 - DNA, 1809 bp, Heterodera glycines
  unsure (1)..(1809): unsure at all n locations
atttttttggaaattttcgattttttccagaaatagaaaaaattttgncctgagcgggacattgagtcccgggcccatacntcgtcaggggttggtttagccaaaaatggccttagagcaaaattgtagagctttttaagctctatcgaacggtgtacttcattttcgaaaattttcaaaaattttcgagctaggccccctagaaattttcaaaaattttttttgggttgaaaaagagggtgaaaaaaatttttctggggtaaattagggtcctgagcacaaatatgatgtttattttaagtttcagattttttagaattttttaaaaattcgaaaatatttttaatttttttggtccttggaaatttgggttaaaatttgaaaattcataactcaatggaggactggtcaatttaagtgaattaaagctttaaaaatagcaaaaaatcgggagaattttatgagatttatttggttttataatgttcaaaagaaaaaaagttattccagaatttctggaaattttcgatttttcagaaaaaaattcataactcggttctgaaaagtcatactgtaaaagtaaaatactacaaaaatccgcaattttttgctctattatataaattttatttggcatttctatcacattttaaaaaaaagatacaaaaataaaagtgcttttgggattcgggaccaaaggggggtgaccaggatttttaagtgaaaaaaattttcaccaaaaatcttccaaaaacatgtctttaggcgttatttgggccgctgatcacgaatacgtgatcagattttacttttgacatcgtcaagacctcagaatccctgtgtgattggggattctgggacatgttctgaggggggggggggggggcagcaggttcgaatccggacggtgtaacattatttttctttgtatttttggcttattttacaatgtttttaattaatttgaaaatttcttttaaattatttaaatttattttttttaaattaaagaatttcattatttatttttgaatttgtaaaaaaaattcatttaatttcaaattaaataaatattcaattaataatttccaaggttgtttttaattaataaaagagtattttgttattaaaaaatttttaaattaaaatgcactcgatttttaacctttaataaaaacgtttccttatttatttaattttaaacaatattgtacctctcctaacaatgttgtaccacttctaatcacagttgtacctcttctaatcactgttcttcctcttttaatcactattgtacctcttttaatcacttttgtacctcttctaatcactgttcttcctcttttaatcactgctgtacctcttttaatcactgctgtacctcttttaatcactgctgtacatcttttaatcactgctgtacctcttttaatcactattgtacctcttttaatcactgttgtacctcttttaatcactgctgtacctcttttaatcactgctgtacatcttttaatcactgctgtacctcttttaatcacagttgtacctctttgaatcacttttgtacgtttttgaatcacttttgtacctcttctaatcacttttgcacctcttctaatcacttttgtacgttttttaatcactgatatacctctttgaatcacttttgtaccacttttaatcacagttatacctcttctaatcaaatttgtacctcttctaatcaaatttgtacctcgtctaatcatttttgtacctctttttatcatttttgtacctcttttaatcacttttgtacctccttta

SEQ ID NO: 8582 - DNA, 4049 bp, Heterodera glycines
  unsure (1)..(4049): unsure at all n locations
ctcctttaatcagttttgtatgtttttaatcactgatgtacctctttgaatcacttttgtactcttttatncattttgtacctctttaatcactttgtacctctntaatcagttttgtacgtttttaatcactgatgtacctctttgaatcacttttgtaccactttnaatcacagttatacctcttctaatcaaatttgtacctcttctaatcaaatttgtacctcttctaatcatttttgtacctcttttaatcacttttgtacctcctttaatcacagttgtacctcttctaatcatttttgtacctcttttaatcactttttgtacctcttttaatcacttttgtacctcttctaatcactgttgcacctcttctaatcactgttgcacctcttataatcactgttgtacctcctttaatcacagttgtacctcttctaatcacttttgcacctcttctaatcacttttgtacgcacttccggtttccattgcattatgcgatgtgtcaactccaattattggaggaaaccaagtgcatgtcggctgacgcaaagaccctaacagactaaaacgcgcctaggtagcgaagctcacaaagcgcgaagcgctttttcccagcccagatccgacggttcacgcacccgctagtttctactatatataaagaaaaggtggaactcgtcttaaaaaattataagtccttacggtttgcccggaggggcctgaaaccgtgacatcatttaagcaaatttttgaggcgcatctgggaaaaataaggatttttcggtccggcggccagttgagcgccagcggcgctgaaacggcccgaaaatttttttgtccgtctttggtggcctgtaactttgcgggaagaagcgggagcgaaaaatgcttggtgggaggattttaagttggagtgtttgggataatctggcgcttatttggcatgcctagctgcaaaagcctagcctgtacactttggcaaaatttgaaaaccatttttggcatttttcgaatttcgcgaataaatcgctgggggttaagcggagcgggttggtgccacttgagcatttgtgtagtttttaaagctgcatccgatggcgttttcagattttgaaaattttcaaaatttttcgagctaggccccctcgaaaatttttcgtttttgaattttattattttttgacgatttttcccaggaaaacggagaccactttcaagcaaccgtttttcgagctctatcgattggtggcatttttgaaaaaatttcaaaattttccggaaatagaaaaattttccggaattgagctccccattttgggttttcggtttataactcgtcaggtgttgattttagcggaaatttattttagagcatttttgtagagaattttaagctctatctaatgtgctttatctcatgtttttaccatgagtttaaaaaaagttataaaattaattgtgattttgaaactcaaaaccataggggggaccccatggttttgcatttcatgaaaaaattttttactcctaaattagccaaaatgcatttttatggcataatttgaggtgctgaacacgaatatacgctttattttgtgtttcagactttttggaaggtggttaaaattttttgaaaaatcgtcaaaatttgagccacggaaaatccagtgaaatttcaaaaattcataaatctcttcgtgtttggtcaaatttagtggaataaagctttaaaaatagagaaaaattgggagaattttatgagatttatttggaatttctatcttccaaaataaaaaagttattccagaatttctggaaaaattcgatttttcagaaaaaaattcagaactcccttctgaaaaagtattttataaaaataatatactcaaaaaattcacaattttttgctctattttataaaatttaatttagctttttatcacttttttgaaaaaagttatagaaataaaagtgattttggaatttgggaccaaaggggggtgcacatggtttaaaggggcgtgaagcgcccgtcctgaggccgcgaagcggccgaattccctccaaaaattaaaaaaacgggcgcgaagcgcccgtcctgaggccgcgaagcggccgaattccccccaaaaattaaaaaacgggcgcgaagcgcccgtcctgaggccgcgaagcggccgaatgttctcaacataattaaaagacgggtgcgaagcgcccgtcctgaggctgcgatgaattgctaaatacatcactttctagcgacgcggcgaagccgcgtcccatagcgcgatagcgctttaaaacagcacactaatgcaattaatgttttgtatgttttaaaataacaaatgagcatgtccattttctcttcatccaaaagccaattgcctacgccgcccccgtcaattcccacacgctagttaatatatacgttatattgacaaggagtttcgttgctaaaaccattttctcccggccgaaggccgggagcgccctgaaagtggtggaagggtcttacaactttttgaggagcatccgggaaaactatagagaaaaattcagcgcggacgactgagtcccggggaccgatttctcactttttcttgcgtttgttagcccataactttttttctaaaacccgaatcaaaaagtgcccgctgtgagggcactccccacaactgtcctctacatgatggtattttttatttttttattagagccaccccctggcctgcacgcttggctaactgaagtgtgctcaaaatgtacacttcagtaccaggcgaataactcgccaggggttgctttgaccgaaaaattgtttctgagcaaaaatgtgtagtatttgaaaggctatccaaccaagttttaaaatttcgaaaattttgaaaatttttcgagctaggcctaaaaaacggttttcgggtttttgaattttaggattttttaacgatttttcccagagaaacggagaccacttccaaaacatagtttttcgagctctatcgactggtatttttttcggaaaaatttcgattttttcccggaaatagaaaaaatttttggcctgagcgggacatttgagtcccgggtccataactcgttaggggttggttttatcgaaaaaactccttagggcaaaattgtagagttttttaagctctatcgaatggtgtgccatattgccggaaattttcaaaaattttcgagctaggccccctagaaattttcgaaaattttttttgggttgaaaatgggggtcaaaaatatttttctggggtattttgatgtgctgagcacgaatctgatgttaattttcagtttaggaaattttagaattttttaaaaattcaaaaatatttggcaattttttgaccctcaggattttgggctaaaatttgaaaattcataactcaatggaggaacggtcaatttaagtgatttaaagctttaaaaatagcaaaaaaatcgggagaattttatgggatttatttgggatttctatcttctaaagaaaaaaagttattccagaaattctggaaattttagatttttcagaaaaaaattcagaactcccttctgaaaagtcattctgtaaaagtaaaatactacaaaaattcgcaatttttttctctataatataaattttattttacatttttatctcttttttgcgaattgttataaaaataaaagtgatttttggtttcgggaccatagggaggtgaccaggatttttgggtggaaaaattttttcaccgaaaatattccaaaaacatgtctttaggggtattttatgacgctgatcacgaatacgtgatcagattttacttttgacatcgttcagacctcagaatccctgtgtgattggggattcggaggcatcattttgaggggggggggaagttcgaatccgggcggtgtacattatttttctttgtatttttgggttatttttaatgttttaaataatttcaagatttttataaatatttaattaatttatttaatttcattatttattttttgaatttataa

SEQ ID NO: 8583 - DNA, 4919 bp, Heterodera glycines
gatgaaaatttttgctgcatccgtaaaagtggtgtatccaatggcatccgaaattttgcgaatttgctcaagttggtccctaaacgttagcagtgatggaagaattggccagtcaatacacagaaattaggcacaaattagtcagaattaatttctgggaattggtcaccaatccatatttagtgccagaaggaagcgaagtgtgtgtgtgggaaagcgggataaaggagatgggagaactctctaaagagagcgcccgtggctcagtcggctagatcattttacacggtatgggaaggctgtgggttcgagtcacaccggacgagttgacttttaagacctacacacacaaaaataaaacataaaataatgtatatactaaaaaactgaatttttgtttccaacttggcaaccgaactttattaattaattaaaaatcgaattttttgggggttttaagtcaaacaaaaaatccaagtaatcgcccttttaaataatttttttgtaggttttcaagtgaattgtaaaaaatcccaagtacccgcccgaccttggccttgcccagtcctcccccctttgttggccacctgctctgtgtgctggcaatttctaacagaacccgcaaatcctgctttattggcggctgcgccagcatcccttttttgtgttgtttcgtttccatctcattgttctttgtgctcttttcactcaatcctttgtctttaataattttttttgctgctacaaatgggttggccattgagtaggacggtgccgacatcagcgaggcaatgtcaatgccatcctttggcattccgttcagtgccatgttcaactgctgggctatgaacaccggctttggcaacatcactccgtagaggagttgacggaaatttttggacactttgtcttcattccgattgtccaccagcagatgttcctaaaaaaaattctaaaaatttggttttgtttttgatgaaaaactggcgtccgttaaaagtgttaaatttggaaagaaaaaaaacaatggatcatttagtaaaaatttaaataaggatatttatttaaaattagtctgcctgattagtcatcatgaaagtgttaaataagacaataaaggtacaaaaatatttgaaaaggtcaactaatttgggaattggtttttttaattaattctcatagagttgctaattaagtgttcattaaaatcaaaaacaaatttaaacttaccgtcaataatttcttcacacattgcatgtacattttcaggtgattgctcatgtgttcttcaggcgtttcaatctttttttccttaagagaataattaattttttgcactaattagtcctttatttgtgttaggggtgtccttaatcacacaatgacatttttcaaattttaggcattatcaaaaccaattctttcttttctggtcaatatgggtttatatgtaaatcaaagaaaccttggtaaatttcccatatgtaattggattctttttattattttaggcgaacaatttaaatttttttcaaacttacaacatttgctttctgtacaatgtttggtgtccttgctttttgtctccttgatgatgatgatgatggtactgattgagtagaagcagatttatcagaattattatacattgagaaatcgtagggacttcggtcgcctcttttttggcgacgtgatctctgcttgtggtggtcactgctacttggatagttattattcaccatagcattagcatcatttccaacaaatgaaggtggccccgccattccgggttgctaaaatgaagaaattggtcacccttttatgctttttcaatgccattcaacaaaattccctaacaaaattgaaagcatttgccacagtgctttcccaaacgaaaaaaaactggcaatttttgattctaaagagttttttaaagtcagattttgatcaaaatccaaaatttctcagacatataccaatcataaattttaaaacgcttaaaaatatattcgaatcataaatttttaaaacgcttaaaaatatatacgaatcataaatttttaaaacgcttaaaaatatattcgaatcataaatttttaaaacgcttaaaaatatattcgaatcataaatttttgaaaatgtttaacaatattaccggtggatattggtttagcggtgctaaagacccactgccaccagcagttgaagctaaatgagactgtggcagaccaatatctctgtattgacttgagttcggtggcatgctgaatgatgtgtaagtttggtactgcggagatggcactccattaaatgacatcgaatactgttgcgtcggtgggtactgtatttgatgttggtgttgttgttgtacacttggtactgaattattcaatttttatttaaaatacaattaataatttcaaatatttattcatagttcggtcgtaaccttttaagcgtgattaaaaaataattattttttaattaaatttcgtgttatattgttttgttcataacctgtttggtatggagttatattgtttgttggtgttgggtaaacggagtctgacagtgtcatgcttggtccaatagatgacatcgaatgcggtagcattggtgacccagttgtatacatgagcgaatcatttcgctgagttgtatacggttcctgtatttgattaccgtatccaatgtttgacaccgaatactgtagcgcttgcggttgtccaacatacggttcatccataaggttaattggtggtacttctttattcggcttctttttgacaccagcagcagatggtggctttgttgatgatttttttggcttagcaatcttttcacttgagactggaattcgtttttaatataaaaattgaaaaattagagttccgccggtccaataggctaattccaacgtttttagaactttgcgataaatacggaaatttggtcaaaaaaggcgcagaaatttaaaactgtcccacccctatccgtccaaattttttgaattttgcgaaaaatacgaaaacctggccaaaaaaaggctcagaaattcgattaaccataaaactgttccactcctatacgtgtggtaggtaatttaaaattttgagattaacttatttaaccttcattttgcatcggctttttgtcactgctttttccttgttttgtttttttctctttcccttttgcttcttctctttcctttatttgtgctttttctttttcattatcatcttccttttcctcctcgtcttcttctattatcacttcatcttcttccgtcttctttttgaacacaatgactttctataaaaaaagaatatatcgacatataaaagagcttcaaaatgttaaaaattaaattatgtaattcgactttagtgtttggcgttgccgagagggactgttttaatttttaaatatttttaaaactcattaataccgagaaattaagccatttccagccaagagtgaaacggaaatgagcgcagaggaattgggacagtctttttagtccaaactccccaaaaaattaaaggaaaaatcaaaaatttaattatttagaaattataagtatatgctaaaacaaaattacattttcttatatcaacaattttttttaaaaagttcttacaaaaagttcaaaatttttcgattttcaagggtgtattttttaattcccaaaaagtcgatccttaggggtgtatttttcatttttattgcatttttcttatgaaaatttgccaaaaatgacttaaatatgctctaaaaatgaaaaaatggcaaaatatgcatttattctcgaaaaccctcaaaatatgcttttatatgcactaaaaaacttcaccaaatcaaaaaattttatcgcagaaatgctatttttgagcccctttcttcgtagcatatgcgcagaaaaaatatgcaaaagcatataatttatagccctaattataaggctttaaagtgtcaattccccagcagagcattttccgttcaacttttaaactcacatcaatgtcatcacacattgccatgttgctacagtatctgatccatgatttgttggccgagcaatactgtcgcatgttatcgtaacggtcctcgtcatccaacgcggtcagtgcgtcgaacagtttcatccagcactcttccgtcttttgcgagtcgcactgtctgacctcacacaaatactgtatcagcttctcctccttctctgtctgctgcttcgttagctttttcaccatttttttcatttgcactgtctttgtttctttttttgcttcactattttcaacgctgtctgcttgtctgtccgaactctctgttttaccaactttctcatcttcctctttttcttcctttttactattttcttcctctgtgttttcatcttcctttccttcttcttcatcaatgtccaaaggtcgtgcaaattcaaagtcaagcgttatttcgccatcgtaatcaccataattgaaaccgttggccatttgttggtgcataattaaatcataattgtagtttgatggattcgaccaatcagctaccgttttttgtggctaaaattattcaatatacattttacacatgagaggaaagttgaaaagcctcgaaaatgtgaattatgggaaaaaagacatttctgactctaaaaccctcggaaaaagtcaaaaaattactttaacttcctttattttttaatctcttcaaactttttgattacaattggatgcttttagtaaataccctaccataatgccatattaatggattaaaattaatagtttttacttcttctcgtcgcgcgttgtgattgaagctagccgagccaaggaattcagtgcttggcgtcccaacataataaaggctgtcaatttgctgacctgttaatggctgttgcggtgaattca

SEQ ID NO: 8584 - DNA, 1159 bp, Heterodera glycines
tgctcaccaatgtttgtgttacatttgtcaaatgcgggcgtattgttcgaatcagaggaatttttgcaaattgatcagaattttctttgtgaattattcgtacgtgatcagttggtgatcagcaatgaatttgaaatttggcaagctgtaatttttaatttaattttattgtattaaattgatctttgtttttccgtttaggcactccgttgggccgacgaaaagtgccgtaaaaatgccatcgaatgttccgctgaaaatcgtcgtgatgctcttggtccggcactgttcaaaattcgtttccctcttattcatacaagtgagattgccagatgtaaattggagctgcgaatgttcggcaacccttcgaattgtttcgcaaaatctcggaacggagcatttgacgacaaaatgtgaccatgtttttaataaggaatcggacagctggggatttcctcatttcattacttttacagtgagtggctttaaaacaacttttattcgcttaataattgtaaaattaagaaattgatggacccggacaaaggattttatgaaaaagagggggacaaagtgacattggccattgattttacggttgaagaaaaagggacaaagtgcaaattggtcgataaataagcccattcaatcactatttctgttgatttgatctttttgaaatttatacaataaaattcggcagcaattttaataaaaaatattgctttagccccattttcaagattagctttggtgcttttccattatgccccgccagaaaatgtcatgatcccgataaatcacaacacttttcgagagtaagttgagctaatcaaaaatgtctaaaacaggtctcccaaccagggctggacgtaactgattttcaattacggaaatccgtcattacggcgattttttcagttacggccatccgtaatccgtcatgacgggggtcaaaaaaggccgtaatttggcgtaatccgtaatacgtaatccgtaattttcaaaaaaattttttaatttaaaaaatccaatctaaaaattgttaagattaatttatgatcagaatatctgcttgtttttttgaggtgaaaatcccaatagtttttttcgcggtgtgctttttacaaaaactgggaatgttggggggggggggggg

SEQ ID NO: 8585 - DNA, 2215 bp, Heterodera glycines
  unsure (1)..(2215): unsure at all n locations
agaaaaataaaattcatttataaaaaaatatctgcaaaagaatcgtctcgaaaaataatctaanaagccagttacggatcaaaattacnggaaaaatcccaaaaaatccgtaanccgtaatccgtaatccgtaactccaaaaaggccgtaatttccgtaatacgtaatccgtaattacgtccagccctgctcccaactgaaaattttcaaaaccagcatttggccgacaaaaaatcatcttttggaaaattttactccaaattaaaagaaataaatagaaacattcgttttttgcggcgcattttttccacagtgtcgataggctaaaaatggccattttgaggttttttttccaaaatcagcatgaaagttttgcgctttgaagtcataaatagggcttcgatttttaggtttttacatatttttttcctgagctccccgtggcctgaaacgcacgaaaaacatgtttttttgggctgttgttaagctacttttcgagttattagcacctattttctaggtttttatttttagcacctaaaaaacctaaaaaaattttaaaaaacttattttcacctattttggcattttgcccaaaatttgttaacaaaaatgcaataaaaaggaaaaacagacccctaagaatcgactcgaaaattttcaaaaatatacctatgaaaaaagaaaaatttctcaaaaatcatctccaaaatttatttgtttattttcttggcgagaattttttattttgaaaattatctatctcattaatgatttggcataatatttttgctttttgaagaaaattttcgattttacaccccaaattcggaactttttggcacctattttcccatttttagcacctattttgggggttttttagaacctaaaacctacttattttggcagtttttagcacctaaaaatcgaagccctagtcataaaagtactgaaaatggagaaactaaaaaatcatgtcgtcattgttttttatagtttttacataaaacgattcagttaaaactaaattatttaagaattagaattgatgagtagagctaggatttttatgtgctaaaaatcctgaaatatgtaataataaaatatattctaaaaatgctgaaatatgtgctaaaaactccaaaaatgccaaaataacatacttaaaataattatatatttttaaaatatttttgtgtgtttggtactttttaattgaatgcgtttctgcgaccgcggttttttcttagtcagtcaatggaatcacttaaaaactataaatgtatgtgatgcattgcatgtaaaaatttaaaaaatccattcatttatttatttattctgaatgaatatttacactcgcttatcgcacacataaatacatttattattattatataagcagcataggtatagacatataatataggctcggtctaattgtattgctttgggttgtacaaatcatcttcgtcaagctcatcttcatacgatttcggtcggcccatcttctgctgctgctgttgattgtattgttgcggcggcttgtacaggtcatcatcgtcggccccagtttgttgttgctgttgtggtttctgactgtattgttttggattgtacaagccatcgtcggcaagtgcggcttcatacgtcggtcgaccaccaccaccagccgccgctgccttctgctgttcagtgtactgcttcgggttgtacatgtcgtcgtcggccagcttagcgccgtacgctgctgctggtcgctccgcttgcttcggctgttcctgctggtcgtactgcttcggcttgtacatgtcatcatcgttggcggcccatatcgaagtgggaacagccttaataaacgccgtgtcaagaaacattaaatgaatacaacacagcaaaacagagggtgcacgcttcgccccccgtgaaattaaaaaaaatttttttttctaacttaagaatttttcaagaaaaaatcttagtaagttttttcatatgaaaattctaagaaaaaatttttcgatanattttcagcgattttttttgaaattntcttgaaaatcttagtaattcaccataaaatttctcaaaattttttttcatagatttttttatggaaaaacttattaagattttttcttgagaaatttctgntggtaattttttttgtaaattttcacggatggaaacgagctgtccccgcaaaacaaaaact

SEQ ID NO: 8586 - DNA, 3663 bp, Heterodera glycines
  unsure (1)..(3663): unsure at all n locations
ttctgtccttaattcctcctgaagccattttggcaatttgttcagccgataatcgaagagtttctctgtcatcggttcggcggaggacagtgccaaactgcagaccaaaagctgaaaaaaacaatggaaccgattgatggcattttgatccgctcattatgatcagcctgccttattggcggagaagctattcacagaaatgtaatagcaaaagtgttctccgccgaagtgacgtctaaacaaatccaacagaaactgacgcccttcggcaaccatcgaattcttttgggggatgctaattaccgcagtcattaaattgatccctacattaatgtcgggcctgacgaagaaattgaccattaaagtaccttaattaatttttattttttgttgcatttttaaaactaaaaaatgccatttgaatggagcattttgacaaatttgtccgccattttgtcatagtcaacaaaagcttcgaaaaatgggcacaaaagcgggtatttctgaccgggagggatggcacttattttgcatgcgtcgacaacaacacaatcaaagcgtccatctaaaagtgacaattttgccacaaatgtacataaaaaacaaagttattcactgattcaccgttctcggcccattctctgatgaattcgacgccgtcccttacgaccactttttggcgcggcgactgctcaagtccgaaccatttgcgcgcgatgtacctgtgncggcaattttgttaccaaaatggccactccctcaatggccggctccaactcgccggacaccacttcgtgctgcaatggcaagacggagtccgttcatttgacctctcattggggcattttcgttctcaccgatgggtcagtttctagtagaaagttcggcaccgatgccccgccgaggccgaccatcagagtacggcgtgtgggcccgctgggctccaaccgggcacagccggagacgaacatttgggcggctatcgctttcatgtaaggcagggggaggttgctcttccgaaccgtccaccggcgggcattttgtgccgaaaatggcgtatctgatggatttgatatcagtgatttattggagtgtaggacagatgtgtacggactgagttttgggttgggaattcagtctcgatcagcaatcattactacatttaatacaattgcttccactaaattttatgccaaaattaattctattttcaccggggtcgtcaggcagcaaatcggcaatagaaaacacaacattcgcttccgactcgtccattaacatgcgctggtaccttctcctgaatttattcattcattatcaaaaatctttaaaagtcggagtgttcggcactatgaaaagcctgtaaccattcaccatttggtgccgttcgattgccattcgttccgaactaaatcctcgactttgaagcagtgatcggccccatttggacagatcacttcctgcaaaatcagaagggaattctctccgtcccaagcagcggaacgggcggaaggcgaatagacgacgaatttggcattttgacggagggaatgccaaaccaaaaactgaaagtgatcggagaagtgatcaaggagaaggggagaaatgcaccgaaatggcagagacagagacgagacagaagaagagcagagaaacggtgtggggacgaaatcggcggctgccgaacggacggacgagggacggaacgccaaaattcttacaaataggcatcttttcttaaaatacaagtctgccttatattctaaattcgaattctgataaagtataacaataaatagagatacaaaagaaaaaaaattcttttttagttctaactttctctcatttcagtgtactatctttttttttatttgtgttttagggaaaactacttatttaacttaatgatcatcaaaacgggtgcttggtcatgtgaggatttttcaacatgggtttttaaaaaagggtttctattatatgtatgtatttttttatgctggcattggtattaattttatttttaatttataccaaaaattatcttgaatagggtaattaatatgtccaaataccgctttgtaagaaaatttccgaatcgaaaatttaccggtttttttgaaaagtttttttagtttaagctattttgatttttattttaacattaaaaataacagaaaacattatatcgatttatcagcaataagctgtagttttgtcctaaaaaaatcctttcgttttatgaatattcatttcgtcgctcgctagtcatcgcaaatcagcaaaatgtgcagccttttttcgtcagatctatgaaaaaaaatatcgaaaaagagtcaagacagcaaaaagttggatattaaaaagtaggaatttatcgaatttaatttcaaaaaagaataaattcgaaaccaaatctccgccttgggcttcttcttccacatttcattttcaatgctcatttctgtccttaattcctcctggagccatttgggcaatttgctcagccgataatcgaagagtttctctgtcatcaattcggcggagtaaatgtcaaactgcagaccaaaagctgaaaaaaatgatggcaccgatttatggcattttgaattccctctttttgtggtctttcaaaacttggcttattactgaaattaagtccgttctaattaaaattgaaccaattaattataaaacccaaattctcaaataaaacccatttctcatttggcacgacgaatgtgttgatgatcagagttcagagttccttcatttatttgacaggaattatttttccttttttaaaatccttccactctaagcatttttttatattttgtccacaatcgttttgggattaactaaaccctcaaagggacaaatcaaaaaggttttttggccggagggggcttttggcgccgcacgcgtcgattatcagacagtcaaaacggccatcttaaaaagcacaattcaatacaactcaatttaaattcgtttaatttggcaccatccaaatgcgaaacacgcgaatgaagagtaatttattcaaaaatgcttttaaattataaaagaaaaattaagaaaatataaaattaattgtaaaagcctaataagcgactggcttcctcagctgtgtttcaaatattcgtccacattttcttcttttttttgtccttttccgcgttcattttccgcctttgtattggcccgagcggtagccgggaatggcacaatgggtgtatttgttggtgtacgagcagtggcagcagcccttgaaggtgcagctgtagcagccgcggcagcacgtcactccgtccggcttgccgtcgccggtgcacacgccgctgggttcgcaatggatctgagggcaataataaccaaattagttaattattctaacaaattaatggacaactactaatcaagccgaagaaatgaattaaactcaccaatgccattccgatgccggacaaggcgagcaaacaacaaaataaggcacggcttcgccattgagcagaaaatgcaaccaaaaaaatagaaaattaatctaaaataagttattttattaatttttaaattcaaaatatttgtcgatcaaatttctgacaaaaggccatttaaatattttatcgacgtccattctgctgaatgaacttaccataaata

SEQ ID NO: 8587 - DNA, 1764 bp, Heterodera glycines
  unsure (1)..(1764): unsure at all n locations
ttcgattttgacacaaaaatccaccacaaacaaatgaaggaacctctaaaggataagtgaagctggtgcccacaatgcctccgagagcgccgccggtgaaatgaataaaaaactgaaaaagaaaatttttaaatatcgaaaaggttttttacataaaaaaaaattcttttgtgataaattgttcttgggattttgagtaataattcgcgtgcaaaaatttattcaattttttttagccccaaaaatttcccgtttttccaacctaggaaaaaagttttatgagtttttcaaactcgggcttacctcggaccaaccgccactttgtgccaccaaaccgtcaccaccatttttgccgccaatgttttgtccatcggcctccgccaaaaaatgcatttgccttggacatttggaatcattcatttttttagatttatttatactcttaaaattgaaagtgttgtgatggaaagtaaaacccggattcgaaaaggcaaatttcgaatttacagaaaatttaaaaattccgaagctccttctttcatttttttttctcgaaacaaagtcacttatggcgatttcaaggtcggagaatccgattctgacaactatttcgacccaattccgaactccgaacacagtctcgaacaaaaagccgaaaattcaatttttcgaattcgcatttttggtctacaaatggttgaaaagtactttattgaaacagtgatgatttttagtttgtttccttaccattaagccggttttaaatcaaaaatgcaaaattcgaagttacgactttttgttcgaaaacgggtccagggtttggaattagaccgaaatagatttcagaatcagatatcccgacagtgaaaacccttaaaatgactggggaccagctcggctactaggtatgcagtgttaaaatttttcggggggattaccccttcacaaacaaacaaaaaattttcgctgacccgacgaatttgttgagggaagtgctgaccaactctgtcccatttcgttgttttggcacttggaaagtgcagaaaaatgggagttaaacattgaaatatcatttttatccacgccgaaatcttaatttcttgaaaaattatcattttttgttgtaaaacgaggggggggggggggtgggggtaagaaagccaagaaaatgacatgagaaactgaaaagaggtgtatgtttaaatggaaaaataggtaatttgatatgcaatatttcataaattacatggatttcgattaatgtaaatcctaactaaaataatatttagtttaacaaaaaacaacactaacaacaacaaaaataacaacgacaaaaaatcaaagtgaaagttgagcaggaagcaacaatatgtaagcgaatggtggtaacaaaaacaaaaaaataatctgtcaaaatctatgatgaaattcaaaaaaaacaaacaaaaaattttaaatgaaaaatttttataggcggctaggcgagagttgggtagggtataattaattgccgatggacagacaatcttgatcgattatcgtgccacactgcgattttttcgtgcaaagaactgcttcaactcctcatagcagccgatcatgacggcacaagcgggtgccacgcgcgcaacacgcggcacggcgcctggggcacaaagagaattaaaaacaacaaattatcggtgaaagcaaacaaggcaattttgttccttagccctagacaataaagaaattaaatttttttccctaaatntttcagaaaat

SEQ ID NO: 8588 - DNA, 1602 bp, Heterodera glycines
  unsure (1)..(1602): unsure at all n locations
tgtaaatttcaaaatttgtcgaggaaaaaatgtataaaattaaatttataactcaaaggaggggcccccaagtgaattgtcacagattttcaaagaatttcttggtttttgcaaataagtatttttcattgttttcaattttttttttcgagggaagggcgggggtaaagtgcaccttgccaaaaaaggctttgcttcaaaaacgcaccggtgaacagagcgccaagccccttgctgttgaccagctcgcgcatcactccgaacatgttggtgttacgcgtcgacatttttgctgccttctcatggtgtgcatgccgttcagctgggaaagttttttttttgaaaaatttgcaaatttaaaaatttttcataaattttttattagaaaatttcaagaatttttttttttgaatcgcaagaaaatagaatcgtcgaaatttttttctaaaaaatgggcaaaatggtacaccccctcccccatgtacgagttaaagagaaaaagagggacggctagagaaaataggaaaataagaggaaagacagttagacaaatgaggagagattggggtgtgctctcccagctgtgtccgctaatgagggaatggcacaaaaaactctaaaattgacgaatttccttttaaatttcttcgctcacttaaattttttgaaaaacttttaaacgcaccatcaatttggcccaacgtgatttgttggtgggttttgaccacgtcaaatggcaatgtgagaagggcagcaacggagccggacaaagcgccggaggcgaaggaaagcgcaaagttcggctgttggcggtgggcaatttgcatcagacggggcttgctgaactcgtacagggaccagtagatggctggaaaaaaaaaattttaatgataatttacaaattttagaaaaaaaggaaattcccataaattttacatttttaaaatatgagaaaattttacataaaaaatatttacaaacatagaatttccagagaaaactttagttttaattttcagcggtttttttggacaatttaaaaaaaatcttagttcaattattattaaattttgaacaatatttttatacaaaaaaaaatttttttttcgacaaaccggaaaatggaatgtcacgcattattgtcgctgtccaccctcgccacagtgccatgtacccatcagatttgactgtccgcacaattgcacctcgcaattctaaactcaattaaaattgcaaaaaaaaaaaaaaattttttttgattactctaaaattttttttgttacgcccctctcacaagaaaaaaaaaactgcaaatttatcatttcttggtaaaattttcctcgaaaaattggctatttttaggcatttttaccgctataggagagacgttcggattgcattttggtgcgcaccaattccagcggggacaccaccgacacggccatcgtgcgggcgacagtgccagccaaaagcggngccatgaacgctgaaattagtgcataggtatataatgaaaaaaaaaatttcgcttangtttcngcnaattnccgtacaattnnttgactgnncganagcagcaaaaaaaaaaaaaaattttttttt

SEQ ID NO: 8589 - DNA, 3249 bp, Heterodera glycines
aagggcagcaacggagccggacaaagcgccggaggcgaagcaaagcgcaaagttcggctgttggcggtgggcaatttgcatcagacggggcttgctgaactcgtacagggaccagtagatggctggacaaaaaaatttttttaatgataatttacaaatttgagaaaaaaaggaaattcccataaattttacatttttaaaatatgagaaaattttacataaaaaatacttacaaacatagaatttccagagaaaactttagttttaattttcagcggtttttttggacaatttaaaaaaaatcttagttcaattattattaaattttaaacaatattttcatacaaaaaaaaaaaaaaaatttcgacaaaccggaaaatggaatgtcacgcattattgtcgctgtccacccgcgccacagtgccatgtatccatcagatttgactgtccgaacaattgcacctcgcaattctaaactcaattaaaattgcaaaaaaaaattttttttttgattactctaaaattttttttgttacgcccctctcacaagaaaaaaaaaactgcaaatttatcatttcttggtaaaattttcctcgaaaaattggctatttttaggcatttttaccactataggagagacgttcggattgcattttggtgcgcaccaattccagcggggacaccaccgacacggccatcgtgcgagcgacagtgccagccaaaagcggggccatgaacgctgaaattagtgcataggtatataatgaaaaaaaaaatttcgcttaggtttcggcaaaattccgtacaaatttttgactgccgaaaagcagcaaaaaaaaaaaaaaattttttttttctaatttacactcaccggcaccgctgaaagtgctgttgtttttgttgctggccaatgcgttgcgccacatgcacaacatgttgtcgtacattgtgaagtaaaacacagtggcggggatggcactgagccttaaaagggcactttttttaattcaatcattaatcaaaaaagagtaagtacatgctttagttccaaccgcacgcgagaaaatttaaaaaaatataccaaaacttaaaaactttcaaaaaaaagccctaaaattgttaaaaaaaaattttgattggatttttttatgaacaattttgaagttgtagtaaaaaaaaattttaaacattactttgccaaaatttgcaaattttttttaataagatttgcccttatcccatcatgtttcgtcctttttgttagccaaagattttcgagttaaaaccagttttaatttgctgaatttttacattgtgggcgacaatcctgaccagagcgaacggagtccctcaattcgaacaattttcacgaaagcgtcctgaaaaaaaatttttttgaataagatgcaaccaaccatagtttccaaaacggatcaggacgagataaaactgattgtaaggtccaaaagatgacagaaatttttttctgtcagatattggggtactgaaaccaaattggttgactggtccccaatttttgggacaaattacaccaggaattggcacaaaaggccgactattaaatttgggccgcaaaaatcccaaatggtccttaaataatgaaatgtcgaatagcaggggaacccaaaaatgcctgaaaaacccaccaccgaccagcgtgccactgaaatggcccggtcggttgaaccattcgcactgttcactgccagtgccaatgccggccgctctgttgccacaaactcggcaaagatggtccattaggccttaattttttaatgatttttatttggacggaaatttttggcttttataattttttttttttttaaaaagacctaaaatggacccaaaaaattatgcgaaacgcgacaaaaaaaattccattgatttcaaatttttattattgtgcaaaataaataaaatggcattttttgaaaaaatccacccaaaattttaaccaaaaaattgattaaacagagacaaattgtccaagtgaacatccaatttttttttcaaaatttgccacttttagcttttttaagtaaaaattttttatataagcctaaaatggacaagcaaacaaatggtccaatggatctcaaaattttgtttattttttgaaaaaaccaacctaaaatttaaccaaaaattgattaaataaagataaaaaattgcccaattaaatgtgcgatttttttcaaattattaatttatgataaacgatctaaaaaattatcaaagtccaaaaattcttgaaaatgcaaaccgtttgagaacaggaaacattcgccctccgcgaggggcctcacttggctttgcagacgaattttcacgacgtccatcggtgtaacttgacaaaaaaaaacaattttttatttgcagtgggtgcagaaattcccaccctaagccatgaaatttaaaaaaatacgagaaaatttgtaaatttttgagtccatttttctgaattttcatgacaaatttagttaagaaaaaaaaaaaatttccgacagcttcaacaattgcaggtacttccgtgttttgctacccccccccccccccccctcgaaaaattttaaaaattcatattttggggttttcaaagtcactgatcacgaaaatggtgttttgtttgacatctgctgatgatatctggtcatagattaacaaaatatctatgatttcgggtataattttcataaaatccaagggaatttattcgtccagcgcgttgtgattataggcgtctccgaagaaaaaaaaaatttttttttttttttttgcaaattcaacggtttgttttgaaactgacacacaaatttaaaacaaaaacaaaccgacaagcgatgtgaacaatgcaccgaccgatgaagctattaaaagaaaaacccgtaaaaattcatatcaaaattacactcaaaaaaatttctcaccaacaatttgttgtgggaatgtaatgtcaccattataaacggtcgttgtttttgttgttgttgtggttgatgaagacgaagcaaaatcggtgtttggcattggaaaatttcgtttaaaattaatgccttaaaaaactatcgactataaaatctttaaaaaaagctggccccatttggtttcaaaaaaaaaactctgaacacaaaagctcggcatatggtctggaccaacgcctagacttgctggatttttttgaaatttctcttaaaaagcaaaaaaaaaattaattgcttaggaaaa

SEQ ID NO: 8590 - DNA, 2287 bp, Heterodera glycines
  unsure (1)..(2287): unsure at all n locations
tgtcaaagatggcttttatatgtaatgcttatttttgcctatttcaggctttttgtgcttaatgtgcctattttcaggattttcgaaaacatccttanncaaaaaatttnaggggtatatttttctgaatttttgtagtcgcttcttaggggtatatttttgtgaaaattttgggtcgattaatagcctaggagtgtattcttcgttttagtgcatctttgttaacaaattttgtgcaaaacaccaaaatagttaaaaagtaacaaaacgccaaaaaaaagtgacggaaattgactttaatttaaactagagtgcagtgggaccgggaccgggatcgggccgggaattcacggtcatccgaggtcccggttcccggtcccggattttgaaaagctcaggtcccggtcccggtagggcaaccgtttatttattttgtacaacttttctctccaccaatttcctctccaatcctaaccaatcgttacactttactgtaaacccaagccaagccaatttgtgcccatcccagctcactctcgactccacccattttctcgtttgctatttaaactgaactcattccttgcattaataccttttttcctactcactttgactcattccaattttacttacctttctcacttttgctaaataaactcattaacgaacttaaagtcttgctcttgattgggaaataagccgggaacacaacatctttttggtgccacgacccgggaccataaaaagttcccttttcccaaatttctgagcaaggccgagtgtcgaattgctgtcgaggggtggtcgaagctgtgtgctcccaaccgaagagactaattgcggagggctagtcgaagctgtgtgctcctagctgatcaaacggataattatttgagttagtcgatctgtgtgatcctaaccgggctgtgtgccaatttcaaagaaaaaaaaaagtttgaaaaagcagtaaaatgtcaggcgagggaactgatttcaacccagcttttttcacggtggaggaaaatgctctataccaaaccattctcgagcgtttgcgttcttttgaagctgcagtttgcagccaatttcgaaagcttgaaagttgtctgaatggaactgaacgagccacaaaggaccaattgagccgtctccagtcatcgctacaaaatttggacgagaatgaagagatggatgaattcgagactaaggagaaaattttctaattggaagagaaactggaggagatacataaaaatttgaagttcttaaagctaatgtgtctgaaaatttaaaggaatgttttgagaaaattgatactcaggtaaaggaatcgaaatgtttaattgacttgataaatgagaaaattgagtcggtggagaaggaaatgaaattttcgattgacgttgtggaaaccagagtggaattccttgagctcgaaaaatgggcgattcgtcacttgatgaatattggcaggacaacgggcaccatgaccaacaaaaaaaatttgcgcagggcaataattcgtcagaaaatggagagaaaagagatgcagataatggaaaggagagtcatgaaattgaaaatgatgaaaataaggacgaaaataatgaggggcaggaaaaggaaaaacactaatgggcgaaacggagaacttggaagtaatgatggctgaccctttcttaatgaatgtaattcccccgggtgtatatgactgaaacccaagttcgtctttttctcgatggtccgaaagattcatggaccttctttcgctttatccccagctcacggaagagcaaaaacttagccgtttacggataactctttcaggacaagcatggggagaaatggagggtatgagcccagccccaaccacgctccaggatgcatttttgacccctgacctacaatttgaggtaaaggcaggccgacactcaaattactcaaaagcctacgaaatggcacaacattttgaattgctgttagcatcgagaaaacaaagccaagtctctgttgcagaactctcttcaaaggttgaggcattaaccattcagacgcaaaggaacataggaaaaagagccgacgagaggcgtgtctgttattactgcaatcgcccagggcacattgtgagggattgccgagtaaggaaagaagaaagacaaagtggaaaccgacaaagttattataggggggacaggggggctgagagaacatggagaagtgattatagaaatgaaccaagcgaaagcaacaaatggggtaggcaaaaccatcgcgacgaaaattg

SEQ ID NO: 8591 - DNA, 1168 bp, Heterodera glycines
agctgcaccgagcccattttgagcatccgccgcctcccaacctgcgcaaatccaacttcttccacttcacagtcaatctgtacgaccgcgacaatcagcccattgaggtgggccgtcagcaaaaatgccaacaattggctggatttactgttttggaaagtcctacctattcagggttgaaaaaaattccggctaaaacctgctcatttgtgtgttggttgagtcgattaagcccgaattttttagtaaaaatttggcgattgccatagaattggcggctgtcatttaaaatgccgtcatcaaatatacagaataccggaaaaagcttgtttttcggataaggaacaaagatggattcagaataattttaactctctcatatttcaaagtcagtcaaaccctaaaatacaaaaattggcacccatcgccggggtcattaactcattaattacactcaattaattactgtgccaactcgctcagattgagcaggccatctttgccggctttgtggagaaggaaaaggaagtgcacggggagaacacgcgcaacggaattcattatcgcgcatctctgcttttcgctaacggtcagttttttgaattgcattggggagataaagtcctcgagactctggagtaaattttgaaatgccaaaatttggtttggggggatataaaaagaaaatgccgaactctgaacgaggcagcaatgccgagagtcacggttctatgagaaaagagtcgggactgagaaattcgaggagtctcaatcggagagctcatcaaatttgttacagaagttttgaggactgggcttggatgaaatttgtttaaaattgtccaaaaagttaatgaattgtcgtcaaaattctcggtttaaatcgaattggaccgagagtcgagactcttcaaaaaagggggatgagaaattcgagagtctcgagaccggatggaaatgcttcttaatgaaatgattatgtcttggccaagtttaggggaccaaataaactatttgtcagtccttgctcggctcatccactcgcccccggccacacccccgggcatcatgtaattatccgtaatgcaattagggggccaccccgaccgaaaaaaggggatcgactcatttccctatgaccgtttccctatgggccatttccctatgg

SEQ ID NO: 8592 - DNA, 1894 bp, Heterodera glycines
  unsure (1)..(1894): unsure at all n locations
gctcaggaatagttcaccatctttcgggtctcagcgcatacgctctgtctccgccccatcgcatgcgatcgagacgggactatgttgcgccccaacaccgcagtgccagggatcacacatcagctccgtaagaagccttcactttcattgcgcctttgggttttgaacacccaatgactcgcgcatacggtaaactccttggtccgtgtttcaagacgggtcgaacagatgaccggcttatacaccgagaacgcacaactgagagtccgagatggaccgcattggttgctggtacgtgtggcgcgcgagcgcccccgaccaaaagcttgagtgaacacggataagaaaccaaggcacaattcatccagagtaaacagccatccaaagatccgggtgccagactctgaaaggctgacgtgaagaaaaagcacagacagagactggagagcataaggaaggcaaaacgccggcttatggtggcatgtctcagtgcccaggtttcccctccccccccccccctctcccgtgccgtatctcttcgatctcgaatcttcccccccccccccccctcctcccgcattctcgagccattgcccaaatgtgtgtgcgcaataaaagcccgctgcctccagtgccccatgcccccgcccccggcaaaacgtaatttcgctaattaaaaaatgaggggacgtaatgggaggggaaggagggaacggggcacgacggacaaccgcccgcagaagacaattcccctccttggccaaagccgtaataccatggccataaaacgggggtggaggaaggggaaagcaagcaggaaaacgctttttggcacaacattgttaaattggtggagaggagaattggattgacggggagagggggccaagtcgagagtctcgacgggaattcttgcaagaatttatcggtctaaagtcaggaaggtctgaattttaagttttaattcttgaggttttgtttgtttccgatctcgcctcttttgagcgaaagtcgaaactctcgaaatcgatttccagacaaaattctcgggttcgagtcaggggagattcaaatgtttattcccaacttcaattcttttctcgactctttttatgtacaatctcggatcaactctcgggatccttctcattctcgagtcaggatgatagaaaatcatttgtcagatccattctcgacagtttttctatttggtatcaaaaataaagaaatttcaccgattcttgttgcctattttcgacttttcgtgactttgattttccctggaaaaagctatccatcgtctcgacttttcaattcaatttcctccgggtggtcttcgtttttaatgcatttcatcccccgaggggtacacaataatggcacttccctccctccctcacccacttttgtttttgtttttggcattggcgcaaaaaggcccatccatcggtgaccgtcgttccgccaatgtcctcatccccccgttatcccccgggggatcatcacggattggataatgaggtgtgcaactgatggagctggagggaggaagactcattaaggggacggtggcgatgccccgaaaattcattataattgtttatgcgcgcgtcattaggcaccctttaattgccttccctcgttttgtccctcgggggataattagagaggtgcgataatgctcacactttgcacatatgtgttcttgacttttcgaggtcaaactttgaatcgagaagaaaaaaaagtgttgaatttagaagttatacgattgtttgtaattaaaaaataataattcaaaattattagagggttttaattgcttttttanattgattccaaaaaggccataaaatttggcatnttaatttctcaattaatttgatatgccctc

SEQ ID NO: 8593 - DNA, 2577 bp, Heterodera glycines
  unsure (1)..(2577): unsure at all n locations
ttatttgagttcgtcatatgaaaaaatactgggcttctctcctagaaaaattcaggaaaatccatgtccaggaaatccagcttgctgaaaaatggcttggacctgctggacccaggaaaaacccaggcctggatctagccaggtcaggtcggactcgaacaaaatatatttaattattcaaattttcgatttttttaaaacattgtcgcaaccaaaaacgccaataagcggaaaaatttcattttaattaccgtaatttataaggaaattgcatccaattttaatttccccataaatttcaccccaaaagtcgttgctgcgaaaagaagagttgcggcaatcggaacgagacgcccagcgacccggtgatcatcgacaaatacttcctgaagttcttcctcaaatgcaaccaaaactgtcagttttaccgtacccataggggtggcatactgtaatcaaacacatttttgtaggcttaaaaaatgccggaaacccgcgggacatgcgccgcttccaggtggtactgtgtgccacgcctcgcgttgacgtcgacgttttagttggattttttaaaaaatttaaaaatgccgagcggggtttaaaatggaaaatttaattttttgaaaaaaatttctaattaaataattatggcgatcaattttgtaataattggagcatttataattaatcatatttttttagaattttaatatataaatcagtaaattttacatttttggaaaatttttgcattaaaaaaataaaaatttcgaaaaaataatataaaatttaaaaattaattagtgatatataagtacaatattataatttgtagtttttttctcgataaatattttgacctttttttaaatttatgttttcataccgtacaaataaattgtcgcaattttaatgcctaaaactgactccgaaaaacgcggatttgaagctaatccgaaacggaaatccccccgttttttcaaggcaatgtccgacaacatgttcgtgcacaacaattccaagcatggacgacgtggcaaacgcggcagcagtgaaccgtcgatggccgaaggtgaacaaaaaatatgcacattaaaaagtgatagaaagaattttgaccgtccaaaatttttacaaaaaatatgcctaaaaattctgaattttttatagaaatttcttatttacgagtcggaatattagaattcgggcactggctgctgtaggccctcctaacatagttaaaaatggaaatttgatatgttattggtgggcggtataaaactgtaaatttaatagtaaaaaaatgccatcatttaacctgtcgaatatggcatcattagagtgtttttaatcgaaaaatgccaaattcgctccttaacttcagaaaaaatgccatcattccttgagtcttattgatttggtgtctaaaaatggcattttcttcccaatcataattgtttcaagcccatcaaaaatgacatttttgcaatttgacatacaaaaatgctatccaagtcatcaaaaaaatatgccatatttttcaccccaaaaatgccgtcctcattttccccgccaaatgccgtgcgcatattactgtccaatccagaataacacccccaaaaatgccatgccatcattatcattcccatatccccctgtctccccgtcagaaatggcattggcaccctcctcctcatcctccaccgctccatcctcaacaactgccggtggtggcatcgcttcctcttcctcatccgtctcctcttcatccatagttggcacctgttcatcctcatccgccggtggcacaatgccgtccatcaaaatgatttttccgggcgaagtttggtgtcaaagtggtggcacggcgatgatcatcggcgaacagttccacgagggcatgcaagtgatggtcggcggtacggtcacttggcccgaggtgacgaaaaatagaggggatatggcacaaatgatggcatttgccatattttttttggaaaatttgtgccatctttttggctgccatttctatgattaaaaaaatcaactctttaaaaatttgtaaattttgtggtgaaattcaccgaacaaaattttttattttttatttcgcttatttcgttaatttttaactctcagtgaaattcattatttaaaaatgttgtggttagctaacaaaaagtttgttgttgcccccattataaagatggtcactgcccacgcgatcaaagtgaatgtgccggcccgggcaagtcccggcgccgtggacgtggtcgtctgctccccgaaggggcaaccaaaagtgcgctccaatgccatccgcttctcatnacgtttgtaagtgccaaaaataaacatttatagacttatggtaattaaagcagggcaaattccggcatttttggcagtgatcaaattccgaagaaaaaaaatgtattttgtaatttgtttggattgaaatgtttgtgattagaatttgatagcaaatttcacgggactgaattgaaacaaaaatgaaaaatgctaaaacttttcggtagttnaataccctganaacctttgggattttttttttgg

SEQ ID NO: 8594 - DNA, 1553 bp, Heterodera glycines
caaacttgggttaatatttaattttttggacattttttaaataattcgaattttttttgaaattttaaaaatcccgcacggttttcccgcaaattaaaaaaaaaacaattttgagttccaatccaacacggggttctattgtagtttatgcgtccaatcaatgaccattctcagtttcaaaggtcataattttaaaaaaatttaaaattttctcaaatgcttttaattttatgacaaattaatttttcggccgttaaattacgcttttccgttacaaatttgtagtaaataaacaattaacagttctttttaaacacagtttatttaatcaaatccttcgtccgaatccgaacgttccctcggggatgcgggcactcggttttcttcaatctaaaatagaatgaaaaaaacatagggcagctgcaacttgagccctgaattttaatttacgatatactttcaaataaaaatttggaaaaatctcaaaaaactaaaaataaaacaaattttgtccaaaaaataaataaacaacgctttttggggtcaattttttaaaaaagttaataaggtagagttgcggatcccggctgcaaggtttgaactctaatttttgcggaatctcatgggtttgattaatctcacaaatcccgcaattaatttgattgatacaatattctttcattagaactaaatatctaagaaaaaagattaacaaatttaccgccttcagtccggaattgacccatcgaattatgcgatcaaatttgtgtcgttttttcacgtgatcatcaaattgcagaatggcaaaatcccattgctaaatgccggagggggagggaagaaaaataaggaataatacaaaataagaaaatatttttttaactctaaaaacattggctatatttgtggtgctagtcatttcccaaaaaactcatattggccattgcctaacaagggcaaaaaactggaaacaattattaattttaataaatttatgtaattatttgccaatgttaaaaataatataaaatttaattttaaaaatagcatttttattggcctgtccaatttaggaaacgtccaaacaccatcatttttaaatgctgtttaaaactcacaatttgatcgtcctccggaaaccagccttcgcctccattcagttgaacaaaaaacaaatcgcattcgtggacttcgctaatcgtgtcacaatgttccgaaaaataggcgcggacattttctcgctaaaataaatttaaaaccatttaattaaaaatccatttaaatatttaatttaaattcaaaattaaaaaaggaccatctcgtgcgggtcttggtcagcaagaagtgcgcgtgcgcgcagtgaaattacaaaaacggactcttcaccatttgtccgctcaaaaagaattgggggtggccacattgcaatgaattatgcaaagtcctgaaatgggtattataaaatattcaccacaaatctttgctcaaaagcaactaaattttaaattgttaattttttgttttatgaaagtttattgagaatttttgatgat

SEQ ID NO: 8595 - DNA, 1839 bp, Heterodera glycines
agataaagcaaattgttgaggatcagctgagtgctctcttccgatccgcatccgttcagtgcgacactttgttcttcttctgcgctagtgccgcttttttcagcttcatcatccgtttccagaacagagaccgaaacaaggtcacagttggggtccacaaagtgcacattccgcagccattcgggcaaaatggcgagtaacgacaattgccgattgggtcgggcggattcgaggcgacagcaaatttctgaaaatggaaccaattcaatatgaaaagtaattgatgaccgaaaggaattgcctgaaaagatgggcatagtcagctgagggtattgggaggacaaactcttgctgatgccaaactgattagtcgggaaagtgctaaaaattagaacagttttaacttttctgcaatgattcctctcacatttctgactgtccatttgttgcaaaactgctgcttatttccattatcggcgtgagagttgtgggagagaaagtgttgttaaggaattgatgacgcaacaattggaccagcaaaaaggccgtttgacggacggaggccaattcaatggacgaagcgaaggattggcaaagacacagaagagaaatgtactcgcaggggaattccctaaaataagacaaaaccaattcaaattggattgcagcattgacaaagaaaacctttgtgagaaaagcattgaaattgcattgaaacaacggatgccgaccaagtcatttttggtgtaacacatttggacaacaagctccaaaagctaaaaggcaatggcttattgaccaaaacggcagaaaaaaccgacccgcggattatgttcattcaaatggagaatatggcaaaggatctgctcacaaatttcatcgacctgtgaaaattaatttacaaaaatgggataattgacattgctaattgttctgacaattgaattcgttgacgagagaagtgtttccaaccaacggaacattgcttcttcttcacaaattctgcccggacattcgaacattgggccaagggtggcgagtgcgcacatcgcccgaatggcatggtgttcaacagaaatgccaacatcgacgccctttctgaatcataaaagtaaaatgactttaatcagcaagaaaaccgaaccttttgtcgattgtaccaatggttctgccgcaccacgacaaaaacaaaaagaacagcgaacgttttatgtccggtggtaacagtttctcgcgttgttcaactgataacagaattaataacctccaattttttctctctcacttggcgtgccgttgatgatcagtgaaatgagcttggcaaaatgtagtctcaaactggtcaaaacgttcaggtcgcggtcctttttatatgaaatttttagaatttagatgcaattacatgatatccatacattgtcattttctgtatgaaaacggatggagtcgaacaattcgagcaatgactgaggcaaagtgccagaatttcgctcgaaaatagcacaattcttcaaaaagtcacgaaaaagggtaaattcaatgatccgaagaatttgtagtcgtaacaaatcttttcgcttccggcgtcgaacatttgtttcgtttttacggtcatttatctctctcaaaatgcctttggaattaaattcttcgagtagaaatctaaattaatcagtgtaaaaacagccaaaaggaaagcatcctactcgaaacattcgggatttatcgagccaattccgagtaccaccgaatctcgcacatcggtcgcctcccaacgaatcctttagaaatttctaattagagctgtcaaaaaaaaaataaaaatcaaacgctactaaa

SEQ ID NO: 8596 - DNA, 3427 bp, Heterodera glycines
  unsure (1)..(3427): unsure at all n locations
taaaaaaatatgtggaaatgacgagctgaccgtggaagctgttgagcactgagtgggcaaaaatttcttctcgcaataacccgacaaagcgcaggcccatggatcccattgcatatacccaaacaatgggaaatgaacaaataaaatgccttaaaatgcttcaaggccgtcaactcactcattgccattggccacattcactaaattcgcgtctgtctccaacatcgaaatgcgctcacaaaccaatgcgaaatcttttggccattttttctataaaataaaaaagcacaattaatttattaatattagctgctaaaaccttttccagcgccggaagatgcacgacgtatttgtcaagaacgtacggagtcgcggaatccaaaatgtcaatgaccgccatttcatgattctgaagtttaattgttagtaattgaaaacaaaatattgtattgaccaaataaaacttaccgatggtttgaacagttctatcaattgtttgacctctctaagtaattgaatgaccgcctttttagttgaaagacgagtttgacacagcaaagcaatgccaagtccttcaacacaatgcaaaacaaaggtgggattgatattatcagcgaaggaaagagaggaaatgatggaacggatgatttggggagacccatctgaaccaaaataaaagttgaaaaaatgggaaacaatggcaccagagcaagaggaagttgtgttgcccgttgaggatgtggacgtggcgatgatattggccgctgcttgcatcaccaatttttgttggcttggcgttgctttctcggccatcgatgggttcgtctgcgctgtcgattcgctggcggacggataatgcttcgtaaaattatccgaaaggttttgagtggactcttcgactttcttccgttgctgctccatgagaatgttcgccttccaaacagtgagaagttgcaacagcaaacgaaccattgactcaatcaaagcaggaaaagtatcctttaaaagtaaatgtaaaaatgacatcgaaatagtcacccacctgaatcgaactgatgaaaaagcgaatgaaattgtgaatgatgtcctcccgccattcggggcattcggtgaccaaattctgaagcgattggtacgccgttgttcgaagttcttcgtcgacatgaatgcacattcgagtcaaaaagtcaatcaagtcctggtgggacattgggtccggaagaagacgaggaatggccgcaatgcacgtccgaaaccttgactaattgaatatggtttttgactaaaatgtgcaatcacaagtccagtttggctttcatgtccgcgccgattaaatcgttgtattccttcccccgcatttgtggcgctgtcatcatcagcggtcggcctgtcaaatcgtttaatttcctatttgtttttttttgtaaattaccaatttgtccgtccaatgttcgcaaaatggcatcaaatgccttcctacagtgcggataatattgttctagaccaatggcccgggcaacatccatcgacaaaggtttggtgatgtaattgcgctttgttcgatgaattgtcccgctagtatttggcgcttaaacggaaaaatttaaacaattttaataagtcaaaaaccaagtgatctcgacattcccgggggactctctttctgctggagaccgtccgcgatgaccatcaaagcgcgcagaccgacattcattcgttcgggataaatggccaattggcgagaggctgctcgcgcacatccaatcaaatcgaaaataatctcctgacagtaatttgaatattattctttttgatttttcatccaaaaacattactttaaatgcaaagtcaactttgaattgtgcaataaaatggataattttgacaaaaaagttcagcggggcatcacgcggaactaagtttcgcgagccacgagggaaaagacttccgcaaatgctttcgaggcctaaaaaagcaataaaaaggggcaaataagagtgaaattttattttaactttgataaatttgtaaatgaactcacggctccttgtcgccgtattcccttcacaacttattcgaattatgtaaaccctaaaagaaaataaataaaatgaggaggaaaagtgaattctgaccaaatgaggcgatagagcgattcgagtgccattcgggaaaccatcgaatctttgttcttcaaatttgcaagagtcaaattcaaaaattgaacccaagtggaaaaggaagaatttgcttgactaatgcacaaaagacacgtgagaagagggtaagaagcctgaagaatggacaggtaaaaaacgacccaaaaaagagggaaaatataccatttttgtgctgttttttgttcactaattcgtaggttgggccgtaaagttgtcaacaaaagaaatcagtgaaggaatgttcgtttctgttctgatttgctaaaaatgaaagataagaaaaaacaaaaaacatgttgtttttctttaatccgcccatttttgtcctttcgaaaaactaattgtaaatgtaataaaaatttggaaattgacggagttaaaattaatgaattgtttttttaaaacaaatatcccgggtgattaaaacccaccgctgtcatgggcagaagaatctcaaccagaagtccagccaacgcatgcttcaaatccttttgtttcaaatccacctccaaaaaataagagccgagttcgttgagaaaacccactccaatttcaaattccgacacttggttagtctgaaaatgcatttaattgtgtttcaaatatgattaatatcttcgccaacttgcctgaactctgaaaaacttcgttcccatcagaagagatataatggaccgtaaagcaattgagctggtgagggcgtcctttctgtactcattgaggtggtcgaaaaaagttttttgaatttgtttcgaatgactttgggacaaaatgccgatgacttccgcgaacagctcggccaccaaaagactgttgtcataattgtttccaaaaagtgctctaagtgtaggatattttccaaataattcatttccggtaagaccttattgtgtttgacttacgggtctcggtaagaaatttgtttaaacgaattgtcgatgataaaattgatctgctcgtcacatccgcatgggtgaaaatgcagctgaggaagaatttcgatgagcacaatgcaaaaaaggtaactggccgccaatgtccgtttaattgccctgtcgcgagcatcgctaaattttgaacagtttaaaacaaaccaaacaaaaaaaggttacccaatttcggttatagaaacacgctgctgatgctcgtaccacatgatcatcactttcaatatggacggaaggcatgtctcacaaacgccactaagtgccctcagcaaattgcaanatacgaatcatcgcctcgac

SEQ ID NO: 8597 - DNA, 1876 bp, Heterodera glycines
  unsure (1)..(1876): unsure at all n locations
aaattttgtattttcaattttttcgctgttattttttttagcaattttataacaggtaaatctgtttgccttgcattagtcaacaaccatgccacgtatcatccagcttcaacaagaagttgttgataaaattgctgccggcgaaggtctttaaaacttaaattcctattttaaagcacttcaattttttaatagttgttgttcgaccaatgaatgcggtaaaagaattgcttgaaaatagtttggacgccggtgcaactgaaattcgtattgaaatcattcaagggggacttgaactcattagaattcaagtaaatcattatgaattattgaaatctcaagggggacttgaactcatttgaattcaagtaaatcattatgaattattgaaatctcaagggggacttgaactcatttgaattcaagtaaatcattatgaatctatcttcgaaatgatatttcgaatgaaggacaatgggcacggcattgcccgggaggacatgtcattggcgtgcagtcgttttgccacctcaaaattgcatgcggctgaggaattgcgatccattggcacttttggctttcggggagaggctcttgcttccatttcgattgtggccaacagcgtcacgataacatccaaaacacaatccgacaaatgtgctcatcgtgctttatatcgcggtgaattttggatatttacccggaatattttgaaaatattttaaaccaaaaaggcaggtgggaaattggagtccgattgttcctccgtggcgggtcttcaaggcacgactataaatgtggatcgcctttttcaaaatgccccggcaagaaaagcagcattacgttatccgaatgaagaagcgaatagaattgccgatttattagtcaaatacgccatccaatttccgtgagcaatgcaaaaaaaaaatcggcgaaattcattgttattttcactaaatgcagctcagtcagctttgttttccgtcgtattaacagcggaggaggaggcggcagttgtggtgactttcgcacaaatggaaacggagaccaacacagcacaattcgcacattactccatgccaaaatgtccaaggtaaatagctgaaatttttcgcatttactcatacatttttcaaaaaacgtttccaggacctgttcaatatcaacattgacgacaaagcattgcattttcgggctcagttctgtttgactagtccttttacgttttttacctccaccgctattcaggcgaaacaggcaaataataataacatttgttagaggacttttcattaacccttaggatcgtcaaagggtgtttcacttgttcatcaacggccgttgtgtggagtgcgttcggctgaagcaatccatcgatgctgtgtttgcatcgaaagatttgtactgtccattcatatctctttcacttttggtaaccaacaataagtgcttttcgatgcccatttaccgtcctaattcccccgtcctcttaataaagcctttctttcgaggggtttcgaaaaatgaatccccatgggtattgagaaatactacggtaatcggttgaaaatcgttttatttttttgatttttggatcgatgcacaccgagtcgatgttaacgtgcacccaacgaagtccatcgtccactttctggagcaggatcttattattgagagaatcgaacaagtgttattttttgttattanattaaattaaatttccaagatattaattactgttttacataataatcacgctcattgtgtcaggaattgcatcatatcgccagccaatatcacaaaaggngcaccattgaattgcatgtttccaaatcgactcagatgacactgctcacagagtgactttctgcctctt

SEQ ID NO: 8598 - DNA, 3455 bp, Heterodera glycines
tgaataaaaacacttttattagagcaaataccacaagaaaggaatattaaatatgatcagaagcgatcagaggcatattcgcattttctgatcactcaatttgatcgggtgggaaaagggttgtaatcagggctggatgtaagtgattttcttcggaaatccataatccacaattacggcgattttctcaattatccgcaatccgtcattatatagggttccaaaaacgccgtaatttccgaaatctgtaaattacgtacagccctagttacaatttgggtcaccatgtccatgctaatgagagagatatgaatgaagcctacaagaaaatcttagtttttttgaaaaattctaattgtaaatcttggttaatcaacttcatctaattttaaatatcaatcgcatattattacattatttccctggaaaaaatttttgatcaaaaaaatatgtacattttcaatgagttatcagagtggagaattgttttgcgatttgcagccgaagaggttcggatgtgggcaccgtaatcaccaattaccgtagcagttgctacagttaatcatgcaaatccgtttggcggattgtaaattgtcttttccttgtagtacacctcctcatgctctttgtcacagatcagcaacaaaagtgcgccaaatacaaagcttaattaggggtttttttaataaattatatattttttgtttttgcttccttacagtaatgctccccaagcgacaccgtaagaccagtcaaactcccaatttcgaagtccatatgaatgaatggacagatagaagcagatggggaagccgaccaatgcgataagttcggcgagtactgaacaaaaagtggcagattaccgtagatatttgctacgtgtccgaaacatataattagttactgtaaattagagttaaaattttttcgaaaccccaaaataaaatttaaaaaattcgggcagattcagataaaaacggagttagccttgatcactgataagaattgagaaatggtcgctcctttggactctttccggcaccgacttacgcccataaaaagtggcacacaacataccagacaaaagggacagccatgtggcagctttgtagaacacgtactttccgcctgcggatcacgcgcggacttcttcagtagcccgtagtctcgccccacctactggccgccgtagtcgagtgtgcggcggttttttagcgcaatattattaaacttaaatacctatgacccaatggccttcaattcttctccctctgttgaattttctttttccaaatttgctctcatctaattgcactattgagccgcgccctccgatttgtcctcgctcctgttctctttccaaaaaatcatcaacaatcatttcccggcagtagtgatacctaatttgataattaatttgattttataatttttttaaaccatgccgcgacactgtccattcctaacatcgtgtcattttcactttccattgtttcaataatacattttttgtatttctcttgatgcgcaaatgagtacataatactaaataataattattcataaaatataaaaaatatagttaaaaacaacaaaaaaaaagaccttaaaatttttgacagtggcatatgtgcattttcaaaccacgaatcaacaaaaagagctttttctgctctacaagtactgcatatgaatgagccggccctgcctctgtttttgtcaaaacgcatttcctttttgtggtgccgtgtcggccgttttccatagcagtaacgcacatttgttaacaagccgttttcaaggctccaatttataactttttgctcatctccaaaaaaatgtaagagcttgcgtctattccaaattgcattaatttgaatattatcacccattattgctaaaattacagtattaaatagatgtataacagcatatttcttgataaattcactcaaaaatgacgtttttttgaaaaatttcaaatgttgataaaaaaaaatttttcactatatgtcgccactttttcatacatttttgtgaataatattcaatattaagcagttttataacaaattcatgtcattttttcgggtgggctgagtccaagttttacctgtatcccaattaataaaatgtgtctttttgttttataatattgtataataaattatcaaaaatttataaggattttcacattcacttttgccaaagagttcgtatgagttcgtttcaaccgcatcaattttggcacaaagtttcgtctgctcattttgcgtttgcaaaagacgatcagcttaaagcaaaaaaattattgttcctaataagttaaaatgattaacaattaatccaattttcactcacaaacaatgccaatccgttccaaaattgcgttcagttcgcctaattttgaaattagttttaaaagattaaaaatgcttcgttacagtaggcattcatttacttaccgtaattttccgtttccttttcctcgtccttttgctgtttcttctccatttcattcaatcgtcccaaaattgtcttctgttcattttgcaattccaagatttggtcaataagtgcttaaaatattagggacaaattattaaaattgttttttaaaatttttaaacagtaatttttacagaatttccttttaattattaatttaattttttaatattaatttaattttttaattttgcaatttcaccatttccgaatcggtagttcaaaatgtcaacacaatttttcaatttgttttgttgttcttccaattcagtgctttttctttgggtggcattggcaacttcggcattcgcatttattttctgtgacaataaaaaataaaaataatattatgtaattgtcattatttgtttctattttctgtttaacgaaaattaaaaattaagtcagattttgttattctttgaattctaataatttagttttgaattttataaattttaaaaatttaaatcatttccacctcatcaattttcattacaaattcttcgtgcatttccttaaattgcccaaatttttccgacaattcatcgattttggcgcaaaattctgactgttcggcattttgttgttgtataaggctatcagcttaaagaaattaaaaatatgtacaattctaaatcaaaatttaccgtatttctccttctcttcctgctgttggttcacctgcttctccaattggcacattctttcccgaatcgcttcgaactgatcagcagaaactgaaaaatactgaactttatttattagttattacaaaatttaaattgtatttacaaaaatacagtatcactaccgtatttaccatgctgattattgtcgttctgctgttggttcacctgcttctacaattggcacattctttcccgaatcgcttcgaactgatgtgaagaaactgaaaaatactgaactttatttattagttatta
